United States Patent Application Publication US 2018/0305689 A1 - sequence listing, part 134

SEQ ID NO: 1885286 - DNA, 4001 bp, Homo sapiens
actgctgtgcatttgttgaaggtaggtagggctagaaaggaaaaggtaggttaaaacctgataaagaaagaagtcagaggcagttctgaaggaatagcagaaaaaaatatttttatgttctgataatgctggtacacatttccatagctttaaagcaataaaggccaagacatttattgatgaaatcagcaacaacaaattcagaactaccagtgccagtgtcaagcaagtctttttgttgaagacttactggatcaaaatctgtacttccctttaagaggataaatgtgaaattctgactaaataaatacgtggccaagtggtctcagtcaagagttatcaaaagtgcctctgtgaggacttctggttttagctcttgcatgtaaagcacatggaagttgcaattccattcttaaaacaagaacatgttaagaaaattgaaaataaatgactttccttggatccatcaataataagctaccactgtagaattattagaatggttacaatccataaacctgacagcacccattgctggtgaagatgcaaaacaacaggaactctcaatcatggttgacgggaatgaaaatggtacaaacactttgtaaaatgtttggtacatttttttacagagttaaacatagtcttatcacataatacagaaagaacagtcctggtttttacccaacttatttgaaaacttttgtctacacaaaaacttgcacataaatgttcatcacagctttattcataatcaccaagaactggaaagaaaaaaagatgtccttcaatagatgaatcatacagtatatatactttagagactggcttatttagcttagcaataggtatttaggaatttaccatggcttgataatttgtataaggtgttttccaccagaatatagattaacaattctaaaatctttatacctgcatcctgaagttgatttattaaacaaatgatgacaaatggtagaagccaggcattcttactattaaagtagaatgttacagataagcaaggggtttaagttagattgtgtggtagtagactagatttggaaacataaatataaactcatgtttaacttaatatgaatagacatgcttacatataggaatatttatagatatgtgtacatactttggttagtacacatgcatatttctttattctggcacacgagaggttctagtagcaaagacagtccattagcaacaagcaaaccaagcaggctgattatggtttctaaccgcaatctctagtaaaagaaactaggttctctgtgggaaaagggatggttgttgggctgggcagaaaatatataatatgaacctggggtattttgtagtgccagaatgtaataacatactcaaaaaagaaaataaaacaaacaaaaaaaaccccaacaataatagtatgtcaaaaggacacaaagccaactaaaagagcttccaatagtcaaggctgaaacaatttgagcaaggacatacataaagtagtgttagattttaacccaacataaaataaatattcatgtgcctatgttgacataaacatataatttgagttgatcaatggcaaggaagatacaaatgtcctctgcagaaaaatctgaaataatttagatagctagctactctgttatgaaggaggttaaacatagctcctcacttcttaactgtgggctatacatagtgatttccttccaacaaatacaatatggaaaagggaaaaagagtaaatttacagtgaagaaacctgataaaaactacctcaaccagatgatcaaggttagcatcatcagtgataactcatttgcatagtgtctaccctcgatatgatgtactgagaattgtactttatctatgtagtcttctgccccaacacccataactttgaccctgaaaaaatttgcaaacagatcccaattgagaaatattctatgaaatatctcacctgtacaaaacactgtgaaagtcatcaaaatcaaggagtgtatggaaaactgacatcaagagaagcttaggagacattactaccaaatgtcacgtggtatcctggatcaaaacttgaaagagaaaaaggacttgtatcaatatgggtttatacattttaacaagtgcattatcctaaatgtaagatattaataatagaaaaaactgggtgctgagtatatgggaactcagtagtatattcacaacctttagtaaacctgaaactattctaaaataaaagcattgatttaaaataataaaaagcaataaccaaaaaaagtgtctctttgatgcatgtagataattacttttcatgttttccacaattcatggccattcctaaaaacatattaataatagaaatatataaaatttgtatagtcattgttatgtgttagtcatttttctaagatttacatacaaacacatacatacagacagacccaaatacatatacatatgttcatatctgtggagtgtgtgtatgcagcatatctgtgtgtgtatatatgcatgcatacacacacattttatgtatatatccatatatattcaatatatatgtttgttataaacacatatgtaaattaaattaaccttataacaactgttgcttttactactattctcaacttacaagttagaaatttggagaaatactggagatatatattccaataaaaattgtaatttgctcaagtatatcttataattttttattagcatagggccattgataaaacctataagtgatttatgataattggcatttaattctcaataagctacccaatgagttacatactaacatttttccttttttacatatgggtaaactgaggcacaaaaaggtaaatattctacatgccacacatcctttgactagtaagttgtaaatattaccagcagtgtactttgaatataagggatctgattccagagtaatgtgcttaacctcttttctatcatggcccccaggctccacattaaaaattccataaaatcacaaataggagaggaaagaaaaggcactcctatatatagtatataaaatttaagaatatcagaggccaaaatgaaaattctaaaattttatagaagaataggaactcattctaagaattatactatgaatcagatttttcacctgcaatattacatgcaagaagacaaatagagcattttgttttttgcaggaaactattaaatacattagcatctaaatttcacatttactcaaacttttacttaatttggggaataaagaaaccattagataaacaggttatttgtgttctaccatacaaaatgcaggttgaaatattttgaaggttttatattaatatttacagaaataaatcaaggaaatgcttgaagacatagaaaatggaaatgttcaaatagcttgccacttaatagtttcttacaccatcctattatttttgagaactaaagaatacctaatgttattacagactatgtctcatttttatgctaaatgagaaaataagagcattctgaaatactccttttgtgagattatataaatatatatatatatattactacttaatcaattggtacatattaacatacatgattatctagtagtggaacatcatggacataaaaatagagtgcacatgcatgactattaatccaacagagaaaatttggcctatgtattgcaaaacacaaaagtggggcaggaggattaacaaaagaaattctgtaaataaaaagtatgaaaaaatatggtaggaaaaacctgaacaatgatctgctaaatgtagcttaaatgagttaaactcacaaagtaaaatccaaagatctttttgcatattggctaaagcaacatcattcaccagtacactatccgaaattgacaataaacacaatttccaacacccctcttccacacacaaatacacacagaaagactgggagatgggaatgatattcaagaaaaacaaaagattttagtggtcaaggcatggaat

SEQ ID NO: 1885287 - DNA, 4001 bp, Homo sapiens
aaaatcatcaaacaaataatatgaatatttttccaaaatgagaagatatgtgtttttagaaaatgcctgttagatacaaagactgaaaatgtaaacaagacacatcacaattaaacttcagaatgctaagtaaaaatataatctcaaaaatttccagagacataaaatgtgttaacatataaagggtcaagaattagaataacatcagaattctcaattacagtattgagggctagaagaaaatgaaacagtatcttcaaattgtggtagaaaatgattttccacctagaattctctaagacaaaccatcaattaagtataagcgtaagttgcatccattgccagacatttgagatttcaaaaatttacctcctatgtatgtgttcttggaaaagctcctggagatgttgcactaccaaaatgtcagaataaatcaacaaataaaaagacattgagtcttggaaacagtggatactacacagaaaaagtcaatggaagtaaatccacaggattctggcaaagaaaatgcgaggaacatagcactttggcatgaggagggaccaactagggtagatttgaacaagaggctagatggaggatgacactgagaatggtttaaatggtagccatgactatgaaaatggaactgatttatttatgtgtttaactatctgagacgaatatacagttctatgagacagtatgtggaataattaatgatcagcacagggaaatttaatgaaaaaacaaataagctgtacaaaatggaaaaagcagtaatagtgtactttgtggctcaacatgaataataattacatagtaaagactgaatatttaagtaaaaaattgttatacaaccattttgggaaaatagaggagaaacgtgtgtgggcccatgtgatttctccaagggtgcttcaacctcatctttcatagcagagagaatcaatagaaatgtctaaaataaacactgcttagaaatacaatagtaagccaggcacaatagctcacacctatagtcccagtactttgggaggccaaggcaggcagatcacttgagcccaggagttcaagaccagtctgggcatcatggtgagaccctgtctctacataaaattacaaaaattagccaggtatggtggtgtatgcccatagtcccagcgactggggaggctgaggtggaaggattgcttgagcccaggaggtcgaggctgcagtgagccatgattacaccactgcactccagcctgggtgacagagaaagaccttgtctcaaaaacacaaaaacaaaaaagaaatacaatggtatatatcaaaatagctttaaatgtttaatttgagataaatagttgaagctgggaattatacatattcttagtagtctttgaaccacttgaatcactttggtgaaaacaaataatcaaagacctgatcatttccacaataaggaagaacaaggagtaattcacagacatatcaacatggatcagtctctcccatttcaaaacaagcaacgcctcccttaacgtaatgcaccacttctctttacaagccagcttcattagtgttcactactcactgcctctacttctcactggccacttagttattcacctgccattattactgacttttttgttgttcaataccatgaattctcttctcttatttgaccatgttaaatcatcttctcttttgacttacctactgcaacttctgactctctattttcctctagtcactcttcatttcttcacacctcctccaaaagttctacttttgctatttgacatgaaaatatactcagaaaacaactgttaggccacagcaaactcatttcctgggtggcatcagagtcgggggtggtcttcccattgcacttccttaacctaggttcctgtctggactgtcttctgggctgattccttagcaaagtgctttctccctgcttccctggacttaaattccaggcttgcttgcttcctgacctgctgacatgtaagagtacatcaccaggttcccttgaactatgccctgactctctgggccttttgcgccttcttctgctcagttccaactcctaagaatgctgctgggccagaaaatccagttcgtgcttgtcccagctaagaaacaacatgtgtgatggccccaaggagaaaaggagcatggaatgtcaaggggacagaagaagaagtccagggtggccacagtagagagagttagggggtcagtgaccagagatgatgctggaaagatgggcaagggccagatgtcacagggccttttgttccccttatagattcttgtcttaaagagcaatagaaaaccgttcaattgcatagagcatgaacaatttctgaccagattttcataaaaaaatgagtttgtatgaagtacagagaatgtataaggtatgaatgagagaaaaccagttatgaattgtgcagatggaagattacggtggtagaattaaggtggtgaagatggagagatgcaattgaaacagagagaattaggaggtaaactctacaagacttagtaatgacttggttagggattttgagggaacagcatcaaagatgacctccaggtttctggcttgaacgtctgagaaactgatggtgccagtcacagataaagcagatactggaggaggaccaagtttgagggagaagttaccagtttttgagcttgagatgtgtttgtgaccactgggtgatgatttaccagaagtcatttggatatacaattctggaaaacattgaatagaagaatgggctgagttgatatttataaaaaatttaccattttttatcaaatggtgtgatcggccaggcatggtggctcacacctgtaatcccagcactttgggaagctgaggcaagcagatcacgaggtcaggactttgagcccagcctaggcaacatggtgaaacccttctctactaaaaaatacaaaaactagctgggtgtggtgcatggtggtgcacgcctgtagtcccagctactcaggaggctgaggcaggagaatcgcttgaacctgggaggcagaggttgcagtgagccgagatggcaccactgcactccaggctgggcgacagagtgagactccatctaaaaaaaaaaaaaaaaaaaaaaaacatgttgtaccagttcctatcactgctcactgctatacaaaattgaaaattgtcacaatctatctgttggtggccttaaacaacacagatctattatttcacagttctaaaggttagaagcccaaatgggttacattttattaaaatcaatctgttagcagagctgcattccttctggaggctctaagggataatctattctcttgcctttctcagcttctagaggtcatctgcactgtgtattccttggcttatgtctccttcttccatcttgaaagccagcagcacagtgtagcatcttcaactcaatctctctctctctctctctctcccccccaccttctctgacttctgcttccattgtcacatccccttctgtgacccttctgacctcccttttataaggatctttgtgcttacatggagcccattcacataatccagaacaatctccccatctgaagaccctgaatgtaatcacatcttaatttaaccatgcattttgccatataagataatatattcacaggttcctggatttgaatgttgacatctctagggaccactgttctgcctgccacatgtgtagggacacgactctgtaaatgcttattgaataggtggttttaaaaaaggaacgcaatttttaagtgagatggtgttttcccctaatctgatagaatcaaactcagaaacatagggagatttaatggatgagccaggggaaatgatgaaatgtatagtagtgctgaaaccaagttgtttttaccaaaaaaagttttacgtgttttgctcctaaaaaattctcccttttgaacacgtataggaaagataatttatgcctaaagcctgtcatctt

SEQ ID NO: 1885288 - DNA, 4001 bp, Homo sapiens
tgtctggttgcttttgttgttggataagacctgattttgctctctgttctgcttgggttgtattagtgtattaaaataaataaatctaaacaaggattcttagtaatatgcctcatgattaattagaaaaatcctcatgaggagaggttgcccattctattcaagaggttgtaatctcctccggcttcacggggcagacactgagtgcgcatctaggatttagggttaaccagcatctcatctttctggttagtctaatttggttcactgcaactttcttcttttctcagttaattgtattccttttttcttagtacctttgtttcaaaaggtattcaaattcaaaggcctccctgatgagctggtatccatgcaactagggcccagtcccccaaagacagtaccatcgttccaacatgtcaggtggaaactgatcagtggggcaccagattactagaaaacagaaaagttctcagtctccactgtcttgtgaggccccagaaggcaggaactcttgtttgattcaatgccacctctgaggtccctgaaacagagtagttcctcaaatcacttttgcggaattaatcactttatttaaaaaaaaaaaaaaaaggcttcaaaaccaggtgaaaagctgacctatgtcacaaatcctccaagatcattatatcatttatttatttactaaaatatttgccgagtgccaactacaagtcagatagtatgctagcggaatgtctgaaataaagagattaatgcaactatttagtctttgtcctccaaattactttaagatctttgctatttatggtttcgtgtgacatcaacaacaaatcatgcttaattctccatgctgctcaatcataatgttgcacttataaagcaactaaaaaatctttatgggaataaaccagtgatgaagaatattactatcttagccaggcttggtggcaggctcctgtaatcccagctacttgggaagctgaggccacagaattgcttgaactggggaggtagaggctgcagtgacacaggaccatgccactgtactctagcttgggcaacagagcgagactccgtctcaaaaaaaaaaaaaaaaaaaagagtgtcactgtcattttcccaagaatgcccggcttttcccgttttccccctctctcccttcagtgtttttaaccttaaggtttcattgaaaaaataacaacacaattcagctattttatatccagaaattaaaggcactcgtttagagaatatacatacatatatgcatgagacaacgtaatttcactgacactaaactttctagcatgatttccttcagcttcatcttacctaaaatcaagattctctctaaaagcaagccccaaaaaagtatacttcacagattgatatcaaaaacacatactttaagaaaagtaattaagatatactgataacaaatgcagaataataaaatagggtcatttatctttggccgccttttccttctgcttttggaatgtatttcacagaaaacaaagaagtcgtaaactggatttggtttgaaattgtccctgcacatctttagagcatgttcagtgatcactgggtgtaatatatgctaatctgaagttgaatgcagcctcaggtgttgtaacattcttgctctcagcctgaaggaaaggcattaattaactgcagttctgactcgcaaagccaaagtagaatatctcactgctgtagtgatccagaaaccactcattctatgtaagcattttcaaaactccaaaggatcctctaaaagtggatatcattatgaaggctttgacccagagccatcctcagtggtaaatcctctccctgggatttttgccagcctggcaaggagatcaatacaacattcagatagatttatttccaatagacaaataactcacgtatgggaaagtcgcttaatgcaatcctgagcttccagactcctctgcgtcattctgctccccctgattgcatttcttgtaagcaggacaggccttaagggaagtctttgaagcccttggacacctcttctgcgccctgcaatcaccttcgagggctctgctctcaccctcttgaaatcccatcatatgaataaatgcttatctatccccttaagaaatgaggtcagcactttcaggaagcagcttgcccagtgaggccaagagaaccagacattgagctccttttcctttcaaagagactgtctctatcaggagatttttggcaagtgaaacaaccccactcaaactaatgtaggcagaaaagatttaatcaaacccgccgcataacccacaggatcaggaagatcagaaaaccaggcctggaggatacacagttggaaaagatgcccctttcttgcacaggacagaacagtcacgaaaacagcaacaaaggacctggtgaaactgaccactgcaccatcccccttagactgagtctggccctgactcatggtggctgcattcactgttgtgtcccaagcctgatatccaaaagccagtccctaaaagagagtatggcaacagaacgtatgcctggggtcaggcacaggagggccgttccatgggggagtctgtagacaaagctaaagtgaaaacagacgttaatgacaggagcagcatcaaagttgtcaaaggcaaaacaagtccaagccaacaggaacacagactgcttatttacagacctgcaacaaggaaacccatctgccttgtcatcgtttcagcaggggttcaagggtgttagaaaggaaaggaagctttatcaagtaaaagagagcttcctgtgaggccatgtctgattggcaagcatgctattaaggtgaaatttttggaagtgggcagactttctaattggttttcagatacatatgatagcccatggttggctgcaagcagggtaagtgagccatttggggatgtttccaaggagaatggatttgttcatttctatgctgatcattttgtggagcaagagggggtcccgcaggtgtattacagcgatgcaatggttctcaggacaagttgactgccagggctttagactgtccttgagaacaaagtctaagggagaaactgggtcaggaaccaagggagtccgcctgtggcacagatacacaaagagaaagcaggcgcagggtggcactgactgccatctctgctgggttttcctactccagtcacagatcctcaggggagcatctgaatccttcatgtcttgcctggctttttggtatggaaatgcaatcttctcatttggcatgatgaattgttggaacagccaattgcctttacattgtggttcttctctacacaatcaaatgatacaacttttggacatgaaagtaaggatgctatacaaaatgtgtttggatgaatgcatcagtgaggctgcccttataagggttaaaacattgggcagcaactgacaactcatccaataatacaaaattatatgattgttttccaaactggcccagggacactaaaaaagactttcaggttaataatagcttagcctctgtcacctcctcctatattactctctctctctctctctctctctctctctctgtgtgtgtgtgtgtgtgtgtgtgtgtgtgtgtgtgtgtgtgtgtgtttgttggagctgaggattgaggttggatggatagaaagaaaagaataacaaaatctaagaactttagaaaatagcttgaaaaaaggtatgtgtttctacacagcctgatgtaaactttacataagtatacaagcttagctcctatttagctttgagtaaaaatcagatgatgaccattacttcttaatatccaggtagctgtttaccatattccttctgaaattaacccatgcaatatttatcttgaatgcttagtacctattcctttgataaactgcctcttacaaataataaaaaaagaaataagagttgttcaatctatccacttgttttaattaaaagtaaaatttctggaggaaagaagtgtc

SEQ ID NO: 1885289 - DNA, 4001 bp, Homo sapiens
accctccactgtgagagttactcgaagctcggcatccgtgatggtctagggggcttccaaggcgattgggcagtgtcagtcttcagctgctaagccgagaagatctgggaaggagtcagtcagagaggcttgggccagagttccaggggctctgggagtggctgccagatgagttgaacagtccgattttcagtggggtcctgcacagatgggacgcagcttaggacgaatcccgggctgcgggcattccttggcctcatggccagatttctggcacttgtagcaagcccctgggggaggcaggcctggaggaatgcctggccactgcgatttaggcgtttggaagttcttgtgtgctggagatgtgggtggggtttgtctcacagtggaggcaaggaagtgcaactcagaaatatgttgctattggctgtctctactctattattgtacaccttgaaggcaaggttaattaagtcctgttgtggggtttgagggatggaacttaatttttggagttttatttaatgtcgggaatggattgggtaataaaatgaatattgagaataagacagccttttgaccttttagggtctagggctgtaaagcatctcagggtgctgccaaacaagccatgaactgggctgggtttttatatttaatgaaaaagagcctaaacgctatgtgatttgggataaagaaaaaggagcattaaccttgactatgcctttagctccagccacctttttaagaggaaattgctgggcaggtgggggagggctagtcacagaaggaaagtgtaagcctgaccaggtgtgaggaggagaggtgataaaaggattatagggtggaggaacggaggctgaggaagaattgggacctagcttggcctggtgaggaggggagaggtcagatgggtctgtagagaaggaagattagaaagactcagtgacgcttggggttggtactgaggggacaggggggagggaaagaaggaagatttgagatgagttgcactgggaacagagactagagagggactgatgtgtaaaagaatgcctggacgtcaggcacctcagaccgtttgcccattttacaacaagaattatttagattttgtagaatggaaaaattcaaagtgccattttctggctgtttggaactactgtcaagtttgtattggggtcaaatggcattgcagaaaataagacacttagattttaggtcaggcgagagttgaagaggttttaagttcttaagaacagaggctaagggagaagaaggaggaatggagggtggaaggttgcccatagtgaaggaggcaagtttaaagagaagggtagggacacggagaaggggggtggggagcagccctgggctgcaacgtaggtgagcagccaaagcaggagtccctgcaattgacttgccaccaagggaacgtgggtgaatgatcaaaggcaggcgtccccgcagagatcagacaccaatggaacgtgggtgaataatcagagaggcacccccgcaattattaaacaccaagggaaggctgcctccccgagtccgtgactggcgccggagttttgggtccacggataaaatgtgtctcctttgtctctaccagaaaatgaaaggaattgaaattaagagaagggagagattgaagtgtggcgccaagatagaaaggagaaagaggttgagggatagtgagggaggttggagaagagagtaaaaagaggccacttaccagatttgaaattggtgagatgttccttgggctggtcagtctgaggacctgaggtcctaggtagatctttctcacggagcaaagagcaggaggactggggattgatctcccaagggaggtaccccgatccgagtcatggcaccaaatttcatgcgcgtttgtgtgaagagaccaccaaacaggctttgtgtgagcaacaaggctgtttatttcacctgggtgcaggcgggctgagtccgaaaagagagtcagccaagggagacagggatagggccgtcttataagatttgggtaggtaaaggaaaattacagtcaaagggggagcaggtgtgggggtcaaaaggcgctcagtaggggagcttttgagccaggatgaaccaggagaaggaatttcacaagataatgtcatcagttaaggcaggaacagaccattttcacttcttttgtggtggaatgtcatcagttaaggcaggaactggccatctggatgtgtacgtgcaggtcacaggggatatgatggcttagcttgggctcagaggcctgacagttttcccttagggcttctgtcaggccagcattttaatatgcttgacatttttgactttccagtaaatgtttaaaagaaattgtaaactaaatttagctgatgaatgttgttcagttttacatttgtatattttatttacaagtgactttaaaaatatttttcaacaggatttcaatgatcagcctaatgactcatcaatgtgttttatgtcaaatagtactggacatcaagctgtatccatcaaatagtaaaattctactaaagaataaaataacatgacaaatacttttttaaaaatacccatccatgtcgtctttagaaagacatattaaactacaaaattaacattaatataactaaaacaagtgactactacttatagttgcactattgaaggttttcattgggcattacattatctctcctaaatgtttacttgtttactaatattttcaataaaaaaaacgctttttactttgaaataaatactcaaaatccctgaatacatgtgtttgataatgagattcctttcttacagctatgttgctttctctgtttcattttttttcttttgctgtcctgctgcctccttattaacacttttaggtttgatatgcataaataagaaaaagctctcctttgtttctctctttagcgtcatcagcagctattgtcacgttaagagttcttctgggccttccaagatgcataataatgataatgataataacttccatttattgaaaacttactaagcacttcgtgtactcttttgcaaaaacactgagacatataaatcattaatataccttttaagaggcaactgagcctcatagagattaagcggcttggaattaagcagctaactcagtcatatttatggtaaagggcagagccaagattcagatctagataatctttattcccgttctacactcagatattacgctatcctgagcccaataaaactactgaatctcaccatggtttgggaaggcaattcagtctctgtactgcatctgttttcatttatgcataagatatgttagcgtataactactattgataaattttaacagggccactcctcctgagacttgctaagtgatgaacaagtcagcaaagaacactttgggaaaggtctctactttcttatctctatgcaatatcagtgaagctcactcggtatagaagggtcagatgtctgaaaaccagacaccacatgttctcactcacaggtgggaattgaacaatgagaaaacttggacacagggaggggaacatcacacacccgggcctgtcatggggtggagggatcagggagggatagcattaggagaaacacctaatgtaaatgacaagttaatgggtgcagcaaaccaacacggcacatgtatatatgtgtaacaaacctgcatgttgtgcacatgtaccctagaattaaagtataataataataaaaaaaaaaagaagggtcagatgtcctagatttgggtcctaggtctactgcaaaactcttcaaaaccatgggagaatgggctgcctcagttataacatctataaaataaagataataattgcacttcctttacatgatcatggtaaagattaaatgtaaagttctttgaagagtactaggcacatacttatctaaaaaaattttacctgatagtattatcacggttgacccttggaattatgggtattgatcct

SEQ ID NO: 1885290 - DNA, 4001 bp, Homo sapiens
tttatcgagttgtacagagcaattgtacagagacaagggccctaatgattaactgggtacagtgttgccggtggagcagaagagctgggcagcagcagagagcagcatcgggccaggtccagtgcctcagtcaggagctgggcaagagtagcccagagtgtgcacagatcctcgggcttttccaaacaggaaacctgggcattcaatactatggatattttgaggggagtggcaaaataaggcaaaatatgttaaaaatttgaacttgatctccattagaagcatagtaatcctagttttgaaaaacttcaatcaaaatcattcaggttttttaacaagttctagaaatacattttctaaatgaaatatgaattggatgtaatacagaaatggcaaccacatgcctcgtctcttcccatctgctgtgttttctgcagcatgatgtggtagaaggaagcctggaaaaagtgtcttgggtcatgagtcccccactcacttgctgtgtggtcttgggcaagtttcatttctctgaggctcgatgccctcatctgtaaaatgaggagagtggaatggatgatttttcagtttttttctaggtctaaaactctgtgattcttctggaagtttttttgtttgcttgctttatcctctgcattctatttcaataggaaaaggggaagaggaaaagcagaaagaaagagcaaaaaagaaaaaaattaaaagagatccaaatattaaataagcctcaatcaagtatcaagcaccatagaattaataatcagaaattactaatttctgattaataaattacatttattaatcctgatcataaagtaggaaatacacagtgttattgtcaccatttcagaggcgtggactccaaggttaaacgtttgaccaaggttaagtagatgtcttagtctatttggggagctatgacagaatactttgaagtggatggctcaggaaaaacaaacttctttgtcgtcattttggaggctggaagtccaggatcagggtgccagcacaactgggttctggtgagggcccacgttctggctcataggtggccttctcgctgtgttctacacttcacatggtagacggtgcaagggatctctctggggccccttttattcgggcacttatctggttttgaggactctgccctcatgagccactcacctcccaaaggccccatctattaatactatcttattggctattaggtcttagcatacgaatttgggtgggggacataaacattcgttctatagcagtagtcaaggtgataatttaacataaatcggggtgacttcagaatgcgtcttctttcccacgctcagtctttctacaatgccacactgtctccggaaaggggtagaaaaaaaaagaggaataaagttagacagtgggagtggagagggaagaagagacgttgagagatcaggggagacacatgtgacacggactactcacagtgattccagcaattgctacacagacgcctcccacacaatggtcgtaaccttcgttctcatccactgcgtgggaaagctgcaacatgctccccgctggcaatggtggttcatccagggtgactcttagccgagaagtgtgcatgctgggtccagcagcgtccaccaggggcacatgcggagtttcataacaatgtctgggtacctccgatgtcctggctggagaaggtttagagacatagcaagggagacagatggattagggaagtggggaaggaccagacaggtctttatttccctactcctctccgttatgtgtctctaaaattaacactgcaagaactatgctaagaagcaagcttttatgttataagaattagagccaccaaatcaaccctgtgcacatggcacttccgtcacctcatgctgtgacctctcataggtctcggtcccccaggtttgaggagatgagtccccctggctgaggcatttctaacagggctggaggatttctgcaggaagtggttaccggtgagtcaggatctggcgttcatccctctgagtcaataatgagccgatttctcagtgggttaggaacaagtggagatggagtcttaaataagtggcaaacctaccgcgagctctcccggcaccttctctccgggcaaggaggttaatgccaacgtgtttcctcagtcccaatttgggtcattatatttttaattatctctgaattatccctatagattcaacaggatacattatcttccatttcctacctttaacttgaaagcactgatgtgctgcttaggctggtgactgttgaacaaagcaacttctccaaaccttgcctaccctcttctccactctcgcccgcaattccctcaccttttctcctgacgtccctctcttgagtcctaaataacggccttaaagaaaagcaaatgcagccgggcacaggggctcatatttgtaatcccagcactttgggagacggaggtgggtggatcacttgaggccaggagttcgagaccagcctggctaacatggctaaacccctctctacaaaaattagccgggtttggtggctcatgcctgttattccagctactcaggagactgagacaggagaatcgcttgaacctgggaggcagaggttgcactgagctgagatcgggccaccgcactccagcctgattgacagagtgagaccccatctgaaaaagcaaaaaaggaaaggcaaatatggctgggcgcggtggctcacgcttggaatcccagcactttgggaagccgaggcgggcggatcacgaggtcaggagatcgagaccatcctggccaacacggtgaaaccctgtctctactaaaaatacaaaaaattagtcaggtgtggtagcgggcgcctgtagtcccagctgctcgggaggccgaggcaggagaatggcgtgaacccgggaggcggagcttgcagtgagccgagatcgcgccactgctctccaggctgggtgaaagagcgagactccatctcaaaaaaaaaaagaaaggcacatggcgggtgttggtctccctaatgaattcatttgccttttgttggttcctgaagacagagagagagagacagaggccacacagagaaaactgggaagggcgaaggctgcgtgtcccctgctcaacctccctgcgtccggagggagcggaatcgggaatctcttagcgaaaggcaggacccgcaggactggctcacagggctggggctggaggggacttggtgaatgactgctctctgaattccctccctgcttgaactcgggccctcctctcctcttcgcgtctcccagggaaagcagtaccccgtggaaagggagagcgcctctgctatgcgcgcacagggactcaccgaggcacatagcgtcctggcatggagaggcgagcgctggggtccggcctgctggaaaggaagaagaatggagaagaaggaggaaagtccaaggagaagcctcacccgcatagctcattttgggaaagctggcctgccctgccacaaagaggtgctggggaagtgtgtcagctgaggggcccttagggagacctctggtccccgaatgagcctctcagccgactcctccttagcttgttgctgatcctgtcccaggattaacatagaccagggtctctcaacctcagtgcaatggacattctgggccaggtaatgctgtgccgtgcgggctgccccgggcactgtgcgaggcacagcggcaccctggctctacccgggagatgtcatgagcaccgcttctcccacagtgacaaccagaggggtctccagacgtggccaaatgagaagcactgattaagacctattcctaggccaggcatggtgcctcaagcctgtaatcccagcacttgggaggctgacatggcagaatcacttgagcccatgagttcaagagcagcctgggcagaagagtgagaccctgtctttacaaaaatgtaaaaattagcttgctgtggtgacatgtgcct

SEQ ID NO: 1885291 - DNA, 4001 bp, Homo sapiens
tgtattgagcctgtccggggccagtctgggccagtccagagagtgagaatagcagtcagtaggttaagaacacaggtttctagttcaacagaccttgactcagtcccatcctatcttattagcggtgggacctttgcagctccatgggaggatactgggggaagccactgtattcctcccctgcctgtctccaggcttagcagcagccagagagcctgttctctgaaaacgctgcctggcacacttgttcctgatgctgggatccctttacaggaagcataaccctttattttagttcaaattaaacaaatactcaaatgccctggtggaagcagttaacacccacaagttaaaacttgcctgaagacaatttctgcagccagaaataacgtgcagacacttagctgggggtaggagctgaacaccacagggaggagacacgaagttggaaaagaggaactgagagcctcagagtcaaaattcattacttcatgctttttctttcgacctgatctcccttccctttcttatttttgagagaaagtttcaattcctgttacagctgaattcaccgggaagtatgggtaatttgtctccatacttaacctgcgctttaagtgtaaaattttggccatttatttaaggcctggaaagaatttaccaactataagaaaatcatgtgactttcttggtgaaatggcatcagaagatttccggggaccaaagagcaccataaccaggtgtagctggagtcaggccattttgtgtcagccagtgccaaagtccttccaggtggtggctgctctttctaaggactatttgaacttacagcaatctgatcaaggcaggttttagagtttcaggaatgctggtgagccatgtcttgcatgtttaacccaaagcttccctggagttggagactgcactacttttcatccatcatacactttttgggcactcgcttgttggtgctgggcactgtgttagactccagaaagacagataattgtttagtaaaggaaaaaaaaatgctgtttctgccctggaaaaatgtgcctgacacagaggccttttgtatttctgttctggtcaaatagcaactctctcctcgaggccataaatgctgaagcttagacctagtatttgatagcacaacagggtaactatagtcaataataatttaattgtacatttaaaaataactaaaagagtatagttggatggtttgtaacacaaaggataaatgcttgaggggatggataccctactttccatgatgtgattattatgcattgcatgcctgtacccaaatatctcatgtatcccacaaatatatagacctactatgtgcccacaaaaattaaaaattaagaattaaaaaaaaaatgccacaagacaggagaggtaagttagcctagaaagagcttgttaaaaaaaaaaaaaaaatcctttctttacagtcgaataatattttagcaatgctgccctctgcagagcaaaactaggatcgcaactctaggtggttaaacgaacttcccaacactggttaatttgaagagaactggaagattcaatggtcttccagagttttctcacatacccccctaaaataattgtgaataatcatgtgcctccttgcgtgtttttaagttgacatctaaatttgccttatcaccttaatagttgcaaaggatgttctttcccacacattttctgagctttaaatagttgcagattgagcgtatccagtttagtttatgaaaaacaccatctgtatcacctggtgggcaaagccagccctcattgtcagaccaatcagctaactttgaattgctttctgacagaaaaatagtttactcgactgtattaatcacgctgctgataaagacttatccgagactgggtaattcttaaaaaaaaggaggtttaatggactcacagttccatgtggctggagacgcctcataatcatggtggaagatgaaggaagagcaatgggacgtcttacatggcagcaggcaagagagaaagagagccaaacgaaaggggaaacccctataaaagcatcaaatgtttgatgaaaagactttgaaattcattgttgaaaagacttattctgttcaacattgttgaaaagttgtttgaaaagacttattcattaccatgagaacagtatgtgggaaactgcccccatgactcaatgatttcccactggcaccctcccacaacacgtgggaattatggaagctgcaattcaagatgagatttgggtggagacacagccaaaccatatcattgactgacttaaattcaacagaactgtgctttggaggacatcgttgcgctgctgacttctaacactgaggtaggtgactagatagagctggcgcaggtgacccaggcattgctcctttaggggtgccttctgagaaagcaaaaggagttttactttcatgggactctcctgtcttagctctaaattttcttattgtcccattgtttggtgcaagttctttttttttttttgagatggagtttcgcttttgttgcccaggctggagtgcaatgacatgatgttggctcaccgcaacctccgcctcccaggttcaagtgattctcctgcctcagcctcccgagtagctgggattacgggtatgtgccaccatgcctggctaattttgtgtttttagtagagactgggtttctccgtgttggtcaggctggtctcgaactcccgacctcaggtgatctgcccaccttggcctcccaaagtgctgggattaccaggacggtgtattataagtttcaggatggtaaaaggtgtatgtcttctcttgtaaacagagagaagggagattgtgaaaggtacaagaggcaggggagcagcccactgagctaccccaggaatttccctgacaatcagttttaaggaggacatgcagaagttgaagatgtggaacacacatcccatctaaggggtgacatccttcagtttgtggacagctggtctaattcactggaggaggaacacagctcccctggggccatgctctggccacagaacagtgtgcaagaggtcatttatgttcaggtagcttttcttatctctccactcttgctctggtctttaacagctttccttcaggggcacgtagagggcatggctgtgatatgcctgtgtcatgctttttaaagagtagtcctcctggaaaataactcatccttctctaggtctggaagatgactttggcctccaggagctgtctagcaaaagctgaatgccagtttacagcagctgtctgttcatacagacaggtcaagaggtttcctgcctggtgggtggctggacaaagtgcccagggtggacgaagatagttacaccatagggcctgagtgagcgggagacactaagatgattcactgtctgctgaggagcaccttgaaagtcagaccaggatatttcaggtcctacaccacctgaccactgcccgttgatagaacctgcttccccctttgaaccatatctgacttgccttgactttcacctttgtaaaaatgggaatctttttaaagctataatactatttcctgattactgctttctcttcactcctctaacattctgtaccttttttttttttttttttttgaaaccgagtctccctctgttgcccaggctggagtgcagtggcatgatctcagctcattgcaacctctgcctcctggattcaagctattctcctgcctcagcctcccaagtaacttgcattacaggctcatgccaccacctcggctgatttttttgtatttttagtagagatggggtttcaccatgttggctaggctcgacttgaactcccgacctcaagcgatccactcaccttagcctcccaaagtgctgggattacagctgagagccacctcacctagccaacattctgtactttttaagggcatgtcttgtgttttgccttgtgttataattctttaactacatgtct

SEQ ID NO: 1885292 - DNA, 4001 bp, Homo sapiens
ccttcctaaagaccctcagcaggctcttgcattctttctgtggagcagtttcacggtgcacaggtatcaatcccaggggaggactctaaacacttcaccggtaactatgcaccagtagcaatccacttgcacaagtgcagtgagacagagaactcacacagcaagttaagtgaagcaatcttccaaggctcagtagttctgcccaggccccatggagcccatttgcatgtgccctatgttgcaccacagctgagggactgtgaaagcacactctgccttaggttttatggccaggggacccagggatcgctgggataaagtattgcaggacatcctgttctaggggtgacgggaacagagcccaggctatcccagccaattcctccttttctcaggatgttgcattcccagcacattctacagttattctgagaaccacaggcaagtaatgggggaagagctggttatccaaggccatctggggacttgtcctgcactttcctcctctgcaacttcttttcttccatttcctaaagtcttgggatcttaagtcgtctagatagcagacaaaaccacattcagagcaattacatatttgtttaaacttattgcttaggtcaagatctcggctcctgaagttcaaatgaccgtagctttggcaaacaaaaaaacttttttttccccaaagatataatggacttcaaaagcatattttgaactctgaaagctgagtcttaccattttttctgtatctttgcctacctattccagtttaattgctcagccctgccccatccctaacctcctacaaacaatacacaaatatacttgctctcacagtctatgctccaacaattttgagcatgtttcctgaatatgttattgtcctcttgcttttctaaacattgcagctatcatctgagatgctgttaccgtctctgtgcagctaatgaattcctatgcatttctcatgtaagactgggaccccagatcctctgtttccgtcagaggcccagcatattcccatgatacatcacaaaaatgctcaggccaatttctatacagtgtcagtcatcgtggtgccccagggctgacttcccataagttggctctgacttttaccgaaagagggttgtgatgagagtgagaagtacagttcttcccctctgtgacaggcacatcagccaaccagcagagctgcacttgagtggctcaatcatctcaatcagaggcggatgactccttttcttgggtcatgacctcctttccccctttgagtcacatggcagggtgggttacttcccttggtagtcaaatatgctacttaagatcatgctagtttgtgtagcaaatagatcccacaataaaacaggtcaactcaatagaggtctattcttactcactgttttagtccatttgggcatccataacaaaataccatagattgaatgccttataaagaatagaaatttatttctcactgttctggatgctgaaaagtccaaggtcaagggcaccagcagattagctatctggtgagggcttgctttatggttcacagatggtgccttctacctgtgtcatcacatagtagaagggggaatgagctcccttggccctattttataaaagcactaatcccattcatgaagacatcacccttgtgacttaatcctttccccaaaaacctcacctcctgataccaccacctgggagattaggatttcaacatatgaatttggggagggcacaaacattcagatcatagcactcacctataagtcaaatattgaaaccagaagggtgagtctcttccatgtgatcattcagggccccaggcttcacttctctgtgtccccactgtgtggttgttgctatctgcatttagctggtggaaggagaaagagatcccggaagaagcacgtccatttctaagaagcttgactccgacatggaacaaatcacttcctctcacttctgtgggtgacatctagtcacatggccacatctggctactagagagtgggaaatatggtctaaccacgtgcctggccacattcctattactacagaaggagagaacagattagagcaggcagctggcagaatgtgctacaaatcaacctactcagtagctgtggtggggaaaggaagcattccgtctccctagtgggttcactttcctccacgcttccccctcccgcaagacagtgcatttcctctcaagacctccctgtaccaatctctatcgcctgctcccagctctctccctacccttcagccttcccttaggggaatgtattttttggttaaagcaaacacgtctagaaaatgtttgaaatacactagattaaaaacctgattgtggttattcccacctccagagtagcttagaaaggacccccatggtgtccattccattccgtgagcatttatagagtctctcccgtgtgctgggtgctaccatgaataaatcataatgcctgccctgcacggtgaccaggaggctcgtcagtgtgagacttggtttggtgtgaactctccagctcatcaggccgacagtaccattgttccatcccggattgtaggtcagtgtgatcaggcctcagcagcttgggtgttagttttttcttcttcttctttgaaaaaaaaaaaatctatgttttcctccatgatggttaatcctcaaatagtcaggcttacttctgtcccggatcctaaccacctaccaggttttcttcgtgggttttaggttaagtccctgatccggtttcatgcagctttcattgatgtttcatttgctatccaccacagcaaggttacttttttcaaaagacagaaatctcagcagatgtattcattctgggatgtttcctggactcacaccagtgagctcattagcccaggctaactatgggcctttgggggctttttctgttctttccttttttttttttttttcagtttgtagcaaaaagcaggatcatgtgatttgcgcatagcagctctccttcctgtgtgttcagtgagcagtgactgaaattccccccaagaaggagggctgtgctttctaaacatgcatccttcttagcagtgtctgcttttgtttagtggaagactgaagctgaaacaggaaatttctaggtcagctatacttcactctaataaaagaaaagtctagccaaaaagaacagcaaaactatggcctgggctttttggagtgtcttgtctgattacccaattattacagctcagattaggaagggattaacccctgaggttggacagatggagaacactattaaaataccccatgtggggtttcggagtgagtagcaaagtaaccacctgtccctgtttcttgggtcagtctgccctcatttagagtcagaagatcactgtctttgatgtccgagtgtggagaaactgaatagcacaggaagcaagcctggggccccacccctgtctggcccagaagcactgctctcctgagtctctgtccctatctggagccctgccctagactgacctggtaagaaatattcagctgaattacaagtgattttagggttgttattgcccagggcccttgggaacagtctggggacactttatgagactgtcacaggcagaaagatttccatttcagacctccctattcctttgtgaactattgaagaaatcggtacctctcctttcttgaacctctgcatttcaggggctacattggggctgttttgttttaagtgttctcagaagctgcagaggagtgaagtgagatctgtgtctttgtgccttttcgcccctgcactggggaggttgggacagtccctctctgggcagggaggcagagtggctttgcctcatgttccagctttgaattcgcaggcaggaaggtagtataagcagtccattcaataattaataagccacttaggtctgcttcaagtcctttatcttacagataaaggatgtgttcaggaacattaatggttgatgag

SEQ ID NO: 1885293 - DNA, 4001 bp, Homo sapiens
ggtggctcagcttggttctctgggctgggggcaggggcaggcaggaggagcaggtgggtcccccgaggtctccttttgacgatgggatgtagcctatgggagggatgtgtttccaggtcctccctggccttgtgagacatccccacagaggcccctgtcaggggaagctgtgatcaggggtcagagcctggcacacatgtcactgttgacttgaaaaagttgattgagcaagagaaggggtctcagtcctcccctaggctcccctgtgtctccgtggggtgcccaggccctgaccacccccaaccgaggcaggctcttctcttgcactctgttaccttgacaagctgtcatctgacctccctccaaaaaaaattcatgataaccttctcccagggctaataataattattattctatttttaataattaatatgataatgtaattaatatataattattacatataataatataagtaaatattaataactataatataattaataattattattattaaaaacagctgtttgaaagccttttgatgtgagacagacatccctagctgtgtttcagcagtacttgtcaatctctgtatgcgtaggtaccattatcaccaccacagtccccagttcacagaggaggagctgaggccctcagaggctccataatgtcccctaaagccacacaatcttggcccaagatttgcttggcccaggggcctggacgcttgatctcatagatggtctgtccatgtagcttgcaacactcaagaagtccctctccagtgagggagctctgaaccctggcagtgaggcctctcagtgagggggcttctgagccctggcagtgagaagctctctgtgaccaggggacccaccctgcaacctccccaccattccatagctgccagcacctgtgcccacttcgaagcttaaccctgaatgataagagagaccaggagccaacagctttacgtacgttactaatgagcctcagaacaaactcacaaaaaaatcttattcctacttcacaaacaagaagttgaggatcagagaggttaactcaaatgacaaagtcacacagcttttaagtcccctgctcttggcaccagactcagcagctttgatgtgtttgttctcttcctccctgtttttattgagggcttctgaggtgccctccttctccatctcctcccttctccttcttctcctcctccccctcccccccgcctcctcctcctcttccttcttcttctcctctccctctcctcctccttctccttctcctccttctccttctcctttctcttttttaaatttaagagatggggtcccactctgtcacccaagctggagtgcaatggaatgatcacagctcactgcagcctcaacctcccaggctcaagcagtcctcccacctcagcctccagagtagctgggaatataggcacacctcactacacctagctaatttttaaatttttttgtagagacagggtctttctgtgttgcccaagctggtcttgaactcctgggttcaagtgatctgctccccctcagcctcccaaagtgctaggattacaggactgagccaccatgcccggccaagtcacccttcttgaactttgattcaccaagctcttcagtccaattttacacaagtgtgaactcaggtgtgtgcttgtgattctttgttcacacacagccaagttggcacaagaaggtgaaacagagaaaggcctcagtgtttttggccaagcccacagaaggccacctaagcaggctggatgctgcccagggctgggccacagcgtgtcctttgtaagtcagccatcccagcccccgaaccccacacacacacaaagacacacacttaccccaggagcagccccacagtgcaaaggagcccacacagcggctaatggctgctcaggtttgtgtgatctgtctgggttcaggcacaacctccaggggcctctggcccaggttgcatctttcctgcagagcagaaaaagcacagttaagaaaaccccaagaaggcagtcagtttcctcccttgagtttctggggtggacttccggcagagtttttggaggactgactgttgcagttaaacaatgtgtctggcaagaagcgagacttcctcccttcctgctgcctggctcatggggctgcagcctccttctggaggtggcaagaaagaactgtggagtccgcgatctaagggatccctggcagcccacggcagccagagaaccacatccgctggagaactctaggttctctacggcctcttgttactgccagtgcttgtgtggcttgaggtgggtaatgcggcagcctcctgcagctagcccaggactgggcagcatggggccaggtagttagtgtaggagagtgagcccaagcttggaaagcaagacttggctctgtcactgggcaaccgggcaacctttttttggtttggttttgttttgttgtttttgagacagagtcttgctctattgcccaggctggagtgcagtggcatgctcaagtcctgcctccctggttcaagcgattctcctgcctcagcctcctgagtagctgggactacgggcatgtgccaccacgcctggctgatttttatattttttattgacggggttttgtcatgttggccaggctgtcctcaaactcctcccctcaagtaatctgccctcctcggcctcccaagtgctgggattacaggcatgagccactgcgcccagcctgggcaaccttgaagaagttacttagcttctctgagcctcagtttcctcatctgtataatggaagcaatagtgtccgttttgcagggctagtatgcctggtaaatgagaatcctcataagagcctagaaataatagtgtcataatgcaggtggttctactattaccagtgactagtatttgttgaacactgaccatagactaagttttgtactgagcgttttatatttattgtcccatttagtcctccaaaaaatctaatgagatatgaccatccccagcttacaaataagaaaactgaaactcaaaaagaccagcaagtgaccccagagaactgcacaaggatctgcagagagtgagcaacaggagccgaagccgtgggctcataccaggctctcttcctgcctcttaagcccatggcacatttggagggtgctacctgaattgaatgggtgtgcctgttgttttgaagttggggtctacggccataccaccctgaacgtgccggatctcgtctgaagttgaggataggcatcatctttcacttcaaaatgaagaaacggaggcattgggaggttaagtcacacatagccagcaagtggcagagagtgaaaggaaccagcattgatgagcgcctactgtatgccaaacactgtgcttacttcaagatcctgtgatctgctgggtggttttggagatgttggagtttcattgacttcctacactgccctgaagaggtcttattagtattagccccattttacagagaagggaactgaagctccgtgcatgtaattagactccgaaggctgttgatggatggggaaggagagggtccctctctgcttttaaggaatgcatggacagttatgattctggcctgagaaggaaatggaaggggctctgtgcccgtcccacatatcctgccccacacccagggcctcatggatcccaccaggggaggctcctggcttcccaacagaggaaggcatcacttcagaaagggctgtcccctcaggccttctgtaggtggccggtggggtctaagtgtgtgtgcccttcactccccgcttcattcccctcatcctccctgtgctcctgtaatgcccactggaccactggagagcccccgcagacggcaaacagcagcagagcacacaaccagccctctcaggtctagtaaaagtgagcttcctacagaaatgcacaggggactgagatgagagtcgagcaggcctggaaggatccc

SEQ ID NO: 1885294 - DNA, 4001 bp, Homo sapiens
ttttgacgatgggatgtagcctatgggagggatgtgtttccaggtcctccctggccttgtgagacatccccacagaggcccctgtcaggggaagctgtgatcaggggtcagagcctggcacacatgtcactgttgacttgaaaaagttgattgagcaagagaaggggtctcagtcctcccctaggctcccctgtgtctccgtggggtgcccaggccctgaccacccccaaccgaggcaggctcttctcttgcactctgttaccttgacaagctgtcatctgacctccctccaaaaaaaattcatgataaccttctcccagggctaataataattattattctatttttaataattaatatgataatgtaattaatatataattattacatataataatataagtaaatattaataactataatataattaataattattattattaaaaacagctgtttgaaagccttttgatgtgagacagacatccctagctgtgtttcagcagtacttgtcaatctctgtatgcgtaggtaccattatcaccaccacagtccccagttcacagaggaggagctgaggccctcagaggctccataatgtcccctaaagccacacaatcttggcccaagatttgcttggcccaggggcctggacgcttgatctcatagatggtctgtccatgtagcttgcaacactcaagaagtccctctccagtgagggagctctgaaccctggcagtgaggcctctcagtgagggggcttctgagccctggcagtgagaagctctctgtgaccaggggacccaccctgcaacctccccaccattccatagctgccagcacctgtgcccacttcgaagcttaaccctgaatgataagagagaccaggagccaacagctttacgtacgttactaatgagcctcagaacaaactcacaaaaaaatcttattcctacttcacaaacaagaagttgaggatcagagaggttaactcaaatgacaaagtcacacagcttttaagtcccctgctcttggcaccagactcagcagctttgatgtgtttgttctcttcctccctgtttttattgagggcttctgaggtgccctccttctccatctcctcccttctccttcttctcctcctccccctcccccccgcctcctcctcctcttccttcttcttctcctctccctctcctcctccttctccttctcctccttctccttctcctttctcttttttaaatttaagagatggggtcccactctgtcacccaagctggagtgcaatggaatgatcacagctcactgcagcctcaacctcccaggctcaagcagtcctcccacctcagcctccagagtagctgggaatataggcacacctcactacacctagctaatttttaaatttttttgtagagacagggtctttctgtgttgcccaagctggtcttgaactcctgggttcaagtgatctgctccccctcagcctcccaaagtgctaggattacaggactgagccaccatgcccggccaagtcacccttcttgaactttgattcaccaagctcttcagtccaattttacacaagtgtgaactcaggtgtgtgcttgtgattctttgttcacacacagccaagttggcacaagaaggtgaaacagagaaaggcctcagtgtttttggccaagcccacagaaggccacctaagcaggctggatgctgcccagggctgggccacagcgtgtcctttgtaagtcagccatcccagcccccgaaccccacacacacacaaagacacacacttaccccaggagcagccccacagtgcaaaggagcccacacagcggctaatggctgctcaggtttgtgtgatctgtctgggttcaggcacaacctccaggggcctctggcccaggttgcatctttcctgcagagcagaaaaagcacagttaagaaaaccccaagaaggcagtcagtttcctcccttgagtttctggggtggacttccggcagagtttttggaggactgactgttgcagttaaacaatgtgtctggcaagaagcgagacttcctcccttcctgctgcctggctcatggggctgcagcctccttctggaggtggcaagaaagaactgtggagtccgcgatctaagggatccctggcagcccacggcagccagagaaccacatccgctggagaactctaggttctctacggcctcttgttactgccagtgcttgtgtggcttgaggtgggtaatgcggcagcctcctgcagctagcccaggactgggcagcatggggccaggtagttagtgtaggagagtgagcccaagcttggaaagcaagacttggctctgtcactgggcaaccgggcaacctttttttggtttggttttgttttgttgtttttgagacagagtcttgctctattgcccaggctggagtgcagtggcatgctcaagtcctgcctccctggttcaagcgattctcctgcctcagcctcctgagtagctgggactacgggcatgtgccaccacgcctggctgatttttatattttttattgacggggttttgtcatgttggccaggctgtcctcaaactcctcccctcaagtaatctgccctcctcggcctcccaagtgctgggattacaggcatgagccactgcgcccagcctgggcaaccttgaagaagttacttagcttctctgagcctcagtttcctcatctgtataatggaagcaatagtgtccgttttgcagggctagtatgcctggtaaatgagaatcctcataagagcctagaaataatagtgtcataatgcaggtggttctactattaccagtgactagtatttgttgaacactgaccatagactaagttttgtactgagcgttttatatttattgtcccatttagtcctccaaaaaatctaatgagatatgaccatccccagcttacaaataagaaaactgaaactcaaaaagaccagcaagtgaccccagagaactgcacaaggatctgcagagagtgagcaacaggagccgaagccgtgggctcataccaggctctcttcctgcctcttaagcccatggcacatttggagggtgctacctgaattgaatgggtgtgcctgttgttttgaagttggggtctacggccataccaccctgaacgtgccggatctcgtctgaagttgaggataggcatcatctttcacttcaaaatgaagaaacggaggcattgggaggttaagtcacacatagccagcaagtggcagagagtgaaaggaaccagcattgatgagcgcctactgtatgccaaacactgtgcttacttcaagatcctgtgatctgctgggtggttttggagatgttggagtttcattgacttcctacactgccctgaagaggtcttattagtattagccccattttacagagaagggaactgaagctccgtgcatgtaattagactccgaaggctgttgatggatggggaaggagagggtccctctctgcttttaaggaatgcatggacagttatgattctggcctgagaaggaaatggaaggggctctgtgcccgtcccacatatcctgccccacacccagggcctcatggatcccaccaggggaggctcctggcttcccaacagaggaaggcatcacttcagaaagggctgtcccctcaggccttctgtaggtggccggtggggtctaagtgtgtgtgcccttcactccccgcttcattcccctcatcctccctgtgctcctgtaatgcccactggaccactggagagcccccgcagacggcaaacagcagcagagcacacaaccagccctctcaggtctagtaaaagtgagcttcctacagaaatgcacaggggactgagatgagagtcgagcaggcctggaaggatcccggggaacaaacaatgctgcagggaagatggaggccccctcggcaagccgtcctttctggcccccgaggagccc

SEQ ID NO: 1885295 - DNA, 4001 bp, Homo sapiens
gcactcacctaaaggggcactggctctgaaacgactctcacagcaggtgcggctccatcatcctgcaggccctgctgtcagagagccgctcctccctgctggctcctctcctagggtcccacatggtgactgccttaatgtcccctgacacctccacacagacacaatggaaacgtctcccctgaccctgcttctgactcactcgatgagtctgagatattggagcagagatgaccacaaagttaatgtaagctgacggtgcgatgtaaccactgaaaacgcgaatgctgccctaagctgaaaaccctcgtgtatggcacccggatggagagaaggaaaagtcccatgcagtgcaccgcccgtgcccatgcccactgcagggcgccatgctgggctccaggaaatacacttttcgaggacaatttgactatgattagtttagaaggaggtaacttgagtggtgaggagctaaaagcaagcctgtttaatgagggattgaaggaacttggggtgttgacaatgtggaaatgaagaggaagcatgattcggctctcaaagaggagagggtgccaagtctgtgaaagatcgcctggttctgtgtggctcaaatgggaaacccagccaaacatctatcaaattcaacgtattagcaatgttttctattccttctccatccttctcatctttacctaaccccactgtttttcattctttttgtttctaacaataaagctgcccatgaagggactctgtggcctggaaggtggtgacctccctctaactgggactgttcaggcacgggtggacagcatcgtggaagggcattcaggaaaataccagcttaaatgaggcaggagcctggactggaaaacttctaacatttgctcaagagcccagatcccaggacctgaagtgtgactcagagcagcgtccccaggctggtgtgcaatgacacatttcagaatgtgtcctttccatggtctataagtatgttcctcacagaaaaattggagacatagaaaagaaaatgaaccactattaaatgtattaggaatgaacacagttagcgggagacatgaagtgtatatgtatttttttctcttcatttttcatttactgtaaattttattaatacagtcttctgaccaccccaccacccaggagtttccttttgaatttgtatctactgaaatgcattgtgttgagtattttcttccaatgcaagtattcctaggacatttcaaagcagagtactccacgggcaggaaggcagcatgcggaaattccaaataaaaatcagtgagaaaggcttcctcccaccagaaggtcttgcataggagaccaagcagggaagggagccgcagacaccagcagtatgattttgcccatgacctggtacttgtgacacacctttagtaggtgacagtgaatgaaatagctatttttccataaatccaaaatcttaatctgaagatggtgcaggttgggggtgcggatccacacggacaggaaagaaaggcgagttagctctgaagaggtcacacggcctcacaggctgggcaggctggacgctgaggtgcccttccaggcatatgggtactccttggggctagaatgggaagccctgctggtgtctgctcccatctgcagggcatgggggtgtgagcagagagaaagaaaggtgcacaaagctctatgttgggggacgccaaagagagacagagccccacacttcaaccctcccccatgcctgctccctccacaggaactcagaaggccagcatcctaaggccacattaccaggggcccccgtcaaccaccggggttcccaaggaaaaaggatatgcagaaactcaccctgaggcctttgctaaatcctcagacacaaagaaagctaaatgagagacaaagtttggcgggaggatcagagaagcccgggctccgtggcaggttttctctttcaggccataggcaggccctgggccggcccgcccagcccctgtggaatgttctgggggctctctctggccctggctttcaactctgcttctgaagttagtctgaacaatggaaacaattcctttccatgattaaaatcttccaccctctaaaattagtcccaggaaattagaacaccagtaattgtaggaggctacacaatcccagcaatttaaagtggagtcatttacggaaatcaccaaagtccttagaagatacttcctcagtagtttttgtcctataacttgaggccactaaagggtcatcaaagctcaatggctctcagtctcccagttattaaatccatttcagttaagagataacatggaattgttagcaaagggaaattgtgacatagtggtctttcctcatacaaagggagatggattaatgtgtaccttgtgtctatgtgtgtgtgattagagacttaagaattcaagattttgccgtttaagttttctttgtcattattttttattacaaatagaaaaactgggatcagattttctccttttcacactgtccttgtttaaaacctaatcacaggagcgcttcatatagcaacacacaagcataggatcaattctcctagaagactcacaatgcagccttgcaagggagccatgggttcaccagctcagtaaacaacggatctgcgttaagcttgtatgtgtttttcctgaatgtgctgcattttcttatgtgaatcttttctgacttacaaaaaaaaaaagagggcctgtgaaaaattgctgacaaggggcagatgaatgaaccctgaaactacatttcccatcactagaaccgggagtgctttcacactgtttgtggagttgaggccagaaaatggtgacagatatttgtaaggggttcaacctcgactccttccatagagttgcagaaacacacttcagaacacccttccctctctccaatgccctgccatctcttcctcattcccctatttccaccctcaccaatggtctcaccttctctttataagatggttgtttccaaaatggcagctgcaggactgaaacccgagcacggttacctcacccagccccagcctacctttccagggcatttccttgcatgccccggtgggggccatattgttcagtgactctaaaacaccctctgtgtcctaaatgtatgcgttcatctatccaacaaatattactgaattttttctttttttttttttcttttgagacagagtctcgccctgttgcccaggctggagtgcaatggcatgatctcagctcactgcaaccaccacctcctggattcaagcgattctcctgcctcagcctccagagtagctgggattacaggcatgcgccaccatgcccagctaattttgtgtgtgtgtgtgtgtgtgtgtgtgtatctttagtagagatagggtttcaccatgttggccaggctggtctcgaactcctgacctcgtgatctgcccacactggcctccgaaagtgctgggattacaggcgcgagccaagtctttgccctccgagagctaatgacctagaggaacggacacgaccagccatcatattacagaagcaagtataaaattacaaattgttcctagtaccaaaagcagagtgacaaagtgctgtgaaaatccacataattgagtgcttttactcagtttgactgggcagggagcttcttgggaacacaacaagcagctaaggtatcagagaggtgtggacagctaagaaaggcaggcaagccaacagtatcccaggcagagacgatggctgcgcagcctcctaggacgtccttcccaggcatccccgcatggagagccctgcttcaccttgatgcaccatttgaatgacaccctttaggaagccttcctggattctttcaaacccctccttctttcctccagccaatcactgaataagtgcatactaagcacctactgtgtgtcaagcactgtgaggacagccggtgccatgggaagaagacaaagcccttgcctgtttgac

SEQ ID NO: 1885296 - DNA, 4001 bp, Homo sapiens
cccgggcactaaggacacgaggaagcccagtggaaaggccaggccaagggagcgctgaggtctgggcctggctgagcatctccatgaggggccctccgacagcaggtgggagggcgagatcagggcaaagggggcctgtgaggaagaggggatcattacagagagaaccaagaggagtacagggtcagctcagcccacttagcacctttgcacctgccggccctgatgaccggccatgatcgttccattttggggcttttgaagaggtggggaggtcctgggcccagccaggacgagactggggagtgttctgcggctgagtttggctgtgtaattaaagccctggtgtctagtgccgagaagaaaagagaaaacagcattggaacccaactggcagatgtgcttgttgtgctgagagaaattcacagaaccttgtggtgccatctggctgagagctgactgtttgcatgatgcagttctcacttaaggaggtgaagcatcaaactccctggccccacccacctgcctctgcatctgggcagctgaaggtaagggcactcagcagccccgatgtaatgccacatcccagtgtgctcaggaggaagccaccaatctttgttctctgcctaaggaaagaaaaacagctaaaacaaagcattctaggactgacctttggtacaatgttggaaatatgaaagaaatataaatgtaacattttaaatttctgaaacgaggaataattatcaatttcatatacacaaagtaagcccagtaggcaggcctactagagcagtggtctccaaattttttggcattagggacgggtttcatggaagacaatttttccacagatggggtccgggggatgattttggaatgaaactgttttgcctcatcctcaggcattagattctcataagaagcacccaacctagagccctcacttgcgcaattcacaatagagttcacgcttctatgagactcttatgctaccggctgatccgacaggaggcagagctcacgtggtaacgctcacttgcccaccgctcacccccggttgtgtggcccggttcctaacaggccacagactgggactgggacctgcccgaggctgtggggttggggatccctgtgctagaggctctcagaagcattctccatctccagataatattctgtccctccacatgtgaaggagacacagagctttcctgatggagcctggcaggtctgtctgtctttatacacacccattgtatagagaagtattctggatccagggtatatcatgatcattgtcaattttcagaacatctcctgggctggtgaactgtggttagataataaagagttgctggtgaaatgcctcagggtgtggttagaaaaaagaaagaaaaacaagtggtaatatagggtgcggggggaggtatggggaggctgggtaactgtgatttttaactcaagaaggaaaaagggagaggagaaaaaatgaagactctatagctcatctagagtgagccaaattggatcccaaacactaacacttaatgcactaaaaactgtataattcaaacatctctcaacacagaagatgggtaccacgtgtgtaacaaaacataattgagctgaggtgaatccctgtccttaaaagaggtttataagctaatagtggtgatgaaggtgaggaagactcttagttccactcagaaagtgagaggatctgaatactccagaaaaggaaaaagataagaggagagatgaaatgagattggcaaattgttgatgattgttgaaactgagcaatgagtattgaaaggcagggatcattacctgactcttctatccaggaggccgttagtggaccaggaagtcaggacaagatctgaggtgaagagctggtgaggagtgagacagctgccaaggtccaccttgttcccctaaggagctgagctctttctcttccttccttttagacaggttcattaaagctggcccactccacatgacctagaaggactgggtcaaccctgaaaggtttgctccatagcccagaatgacaacctctgacatcacaaatgcaggattggagaaggcatagttggcatgcaagccgtattgatttttttacaaatcagagcttcatgcttgctgctgagaacatttcaccgggccacgaagctgctgcaggaagttttcaagtcctctcctctacaccgtgaccttaacttagagagcactctcagcccctcctcccatccccccgcacctgcccaggtgggccccactgctctccacacccacacccacctggtcgttgctctctaccgaggaggctctccctgctttgctgtgcttttgtcaactttcctgcagcttccctgttctgggaggctgagctagagtggaaacgaccagcttccccaaacaggcagctccgagaaggcgtctgctccgcgtctgctcccactgagccaaggtccagcccaaacgctcaaattagagcttgttagccaattgctgaaaaactgcagggggactcatttgtaagcaaactaatgagacatcccaggatagaaagcctggttttatttttagcatttcagagctgacaccccaaacacctctataaccacctgccagtctgaagagggaacaagcagagctcaggatgtggtgccgtgcgagggcggtaagtggaaggaagcagcgcatggggagggtgccttggagaccagaggagcacagcaaggggaggatgctcagctctcacacctgctctgtcttggtcataatgaaaaaacagctctgacacagggagtgtgtcagaacaccacagtaccctctgggactgtgtgggaaaacaaaaaacaaaaaccaaaacaagggagactccttccctcttaacctcaaatggtccctcttaactccagacccttgagcgtcttgctccgccactgcatggggcaggtgcaatgtactctgtgatctgtgatctccttgctatattcctggcaggggctctgctactgtgggctttcacagcatgactccagccttgctgcactcaggcctcactgtcaccaagtgggctggggctgcccaccaggggggcatgcagggcctttccctctccccatgccctggtctcaggtacactgctgctgcatgccagctcttttctgctgcatcctatgcagccactgggccacttgctcctcccaggcaaatgctgaagagacactctgctcttcagcagattggtgcacacctatatttagccacattgtggaatatagtgacaatgatactttgtactcaggagacaccttttatcagaggagtgtgatgcactctgcaaacatcatcagcacggcacccttggggaggaaagactgtgccaagtcttccaatccccaggcttacagctagagagattgaagccagggaggcggggtgtcaccagaatctcctaatgagtcaggaggcctgaacggagtgatgaggtgctcctggaaggttttcatcacacctgcctctttctgagcctgcagagcctatagttccccctagagctggtcctctctccctccctggcacaaaagtgttcctttgctcacacagctgtccctgtgcctggacacacttgtaacttgactttaaaagccatctgccagctcactagaaacacagacatgctgtctgtgctggggcttacatttgcatcaccgcggtacctcgatgctcaggacagatatttctactcaaatctataccttgcctgaatggagctatgagggtgtgacccagaggaagtgctgtgaaactctgcataaagagattagttcagatgccctctcttttatgacacagggtaaccaatcagatactccacttcccagaagtggctggacacagactgccctgtagtagagagacaaagcagtgggatgagtgggtcctacgtagggatcctcagggattccttgggcacaagcaggatc

SEQ ID NO: 1885297 - DNA, 4001 bp, Homo sapiens
aacctctgctcctaaacccacttcctgtgtgtctgcatactcgatatccttggcatgagatggcgaacctcaggtgtttaccccagagaatgatgtttctttggaattgctgaaacatatggtaattctatgtttaatttgttgaggcaccaccatattgttttccatagtggctgcaccattttacattcctgcccattcccaatgcatccggcttccagtttctcaatatccaacacttgttattttctatttttttttttcattagtagccttcctaatgagtgtgaagtggtatctcattgtgattttgatttgcattttcctaatgattgattagtgatgctgagcatcttttcatatgcttattgaccatttgtatacatattatctttggacaaatgtctattcaagtcctttgcccattttttatttggactgactttgttgttgttgagttgcaggagttcttatttttaaatatttaattttttttttttagagacggggtctcactgtatcagctcagctggagtacagtggtgagatcagagctcaccgcagcctccgggctcctggtctcaagcaatccggacctcagcctcccaagtagtggggactacaggtgtgcactaccacatccagctaattattttttttctttttgtagagatggagtcctactttgtttcccaggctggtcttgaactccttgcttcaagcaatcctcccatctctgcctcccaaagtgttggaattacaagcatgagccactgtgcttggccaggagttctttatatattctggatatcaatcccttatcagatatatgatttgcaaatattttctttgattctccttgggttgccccttcactctgttgattgtgtcctttgatacatttgaaaccctcctgagcccttccctctggtatcctgcccctgctctcaggctgctctatcctttgcatggggttcttgggtatcggggtactcctccaccttgtatcctgctgcctccctgggtgggctgcacccactgaggggtgagggagtggcaggtgcttcattcctctgtgatttctgccccagtcctcttctaacaaacgcaaatcctattatgagaatttgctaacacgttttaaaaatacgcaaatgtattgggagcttatttcagagacaatttttattttaaagaaaaagtaacttatatatttttaaaatctagagaatgtacaactcctctgccacaacgtgagggagagaagtctgcagacggctgactggtgacgactgaacaagacggaaaggcaagtcgctatgcccgaagcctttgaagggagccagcagggtccatgggaggttcaggacacatatctgcagccctgcttctggccccacccttggggaagccttttgcaggtgatcctgggcctctgctggggaaggccccaagaggtgaagcatcctctgcagaggagagagcacatccggaagtagaagacagaccactgtctgggctccgtttaactgctgtgatttgggattgtaacttactcccgtaaagcctcagtttcccacatggaaaatcaaatcgatcattgttataacatttcacttttttgttatgtgatgtaatttacacagtgctttcgtatacgttatccaatttagcgaaataatacagagcaatgcattttgaaaagaataaaatgcttaacatatgtgaggaattcttttttcctttgaaaactactccggatggcttggctattgtttagttaagagaattatacaatttttgagacatggttccttatcttgtgtaggctgaaaggcaattaaacaattattcatgtcagaatctgaggtaaataaaaggctgcttcaaagagtccacttacggagtgaaaagcagttgagtagaaacagagagtggtctgtaatttccttctggaaggaatatccactccatatggcctgaagcaagaatttcaaactcctctgtggggagaaagagacagaaataaaaacttttaagtttttttactccgatttgtcccagccattttctgaacagcctatggaagccatccgctcctctaaacaaaaataagctaagagacagaaagaatgatttgatttccgtgtgtagggatggttcagtcataaatcagtgtattttttccaagaggaaggtgccagcaacaaaagttggtcataaaaaggacattaaactttagtagtctcttcactgttccctcccacatccagttgccaacagcagagacaactgtgagacacagtgaaatgaagtgactgctccactgctgggcaacaggagacccggatgccaggctccctggcagaagaaatagaaagtcaatagcaaacacagatgtcttcctccctaccacatcacctccacttttcaccatcgcctgtgtgatacaaccaccccgcaatgccttcctcagccttttacttctgtttccagtgagtcaagaaaaacttctccagcttgccctgtggagatgaatgagcccataatccacttacacgtgtgacctttacacagccaggacccccatagagcagccaaacatgcagtcttgtaaacaaaaggaatttcaagataactctgatctttcactaattatcccaaagcccaaaggggatccatatacatagtccgaagcctactttaaggaggcatcctcccctgtgtattcccagcccatcccatagtttcccactctgcagctccaaactcaacttgtcccatcaccagcccccagcctctcttctttccctctccccatgccccactacctctattttttattattgcagattgaccaaatgtctatgaagctgcagcaaggtttcttcttttttggagcagggaatggggagtgattgggcttggctgtgacagattgttttggcaggctcagtgggcagaggcggtgaacaccatcccagtaagtaaagggactgtaggagcgtagagttcccttagttcctggctggaaacccagctccctgcctcctcccatccatcaagctgggagccatgacagtgtcagagcctgagctccagcccagacttctgggtgaagtggtcccatggagcaaagcttggtttggaagatttggagaatgggaaagaatgttctcttaccacaacctcttccccactgcggccccttcctaagctgccattgaaatctatttttgccagagcaaaaaatgggggaagtggacagcttctgccaacagtgagtttgttccaagcccaccccacagtcatgggttcctcagagtgtcactgaatcacaggactcatggaaatctgcccatgtcatgaagataaaccactgtgatcacttttaaaatctttctcatcatgtccttgggaagataaaggggtggaactgaacagaaaggggcagaggtgggactttttttcactaaccttaaccttcatgccaagaacagagatctctgtttgaaagcatgtctccgatgaccatttatttgctctgcctggtaaaccttcgtgtaatgcgtggctttaagcattagtcattccctgctgggaaggaggttagaactccagaaacaaggctattgcagaactggactgtgtgggtcactaaaccacaggggaaagggtggagaagcagctggtgtcccgcttaaaggtcacaaagcattatttctactttaatacccagagttcaagtggaaataaactcagaaggttaagatctaagtgaaaattaactgaaggcaactgtgccatttggactctgagatgtgcttgcctgggaaagtgcaaaacacactggctatctttccatgagcacagctgaacaggaataggcattaataaggataaacataaagaaaaaattgctaattattggcagagaatgccaagaaaagttggtggaattctcttctttggggaccctgggaaaagaacagtaacagtta

SEQ ID NO: 1885298 - DNA, 4001 bp, Homo sapiens
ctggattactgcatgctatggtttgaatgtgccttctccaaaattcaggtgttgctaatgtgaaagtattaagaagtggggaccgtaagagttgattaggccttgagggttccttcctcaggaatgagattaaagatcttataaaagaaagagactttatacaatgttcagctagcttgctcttccaccttccatcatgcgaggtcacagcaacaaggcaccttggaagcagagagcagctctcaccagacaactgaatttgttggcaccttgatcttgaactctgcagactccaacatggtgggaaaatagttttctgctctttatgaactactcactttcaggtattttctaagacactacattagtgtctaattgcctccagcctcttgcttctttgctatcaataatttttcaaaatcacaaatatgatgtctcttatttaaagtgttcactttatcttttcgggataaagggtgaactccttcctccagctctttataatcagcctcaatctcctaaatatcttctctcacttcattaatcatgcaccatttttccaaactacaataatgtattcaatatatcctgactctttccttcatacttttgcatattcttagaatacacatttgcttaaaatgttctttgcaacaatcttcaaactcaaaccacactcctaaatacatacaccctcaaacataaaatccccttttataactagttaacttacagtcatctttcaaccctcaacttagatttcacttcttctgataagttgtcttaacccacaaatttgttttagaggctgtcttcataaagttcattttaccataatagcacttatcccactgtatcatgtcatttatttttttatcagaattgaaagaaactagaagtctttgaggcaagtgtaatagttcatggaccttgtagctccagaacatactgcaatggctggcaattgtgctgaacatgagatatagcaaaatacctggaagaaacttggaaagagtgttggagagagaaaggaaaagatttacaatttatagaagtttcccaagtgaacttcaattctaatatgctcacctgtttgagaactactggtcttggtgaacatctattcctgggaagcaaaaggaaaaaaatacttcattattttgtttatgagcctgaaatcatacccaattaaaataatactttgtttttcttaacatagcgtctgctaagaattgcagatgtcaaattttggcacatttgcaataaacttactaaacagaaatttaaaattcattacttgaatcagataggagattggaagaaaataaaaagtaacattaatgataaccatattttcttcaaaataaattccatggtttttaaaaacaaaaacaaaaaaaaacaagaaaaaaaaacgttattctatatggtttggctaatccagctagaattgtgactgcaagttttgaagtggtatatttttactgttaaagaaaaaaaaagtctacggccgggcgcagtggctcgcacctgtaattccagcactttgggaggctgaggcggtcagatcacgcggtcgggagatcgagaccatcctggctaacgcggtgaaaccccatctctactaaaatacaaaacaattagccaggcgtggtggtgggcacctgtagtcccaggtactcgggaggctgaggcaggagaatggcgtgaacccgggaggcggaacttgcagtgagccgagatcgcgccactgcactccagcctgggagacagagtgagactccatctcaaaaaaaaaaaaaaaaaaaaaaaaagtctacagccttcaaccattaaataatacaggaaaaaactagagaaattcttttgcacaattttatatatacattttcaaaactgatttggcttaaaaaaatctgcattctattcatgtcggcttagtaaagtgttttccttctccagtcacctatctataccttcttctattctttccaaactaacagtaggcaacagaaccatctgcctgctataaatacattcagaagttattcctcaaactcagattaccatttaagggcaagggaaaacaaggagtatatttaaacttctcattctgatttgtttataggtcatgaacttacagaacttgattacttgattgtcattttcagaattatttgtcataatgctatgcttactaaatagttggtttttgagagaacataccatctttttatagaaaaacagaataaaaccacagtaaaatatttagaatttttaacatcttttgaataatataattctagagctacgatttttaaaatgaagcaaattgaatttcattttctcctgcctttccacttttgaaatgcatcaatgaattcgtctgtaatccacatctcagcttgaggccacctcatttatttacccaactctgtccttctctcagtccccttccatatctaagccttcctgaatctcagcccatactcacatcacatactcggatctgagcctattcctaagccaagctcagacataatgagaaatgaattgagggatatcatgtttgatactctttaaaacagatgtgtcataatgagtcagatccaaatcacagaactctcaactgccgccatgatgagattgcattattccacaaatgacaacaaatgaagctttcccccaagaatgtaattgaatataaaaaaaaatagtaaccatatggaaaatagttttctcattactggaaggaaattaaggaaaattgaaattattaaaattaaattcataaaataattttcctaaaacaatttcctctggctagatacgtatttttgaaatacttgttttggattgtgatttgcttttatttctccttttatatgtttgatatttattttttaacattatttatggtcaggcttatttgagacatgtaagatcttcatttggaatatttaggcaaacacaagcacttttaaactaagttattcaaacaccctggtttttttaaatcctatttttttgatcaaaattatactacatctttatctgtgacacttaatgaagtaaaatggacaattggaataattatattaaaaagtcgagactaaatccagttttctgtttcattggtactaaaagagcaagaaaaaagagtgaaaaacaaaaagcagaagaaaatgcattagaaaatagcacattgatctccctataaataactattgggtaagttctgcaaagtgttttctaaccgtggtttgtttttttttttcagtatgcaaggacaacatgtagacaggtttgaatccctttttcagttatctgaaaaaataaccatattgcttttgaacatccacaaattaaatgaaccattttaaaaaaagccattccattctgagatctttgctttgggatcaagacaatctaaacattagttgatactatctgtacagggttacaaattaaccactttcaagtttcagaggatatgaactagtatacttaagccaaaccttgagaagatgtgaaagactatatcgatagccatcgatgttttcataatacacacatgagaaagacaaaaagcaaaaagtctagaaactatatcaagaaagccaataccaattgaggaagtgtctggctttaatacagaataaagaaaaagaacccgctaagagtttacaatgcaatggcacatcataagttactgcagtataaataatgcatctctaccatattccatttctgaagaaaaacagatttttttggtaataatctgtcttagtctgttttttgcaactataacagaagaccacaggctgagtaatttataatgaaaaaaatgtattgcttcacagttctggaagctgggaagttcaataaaaaggtgttggcattttgcgaagactttcttgctgtatcatctcatggtgcaaaggcaaagatagggcaagagagaaagccaaaagagattgaactccccctttttataacaa

SEQ ID NO: 1885299 - DNA, 4001 bp, Homo sapiens
tcagtacaacctgggttcaagtcctacttctgaaatttccttggcaaattactcaacttccttaaatgtgtgaaaatctgcgataagaacacttgtttcataaagtcgctacgaggattaaagatgataatgtacacagaagtacttaatacataacctggaacaaataaagagctatgttattattattgtacacacctggaagggtatactcttcacccagccccctctcataatcttttcttcaccacatcagaaaatgagcaagccacacctgcagctctatttacctctgctatatgacacacacatttgcagataaagtcttctatgggaataataggacacctgagcacattcctggggcactgctacatcagcaattatccaaagactcattgacatatccacccacccacacatcctcccatccatccatccacccattcatccgtttgaccacccacccatccatccatccacccacccatccatccatccatccatccattcattcattcaagcttagtacacatagtaagcacctaccatgtgtaagcctgtgttaaatattgtgggatacactaaaatgattcagacatggtctctgccctcagagctataaatacaattaaaagaaattgtaaaacaaaatggaatgtaaaaagtgttttaagggaagttattgaaagtgaatgaagggcattgccacatggaaagaatagtgaattaagaacaaggagatttttttctcagccctggttttaatgttggtctaacataaaccctgtcacctccctaggctttggtttccccgaagtaaggaggcagaagtggaagatcccgaggtccctgtaacttctaacatttcattccctctgcctctacgtaagtgaaggtaacattcaaactgagcactgagtagcagggtattgcattccaggagtggagactcatacaagcaagtttatgaagatagaaatacatcaatattaatggaatggcaagtggtaccatttgaatacagcgaatggcaaaagaaggtaatgtcttgagagttagattcagaataatttgtgaagggccttatttttaggccagagaaataaaagaattagttactattgagcaagtgcaaaagagccttcttatgtgtctgtgcaaggagcctactttctcagagttaccttctccctacacttctcacacctccttacacctgcgcaccctacaagcaagggctggacatggccgaagtcaatcactttgcagaaagtcaaagtccctattgagaaaggcccctgaagaagctgagctggggtgcagggcctcccccatattccctgtaagccctgtgatcaccaacacggagttatcttggagggctgttctcgtctccaattacgccctgtacatggtcatattcccccaccctcggcaaaccaaaatgaggcggcagcaagggcgagtaaatagtctgtttaggggcgtgcaggcaatgctccaggttgtgccaccaggcctcactgccaggccctctgtgatgggtgctcaagcaagcagggggaaaggggtgctttcctgtccccgctggaacggccttcccacccatctgcctggtaaacgcctactcatacttcaagccttagctccagagttgtctgatctagaagcccttcttgaccaccctcaaacccttcccaggcacagtgggcccctcactctaccctactcagaattttcacagcacccgtgattcttaatcgtatttattcacatatctttcccccaaacaagctgcaaacaatcccttgggcaggatactctgtcttagttatcttcgtactcagtcacctagcctttacctgacacgtggttgtacctcatgagcatttgtcaataacaagagtagctgactttcgcagagcactcaccccgaggcaggcaccacactggcagcttcacatgcactagtcattcaatccccacagcaactgtttatgtttggtgctattatccccactttatagatgaagaaactaaggcatagatgagctaagcaacttgccccaaagtgaaagcactactttcttttccaagatctttatcactttagatatacagtaggtaaagcaatctgaaattgagaaaacctctaacgccattgcagaactgggggttgtaaaaacgttagtccaagctgacgctgaaacagtgggaaatgtgtagacaccacagactcaaattctgagaattctttatttttggagtcagtgtctcactctgtttcacagactggaatgcagtggtgcaatcataactcgctgcagcacccagctaactgtttttatttttttgtagagatggggtcttgctatgccgtccaagctggtctcgagctcctggcctcaagcgatcgtctcacttccacagatggtgagaattcttccttattcacccctagtaaggattcactagtaatttaatgataacaccataatacccaagtcacatagtccgatcattaagcccagttcatgcttatggaacatctgataaaataaattttaaactatgacctgctcctctccctcccacactaactctgtggacagagattcatttgcaacaacttttctcccactgactcccagtgacctttcccaccactgtcccttttcaaatacagagtgcgtgtaggtaagccctccccaggagggaagaaagaggccattaggcagagaggagatttgcagggtggaagtactaactggttctatcccactgcccacctctgaaaatagcctccttgatggccacaagcccagacatctcatgagagcaccaagtagattacattcttatttatttaaaaggaaacagcccacctgggcctggattctccacagaaaaacaaaagagaagcagagagaatcaaactagctctctggaacaaaggtgtacagtttaaatgattgcacaacaactgctgcaaaccagaacattctgtacggtcggaagaggcttaattagcctgaaccaaaagtctaaggtcatgtgattcagaacatttcacagcctgggttgtgacattagaggtgctacgggccatcctaccagaccactgtggggccccaaactggacagccttttgttttctccaaccgaggcttaatttaaattaaaaacatcgaggggtagtggggagcctctgcctgtcctttggaagccacagttgtttcatttgtatgcgtatctgtgtgtattctgagagtgtgtgtgtctgtgggtttgttggtgttctatgctcctaatcaaagaaagcttatgaaagagaaaaagaagtttaaatagcaaagtagtgacatcatttccaagtgttctgggatgagaagattgttccatagtttacatattcatttattcattcattctttctttctttcaatcaaactctgagcgagcatccatttagccttagactctgttacaggaaacagaccgcgaaagacgcatgttcctgctattagttcctatcattgctgtaatagattaccacaaacctggtgtcttcaaaccacaaaaatttattatcttgcagatcagagtgtcagaagtcaaaactgggtctcactgggtgaaaatcaagttgtcagcagggctggcctgcttctggagacttcaaggaaaacccattttcttaccatttccagcctttagaggccacagacaatccttgttcatggccccttcccctatattcaaagccagcatgtcagaccgggtctttctcatgctacaagctctctctcatactaccagctctctggttctctactcttctgttctctcttccactgtttaggattcctgtgattacattgggcctacccagatcacccaggaaatccccccactccaagatccttaacttcatcacacctgcgaagtccgtttaccaggtagtgccaaaatatgaggtgatatattcacaggttcca

SEQ ID NO: 1885300 - DNA, 4001 bp, Homo sapiens
tctgttgtttttcttctggtgaaaattataggctaacataaaaacaatttgacacctgttagcgagaacgagaacactgtcaaggtgaaaataattttctcatttttttcttagaagataatcaaagcttaggagaatcatatattcatagttctatagaaagaaagaaatttcagatataaatcactaaacactaaaaataaaaatattaccttccccaaatgaggcacaattattatcaaatttaaaataaaaaaattaaataatattaaacaccccagtgattttgtaaatatggtattcttttggtgttgaaaatcatatggctatatattttttcttatgtgattatgttttcacacacacgttaataaatgtaagtatacatatgcatttagtttatacagaaaattaaatcaatattctctatttatattattagcaatgattaaaaaaaagaaagtagactagctgggaaagtagactagtaagtaagaagataaaaaaggaagatagattctgccaaatcatttttatagagtcatgaataaaattcacgtaattatgaaaatgtatctgcagtttattcaaataaaatcagctaaatgggagaagctcttcttattttgtaaatgtactgaggcaacaggagtttaccgttatgtattttcagttgttggaagtagatgtacactggtcattatgacttttatctcagaaacgttttagtctaatgttactgaaacccaggaaatgttgtacattttgggcctttcaactattgtactgatgaaagcagctcactcacattagcatttttaatttgacagggattacaaaaacactgggtgctctttaacttttgtcacagccatctattacattaagaacaagttgattttaatatttgtcaaattaaagagcattgtatcaagctaaccttgggtgttcatttacataattggctctctgcttgctgtgtattatgtgacaccctcatttgattactgttcatttttctgaaattccgaagcagcatctaacataacctgcatattaatatttcattttcatcaggccttactttatgcagtcaagttacagcaaatgctaccttttcattagtaagcttgttataagtctcttgtttcagagcttttaaaaaacaaagttcgattcacatgtttaacctgttccataatagaaaaacataactggactctaactgtttgtttaagtaaataaaggatcctcctgctgggttggccttgagaaaaatctctgaacttgagcaagaaaaatgtagtgcttattggcccctatatcagtcaacattttgtaatataaataaaataaaaataaaataaaatcttagtgacttacaataacaaactttttttttttttttgagacagtgtcttacactgtcacccaggctggagtgcagtggtgcgatctcggctcactgcaacctctgcctcccaggttcaagtgattctcctgtctcagcctctggagtagctgggattacaggcgaccaccaccacgcccagctaattttttgtatttttagtaaagatggggtttcaccatgttggccagactggtctcgaattcctgacttcgtgatctgcccacctcggcctcccaaactgctggaaatataggcgtgagccaccccacctggctgaataacaaactcttaattctttttcttaaatctgcaggttggctgtggctttccactgggctatggatttacagtgaatacttataatattatgttgcctgggcatctattttgagtatcagattgtcttgtaccaggagcagaacacagacatcactcaccaaatttccagttctcagctctctcccagttactgaatgtggtgagtccagatatctgccctcaataaggacttctttgtgacctccctatgggacatacagacagagtcttctggactaggcccattgatcaccaccgcgctccccccaccccaccccctgcatggactgaagaccattgctcagtcacagcagtgtgacactggcagacagcctattgtccacgtatccaacatgattcccacactgctgtaactgaacaatggtctccagtccacgcagggagcgggagaaggggcggtgatcaataggcctagtgaatcccatgttggacacttgaggaataggctttctgccagggtaaaggagtacactgtgaaaggcacactgtaacatccacaaccaaatcctctgaagtcctgtcagggcaggccgagcgttcatacacactgtcaagagagagacctcaagcacaaattacagagaaagaaaacaatctggcttaaatctgctccatctgtctctctttttaggctccagactataaagcggtgagtgagtatttgggcactgtgatgattaattttatatgtcaatttccatgcgccatggggtgtcccccaaataagacatgtataggtgtgcctgtgaaggtgattcctgatgaaattagcgtttgaattcgtggactcaaggaacttcactctccccaggggaggggtggggatcatccagcccattgagagcctcaatagaacaaaaaggtgaaggaaggataaatttgctatttttgtcttctgcctgtttgcctcataaggacataggttttcacctgcttttagtctgggatttacacttttgcctaccatggttctcaggccttcctgcttgtactaaattgaaccacactgactttcctgggagtcccaattgcagatgacagattgtgggacttagcctccataactgcatgattaaattattcaaaataaatattttttggttctctttctctggagaacctcaactaatatagatatgttccttttgtggtgaaggacagggtactgaaagcgtaatccaaaacatcttaagcacatttgaagcctctactcagatattaattaagtcaaagcagctaacatccattgccaaagtactcatggtcaaggatgaaatgcagacttttcattgacaagaaaagggagactgaatatttattgaaaaataatataacttgtcccaatccttcaaggaaatgtttcaatttgctaggcaattcacacctgcaaactcacttgatcctcaaagcaacactgatagacagatttttgtttgttcatttatttttcttatacaggttatgaaagtaagtaaagcacaccaacaagagtgaacatttataagactgaattgtttactgagcaaaggttggaatgtagacctatttaatccaaaagccttttaggattatagcctagaatggctttcttccatctaccccactcattacattactatctctcattatataagctcaatttttaaaaattgaaacactgctatagacaaagtattatttttttgtgtttctgcctttcttcctgcaattcaagccacaattttctctacaatgcatatttacttgttctgaatgaagtatttctaagaaaatatctagttactttagttctaggagaattcatagtaataacatttttgctctcaaataatgtctctacgaagccaaagtgggatggagatgtgagaaaagaagataaacttatagcaagtctatatgaaaaatgtggaataaaatgactccctacaacattcaaatgtcaagattgtctataaatttctatgtcttgttaattaccaaatcccaagatcagcaccaaagcattgtgatgctttgtaaatatctgaaattaacacataccagggaaaactctttcctctgagagaacagctgaggaaatcaggttgacaagacgctgaaggcaagagaatacctaattctacaaagctgctaaaaaataaatacttcagttttgtatatgtattgaattttcagtgtccaatctaaactcttatttttaaaaaacattgattatagtgacaaataatattctgtagacatttgaaaa

SEQ ID NO: 1885301 - DNA, 4001 bp, Homo sapiens
gatttttgaggacttatcgcctttgacctgtaacctactgataaagtgcttggtttcattttgttttcttgcttaaaatctcctataatctcagtgagataaaatggcgggggggaggggatactgggctaggaagagggagtgttgtgtgggtgcaaatcaagccgcagcgcccagcctcagtagaaatcagcattgcacctccatgcttaaaaacaatatatcttcttccaaaagtcatgtcacagtccacgtttcccagaaatagtggcaaaagtccctgttgaaatggattgttcattgtctggtttgagacactgacaagaataaacctgctgaggccagctgggcttttgtcactttggttaaaagcaacattattccagtgggaagggatcccgggaggaggaaggaaggagaccaggaggaaggccactggggcagaaggactggcctcctggaagagtcagccacccaaattaccaagttcaaggggccatctgatccacaccaggggcccagaacttttctccatgggagtcttttgtgccaagcgagtctgaactctcccctgaagacaatgggaaacctctgacaatttttaatcaggcaactgatattattataaaacagccatgtcttcatgctatcttaccattctaattcctagcatagcatctatccattcattcgcttgttttaaatgcctgtcttccggctaaaatgtaagttctgtgagagcaggaactttgactgtattgttcatcacagatgcctagaaaataacctaggtgggacactgcaaacgttccataaatatttttcgatgaataaagattcatattttagaaagcttcctctggtagctttgtaagagctgtggataatggactgaggtaggggggcggggtggaaagagagagcagaattagacaccaaggcaaaaagtagggaacatgcacgaatttaacgcatgtccacttccaaacaggttgtgatattggtgctgggaactgaagtacagaagcctggatccacaacgtacgagccatggggacttccatacaaggcatgcacaggtatcgtacagatataggacttgggggtcgaatcgggaagttggggaggtgatgcaaacaggtgggaagtccaaagaggactggtacaaacagaaggataaaccagtgggtgggaatcatggagatccgaggacagggcacagcatctgtagtaggaagtagatgcaacactccccgcagccccatccccccaaagaaaggcagacccaagaagaaaaagcctgagaatagaaaccttggaagaataaatgtataaaagggggcagacagattaaaaggagtgaaaaaggggcggttgtggctgctgtgatgcccaggcagacgctgtcatcctctccacagctgagagtgttggtgggttggggggtggttgtcagggctccccactgggtcccttcctggaaacggctcccagctgaagacagccaccctgcccaagttcatagcaccatcccaggggcagctgcatccaatgactggtgcacaaaggtgggatgcagaggcctggccccttgcctcatggtgatacagctctgggaggccctcccaggtcagactccatgcaagattgaccgattcctctgctgcaactgcaacaaagctcaacatctccttctgcccagtgttaccgcgtttactcctttataggtataagcactaagatcactccccaaaaaacttctcatggaaatttttacctgcaagtctatttcccagaactcaactcaatacagttggtgccaagagtgatccaagaagatggactctgaagtggaactgcagagctggctcatcctcctgctggctggcagtgaagccccggccctggcttgccggagaagtgcaagtgtcagaactttcactggtgatgacctggggtgggaaagaggtgggagagaataccctggtagatggcaatctcccaggcttttgggagttagagaaattaccagtcctgagaacaatggactctaatggctctggctgagtcactggaggcattagagaaagacaaagtgaggctcagggctgtgaatcatcattgaaaggaaagtgtgaaagggagaaagcctcactggaggcatcggaagagactcatctcctgtagcaggaggactgaaaaatctaaggataaggcccaggaattaattataagaatagcagcacttcaaaaaaatttgaattcttagctctggttagtctggttatggctatgacaatgtcaggggcctattagggatgagagagacaacagaattaatgctctcaaaacctcaactcttgaggttgggcacagtggctcactcctgtaatcccagcactttggaaggcccaggcaggcagatcacctgaggtcaggagttcgagaccagcctggccaacatgtgaaacctggcctctactaaaaatacaaaaaattagctaagcgtggcagtgtgtggctgtagttccagctactcaggaggctgaggctgaggagaatcgcttgaacctgggaggtggaggttgcagtgagccaagatcacaccactgcactcctgcctgggtgacagagtgagactctatctcaaaacaaaacaaaacctcaacactccattcagagccctccgggcctacagaggtggccctgacctccctgtgagaggctgtgctctgcccttgcttgaacatggtataggaatctctgcattgcaagacaacacagtgctcctcaggacccacccccacctcctgccttgaccagacccatcactagagtcaagtgagacagcatgtggaggggaaatgcagagcctgctgagcaaaggaaggaaccatgtgcctaaaggcggcaggccaacgtgcaatggccaaagccagagactcttcatgggactgaatgagggggatgaatcaaagcaggggaagcatgaagttggaaaatgatgagtttatttatatgggcacagtctactgtaatagatgatttgccaccctggcaaggactctgggagatgttttcatcacactgctaggatgactcctggaactttggagaaaattacagcccacattaagtaaagatgaaatgccacaagtgtgtgatagatgatggaagaagaaataaaacagatcttaatccttgagtcagtttatctgacccagaatccactaattcaaagggaggtcaggttctcaggagcacccatggcaagggaacacagttatggttccaatggttctttgccaaatgtgcctgtggtcacttgtttaaacaactatacagtggaaaagcagaatatgcaaacattttgagaaatgctggacacagggcctgagctgacattcacacccagagaactcgggattccttagggccctctattggagtagggtgcttgtgggccaggaaataaatggagtttcagccctgatctgggttccaatggtccatttgactgaaatgcaagtcaaaactacaatgagatataattccaccctggttaaaatggtttttatccaaaaaattggcaataacaaatgctggagaggatgtagagaaaaggggaccctctcatacacttggtgggaaagtaaattaatacaaccacatttaaaatacatttaaaatgtacaaatacatttaaaaataactacaatggtataattgggttgtttgtaacacaaaggataaatgcttgaggatatggataccctacttttcatgatgtgattatttcatattgcatgtctgtatcaaactatctcatgtaccccataaatatatatacctactatgtacccataaaaatttttttaaaagaagtgtgtagaagctttttgagatttgctttaatataatctagttagagaagcaaagagggagagttgtggtgaatataagtgaaaatgaattggccatgataattatgaagttgagta

SEQ ID NO: 1885302 - DNA, 4001 bp, Homo sapiens
ggtggcgggaaccacacaggcctcagtggagccggtgccttcatctcagaggtcctcatggcagcactgttgccccaggaggtgtctggggacatgtgtgggggtcagggtcttgctacagggcaggggcaccatgggtgttcgccgtggggctgggaggcagagcctacacctgggcacagtcctgcagacctagcacccatgagccacggccgcctcgcctgccctcatgctggcctcaggtgcccctcacaggttgacacacccggcttactgtccccagcaccacactcctcggggatggctgcggctggcgtgggtactctctgcagctgtgctgaccccacaatggggttggctttgtgggagtcgagccccatgtacgtcatcaagggcttccatgccctgggctatgttgctgctggtgggactgagcccttgctcagactgtgggaagagccacttcaggcctcacccaagacagcccagaggctggagtggcctctccccaccaggtctgtgcaggtcggtgccccagaggccccgctcacacaggaacagggcggctgactccctgcacccctgggggccccgtgaggtgcttccttcgagggtcatggggtggagtgggcagagcacggctcccaggcgcaggcccgtgtgcctccctccagcccccaagtgctcctggaagttttcccggggtctccacacatctatttatgtctggcctgtttgaaacaggacccagcagggccgtgtccggcaccttgtttatctgcccagactcttcgggctgtgcatttgttgaagcgttggcatcatttgttccacagaacagcagttcttcacgtgtggtcctttgggtgttttcaggggggtctccaagaccagcacagtcatctcgggccccttgcctttttctctgtgttgacattcgcggcaatggcagagggctgatggtgggacacctgctggtgcctgggcccagatcaaggtggctttgagctcgtgaggcttctcgccaccatcgccagcagcattcggcagtgacgttccttgtgatggagctggaggtttgcgcacagtgctttgtgtgtgccatgtgggcgtctggcagccaagctgaaccaagctcctttattcttgcaacaccagtttccatggaacaaacagcgaacagccctgcatacccaggcttgggtgttttcctgaaaacaaccaagtaagcccatccctgtaaggaaaacagctgggagtatctggcaccaatgatacaatgttgagctttcaaatgacaagaggaatttttgaaaacttgtttctcgcattgtgagtgtgacagcttccgaataattctccacatgaccagcgtgtgattcctcaaaatcatgcataggtaaaagacccattcaaagagcaaagggggccagtggattttcatgaacaaaactcacgctcaatgaatgcagaaagttgtctccacacacaagcatttatgtgtttgtgaatgtgtgtctctgtgtacgtgtgtgtgcatgcctgtgtgtgcatgtctgtgtgtggtgtgagtgcatgtgcacgtgtgtgcgcatgtgtttgtgtctgtgtgtgcatgtttgtgcagtgtggtgtatgtgcgtgtctgtgtgcctgcatgcatgtgtacgtgtgtgactgcgtgtgtgtgcgtgtgtgtgcacgtgtatgtccatgtttgtgtgtgtgcatgtgtatgtgagtgcatgtctgtgtctgtgtggtgtgtgtacatgtgtgcatgcatgtttgcatttgcatgtgtgcatatgtgcatgtgtgcatatatgtgcacgtgtgtatgcgcatgcttgggtgtgtctgtacgtgtgagtgcatgtctgtgtggtgtgtgtacatgtgtgcatgcatgtttgcatgtgtacgcatgtgcacatgtgtgcatatacgtgtgcatatctgcatatgtgcatgtatatacacatgtgtgtaggtgcatatttgtgtgtgcatgtgtggttgcatgactggtgtgtgtacatgtgtgtgcatgtacatgcgtgcatctgtgcgtgtgtgcatgtatgtgcacacgtgtgtatgtgcatgtgtgtgtgcgtgtgagtgcatgtatctctgtgtggtgtgtgagtacgtgtgcatgcatgtgtgcgtgtgcacgtgtgtgtgcgtgtgtgtgcatgggcacgtctgtctctgtggtgtgagtgcatgtgtgtgcatgggcatgtctgtgtctctgtggtgtgtgtgcatgtctgcgagtgtgcatatgtctgtgtctctgagtggtgggtgcacacgtgaatcctcctccttgatgctagctgctcttaccagagccagttcttgtggggaagctgagtgctctgtaactcccgtgtctcagctcccttgcgtggcccctagaggcagacgtgggaggaatgccgcagcctcggagaaccaggtctggcattcttggtgctggtcccagggtcccgaggcctgctttccacagtcacgctgtagagacggctccttgtggagacaccttctgtgtgcaggcacgaggtttctcctctgccccaggcttcggtgcggagtgtctggggggacagagccaccagatgtgaacgctgtgctagtcgccctctctggtctctcccttggcgtggccagactccccggtgcatctggacatcgtggcgggcaactgccatttacagacacgggaggacgttttgcatgacccgccttctgtgtgttttcccactctttgcaaacccattgcttttcagctcggagagttgctttccagttgtgccagctccgtggctgaggaggcggtttctttcccgttgtgccggctccgtggccgaggaggcggtttctttccggttctgccggctccgtggccgaggaggcggtttctttcgggttctgccggctccgtggccgaggaggcggtttctttcgggttctgccggctccgtggccgaggaggcggtttctttcgggttctgccggctccgtggccgaggaggcggtttctttcgggttctgccggctccgtggctgaggaggcggtttctttccggccgcgctggctccgtggctgaggaggcggtttctttcgggttctgccggctccgtggctgaggaggcggtttctttcgggttctgccggctccgtggccgaggaggcggtttctttcgggttctgccggctccgtggctgaggaggcggtttctttccggccgcgctggctccgtggccgaggaggcggtttctttcgggttctgccggctccgtggctgaggaggcggtttctttccggccgcgctggctccgtggctgaggaggcggtttctttccggccgcgccggctccgtggctgaggaggcggtttcttttgggttctgccggctccgtggctgaggaggcggtttctttccggccgcgccggctccatggctgaggaggcggtttctttccggccgcgccggctccatggctgaggaggcggtttctttccggccgcgccggctccatggctgaggaggcggtttctttcgggttctgccggctccgtggctgaggaggcggtttctttctggttctgccggctccgtggctgaggaggcggtttctttcgggttctgccggctccgtggctgaggaggcggtttctttccggccgcgccggctccatggctgaggaggcggtttctttccggccgcgccggctctgtggccgaggaggtggtttctttcccgttgtgccggctccgtggctgaggaggcggtttctttaaggtcttttctgtgctgatgttttagctttactgagattttgttgcttatcacacaattcaccattgaagtgtcctgggctgatctgatgccgatggcctccgagtcaaatgctctctaaaggaaattctcagaagatctccggggaaaagcacacataatttatagaattagaaagcaaagg

SEQ ID NO: 1885303 - DNA, 4001 bp, Homo sapiens
acgcttgctttcgatttgtttgtttcgcgcatttccctaaagagccgggctctttgcgctgttttaattctgctttaaaaatgcatcgcttctgccctgaatccttctctgaaacaaattcctatcgaaagtgtatcagattcgttccaaatatgggatatggatcaatattcccatgctacaaatattttttaaattgtttttgtcgtaggagtccacacttttgcaatatatttttaattgaagtagggttgcctgttatttctcatgatacacaaaaaagtagcaattaccgtctgcttagtccttcctttattattatttttagcccgtgtatcattacctaactggtatgcgttcttctgcccagctcctgatgatctagttgaattctagacattgtgccaagaagtgtatttgaagcagataagtacgtataatacaaatgcgtcttgttagacctgatggatgctatttttcttttaataggtttgtagcaaactaacacaataacacaatgtattccttttcaagatacattgttgaaacaggtctattaagagcgcgttgagctatttctcgcttccattgaacagtctgttgctcaaacacaacagccaacaaacgccagctgcctcaacaaaagtagaaacctaacccttttatgtaatgttttaacagaaagggtagctctgtttaattaaaaacattgatgattcagtgaaacaatagaaactcaagttcaagtggtgctctattgatttaagatgattttttactagcaatgggtataattcattttttttccagttctctcttgtgtaaaggggttccttctgggggcattatttgggtgaataggaaaagacagagatggctattgccttagaaacctgattaacgtatattgctttgagggtaaggtgtttaatttataagtgcaccccatattttttgtcagtttattcgcggtggggaagctttgaaagtagctcctctcagcaggttaaaaagtgaagtctgcgtcctggcatttaaatgtctttgttattgtgtcaggcaagttgttgaaaactgcatgcccggaatattaaggttgggcggctagaggaggcaagttgtgtgtgtgtgtgtgtgtgtgtgtgtgtgtgtgtgtgtgcgcgcgcgcgcccctgggcgcagggctgtgtgtgcgaggacaattattttcatcagctgcttgctagcccgcgcccgactgctcctctttgcagaaccgacgggctttcaactctggaagtgaagcaggacgaattcctccatggagactccctccttgggaacgtcgaactctctctgccttggggagtggggctcgataaagggtacctaggtcgcaccctggcaggggagcactagagggccgcgaggtcccgggtttcgccatcctgagacccccgcgcggatggcccaggaggggcgcggcggccctgagtcaaggtgggcgggggcaggtgcttccctccaccgcgttgtcctatgccggcgcggtccccaccgcccgacctagcccggcgccggccgagcacggcggccgcgcttcgcactccttcctcccaccgggtccgcaggcccggcttcacgattcccgggccctcgggcatgtgagggacttgagtgaatgcagctccctcaactcactcccgcaaaaccacagccaagagggccttaagtcagagaacccggcctaggagcctcccctagagcctcggcgcgggccccttccccttccccacatcggtcggccgagggagcctagagccggtgggagacgggcagcggcctctcctgatcctttcctgcggtcatacaagttcctagggtgggccgaggacagagcgcctcaggcatcgtcggcttcccacggctgcggcccaggcccagcctgcggccttggagccattcgctccaagccccgacaggccgcgaccgcctcgagggccgcacttccgcctgctaccgactttccgcgcacccaggggtcaaaaggcacggcccgcctctacccacttccggggtccggcctccccaggtccggctggcccccacccagcccagggcccctgtgggtcccggaagccggaggaccgctgagaccgaggcctggagcccgtcgccctccgggcccaccttggcggatgacagtcggggaggccgaggccagaaagggacccgcgggggaaacgtccacaggggccccttaggcctacagtgaattatttaagctgttcctggtgtttaaagaggtttttcagtttttaaagaatgttgtaaaaaaatatcagtccttgttaactccctcattacatgctttttttccctcagctgaacaagctctatttcctgagtcgcaggagtaatgtaagtgtttaaacgtgtgtcaagtgtcttataaataatacaaattcatacagaagaggaggagatttaactgatacctgaaggacttggcatagccacatttgctgtgcggttgtttttggacagggacgtgtggtcgggaaaccgccctgacagcgcctggtggggctctgtcctcagctcagccctgtgagtctgtccccacccctgtctaggaaagcccaggaggagtttgaccagttcgtgagagacggtccagtggtctgcagtttctatactagagcgtctatactcaactcagtattttggagttccttttcttattttttatttttattttttgagacggaggtctcactctgtcgcccagactggagtgtatatagtggctcaatctcggctcaccgcaacctctgcctccctggtttaaatgattctcctgcctcagcctcccgagttgttggaactacaggcacccgacaccacacctggctaacttttgtatttttagaagagagacggtttcaccatgttggccaggctggtctagaactcctcacctcaggtgatccacctgcctcagcctcccaaaatgctgggattactggcgtgagccaccgtgcccagccctggagttgtttttctgtcttttcctttcagcctcctatcctttctccatttttcctttctggtctttctccttcaaagtgtctgctgctgtgacattgctatgacatccctccctccttgttagaatgagggttagtgctgcttctggcaaaaaaagacagtaagagggttgaggtctgggctttaatttgagatctgggccacaaaaccatttgtattcattctcgtccctagaaagctaaaataataataaggaggtttggccatacatggctcacgcctgtaatcccaggactttgggaggccgaggcaagtggattgcctaaggttgggagttcgagaccagcctgagcaacatggagaaactccgtccctaactaaaaatacgaaattagctgggcctggtggtgcatgcctgtaatcccagctactccggaggctgagtcaggaaaatcacttgaacctggaaggtggaggttgcagtgagccgagattgcaccattgcactccagcctgggcaacaagagcgaaactctgtctcaaaaataagaagaagaggaaggaggatgttttcttctgaggaaggtaagtacaaagtattattttatagtaaaatggtgtatactgtgtggaaattagattaaacttcagcagtactcccctgctttagttcattggatgatatttttcatattggttgtcattctgagaaagatttctctggacattctatttctagctgttttaaaatgtctaaactagagggaaatgtaggagttttcaattattaaaataaccaaatgcttttataaagtcagaactatcttgattttaaaacatcatgctcatagtataattatcgtcagtgtagtaacaaaaattgactggattgtggacttaaggaacaggttacaaattcacttcctaagtggtattcccccagcaatttttattttttattttttattttt

SEQ ID NO: 1885304 - DNA, 4001 bp, Homo sapiens
ctgttctcttacattagcaaaatgagaattgttatgggttgttgcctaaaggaatgagaataaaaaacacacaagaatatatttcatgtagttatataacaggttaattgacaagatattatactatatataagtagtttgattagttagatatggtatattaatgggtactttattagagaagatcacaatatatctacagaaatgtccaaaaaattaagggcatataaacacaaatataaaacttccaagaactcttacctatagataattccagcttgtaaaaataagaagattaaatataattctgacttttttaaatgtttgaaattcctgtccaggtaaattaacaatctttaaaggcattgattctacagtaattttgaagcaatatgcagaaattatgaagtaatcattattctgctttataattctacttcaaaaacaacttgatttggtccatttcccttcatttttcttgcctccagcctagtccaagtaactatcctctatcacctggctccctgcagtgggttcctcactaagctctctactcacctattgtatttgaactttcatcttaactggctctttccctttagtatataagaatttcaaagtcctttccaacagattatttgtgaccctctatccagctctctatgttcccagtcaggcttccccaaacactactttgtaccttttgtctgcccttcttcaattctttcctattcttaattcacagtaatatgacttctctaacactcagttgaaaactttccgaggttatcaagaacctcctaattgtcagatctaaattgatttttctgcaacatttggcattattgaacattcctatggagttcctatggaaattcttttacctttgtcttttatgacacatttctcctttactagaattttcatagctgcttgtgcgtcaggcagtgagtgtcatggcaggaaacaggtcatgccctcaaattggataattggaggagattttagtatagtgactatttacaaaagtgtgagcaaggaaggtgaagaaggatagcgcagttgcctaggtttaatagctgtgagcttcaccaattttaggcaaacagaggaaggggttaccaaaatttggctgagccctgtgggaaaagtggccttcactcatgggacatagataatacttagagaactcacaagaatgaatggggaggaataaaagccttcttccttctgtgtctgttttgtttgttttgtcttgttttcacaagttctcccctcaccaatcaggttaacagtacataaagctagagggcaagtaaatcattttatgtgatccaaacacgttggcctccccagacacagaggagggtgccaaagaatagatgggagatctgaaagggctggcagaagacatcttgcccagcctctatttctaagcagtggttttctccagggttcctcttgccttcacactctttagacatccttttgatttggtgcatttttatcttcaatcttggcttatattattatttacatttggtgactttctaatctctaattccatcataaatgtcttattttcttaggtgagtatgatgcatccaactacttcaagggtgcctcttttttgaactctacatcacaaaatctgaactcattttcttcacatcaaatttactttctccatattctctcaagctgaatggcactctacccaccaatcaacaaagcagaaaactcataatgatcctcgactcacttttactatctaggtatagtcaattaataacaatgctgtatagataatctcctagtgaatttttaattcatcctctcctgtgcattgtcaccatcactaatgtaacgagtgtgacgaaaaattcatcctaggaattatggaaactgattacatgaagagcttacctagaatgggggacagagtaagttcttccagatgaaagtgtgtgttagcggagtactgaaggatgaataacacgtacttgggcaaatggtgggaaagtgttagactcaaaagaaacaccatgtgcaaagtgtcctaggggaaagaataaattttatatttgaaaaattaaaaccaaacaagtataactgagatgtaaggagtggagacaggatgctatcttaaaatattttcagttgaagctggagaagtaggaagccagaagactgcaaagggctttagatgtcataatgtgaatttgtgacataatgcttatagtactcaagttgatggcatcaataaagaaggaatggatcccaatagcattatctgtatttaagcctgaaaagttctcatagtcttaatctgtaaagtaggagagcatatcatccaggtgagaagacatgtgaccaaagggaactaataaagcaatcattcaggaagaacacgctttgtttactctcaattgaatctctaaacacaactcatctttgtgccccacacacctgtgtatattcaagaattttcagactgcattatgaggcaggacttctctttgtaaaggacctccttgtatttatttgcaccaaatttgcaccaaaactcttggaagttattgtatgacggttgtcccatcataatttccttccaaaatgcgagatgggaagttcatttatctaagagatgtaagtcttaaatggcatgttattatctttttaattaatcatgacctttcatagtgctaataactagggtaggtcacctaaaccccatgttttgatttagtctcttctaaaataagagttgaaggagatacacatgaagagcctttcaaggtctgaaattctgcaaacagaatgagaatgagcatgagaatgctcaagcattctcatcatctcaagcatgagaatggatggaaggatccctttaagattacttccagctctctaagttttataatatcttaaataaaatggacaatcatgaaaaatcatgactacattttcccaagtgaatcaatatttgttcacacagaataacagcatgtaatccataatgtttggcatcagatccagataggccatctaccatggtacttatttgactgctgaaatttcatctctagaaaagtgttagtaattagatagcagatatgttccaagataatgcactgaggcaattcatccggctcctgtaaaaatctacataaaacacttgcaagcacatgtgtatatacatacacacaagcaaaaaacacttgttagaagctagactatagatgttttcatagacgaatgagaatagaaacatcaactatgatggggaaaatgaataatggaaaaagaagtgcattgtcctttctcatttttacgtcttaaactattttaaataataatttctgactttactcttttaattttattttatcacctcttaacttaaacttaacactgtccagtggagaattactcatctcctaaaggatcctaaggcttaattaatagaggagccagccaaagaaataaagctagagatatcggaagtaattacaatttaatgaaacaaggatgaacaaattaccacaaagcccagtagcctagtaagtgacctgaaatgaaaatttggtcatcaaactgataacctctctttttactcacctctcactctaaaataccatttccttatactctttcttattctattcttttctcattttggagaatgtgtgaggtgatcatagctttgattacaagtataaataataaaaatgtccttgtgcccctcatcctcaacacaagtgcacatattcaacaggtaaccatggcacatagtctgcaggatgaaattaaaattcaactttaggccgggtgcagtggctcacgcctgtaatcccagcactttgggaggctgaggcgggcagatcatgaggtcaggagcttgagaccagactgaccaacatggcaaaacactgtctctactaaaaataccaaaattagcagggcatggtggtgcatgcctgtaatcccagctacttggg

SEQ ID NO: 1885305 - DNA, 4001 bp, Homo sapiens
cacctgaggtcaggagtttgagaccaacctgaccaacacggagaaaccctgtctctactaaaaatacaaaattagctgggcctggtggcacatgcctgtaatcccagctactaaggaggctgaagcaggagaatcgcttgaacctgggaggtggagttcgcagtgacctgagatcctgccattgtactccagcttgggcaacaagagtgaaacgccatctcaaaaacaagaaaaaggcttagaaatagtaactttcttttactgtgtatactatttttttttcatcagaataacctcataaacaggaaagttcttattaatgatcttttttacttagcacttagggaagaatggatttatagtagcaaatagtagtcacaaatatatacagtaatgtagtgtttctaaaacttttcatgtgcctaaaaaatgtcctggaactataattccttcttaatatttatactatttagttttggaaataaaatggaattgcaatctttgtgttaagatagagtgcagatgcagaatggaagcaggaagaacacaggcgtgggtattagtcatttctgggcttgaaccttagttcttttcaccttctgtgtgcctcaatttcctcctatttaaaagtggaagagtaagaactaaagaaggaggagagaaacacgaagggtggctcgatagtcaacaggtttatttcaaacctgggagggacttctgaccaagttaggtcagaagctgcactctcttacagactaagagtttttaaggattcagggtgggagagtttatcagagacttcgactgcttctgtgtctctttgttgtgcttatctgagagggagagttgtgtgtctgttcccatacatctttctgcagcttcaggcatatcccctgagtctgcctttagcttccctatctgagtgcaccagcagagaaaggaatgtgcttattaaggcccactgttttactggggccccattgtatgagggtgaagtttggcagttacacaagagacttcctccctgccttcctctgtgcctgagcctgtcttacctgtgttttactgtctgctcttttctggctgcttgtagttagaagtgatttccttgaaatgcgtgaggctagaaagggagtgtttgtcagagatgatggtgctcatgctctgtcaggaagttaagtcacttttacgaggattctgtgcggtaaatatgattacatttgtaaatatccttgagaaagtgatgagcacctactccacaaatgcctcccttttctcctttcccttttcagagcatccttctttattttattattatttctttttgagacggagtctcgctctgtcatgctagctggagtgcagtggtgtgatctcagctcactgcaacctccgcctccctggtttaagtgattctcctgcgtcagcctccagagtaactgagactacaggcaggcgcccgccaccatgcccagctaatattttgtatttttagtagagatggggtttcactgtgttatccaggatggtcctggatctcctgacctcatgattcgcctgcctcggcctcccaaagtgctgggattacagtcctgagtctccgcgcccagctgcttccgtctttagaaacccaaatgtttccgtttgccgtggctgctgcaacaaattattattaatcaggcgccttaaacagaaaattatgtctcacacttctggaggctggaagtcagagagtgaaatgttggcagtgttggtgccttctgagattgtgagaggatctgcttaagacctctcttgttggcttgtaagatggtcatctttctgtgtgtcttcgcatttccttccctatctatgtatgtgtctatgttcaaatttccccttcttacaaggacaccagtcaaatcgtattagagcccactgtaatgaccacatcttaattgtcttcataaagactctatttccaaataaggtcactctgtgtggtagttggggttagaatttcaatgtaagaattttgtggtgtcataatctaaccccaaacaccatataaacaaatgcataagtggaaccatcaaaatacctgtttaagtgaatccttgtatttgtctctcattctgagcaagattttcactttattcttcaaattattgaacacaatgttaaatctgtttgcagacaaaacattttagacatcgttgttttattttcacctttttaaagagtctacacagcattaaactttatacttgaaatcaagaaaaaaaaaacaatttatctttcaagtttctttttccaaatattaaaataacatgctgaaaaatttaaattgtcagatatgaatttcatcttaagaaaattatcacttgtttaatattacttgatactatcagccaaagtggctggtttccccagtttcattataattactgtgtacgtttataggaatcatgcatgtaatataatctaacccttttgtaattttcctgaaagcaggttagttaatttatgcaggcagggtgccaaagcaaaatctgtagtaaacagatacaattctcactgtgctttggtattttttcagtttttaccatttcaaatatgtttatttttaacattttaattaaatgaaataaaaagagctgctatttaatttacctatgtggaagaacagtttggcttcttcaagaaggacacaagtgactataaactctgagctgaaactcattatgtattttgatttttgttcctagtgcaagtggtaaattccttctgccttatgcacataataattagtgtcattatctgctgctttatcataatactatatacaccaaaatgtaaattagcagcccagccctttagaaatgatggagtggatgactgaagtgcaatttactgattaaaagtttcattttctatatctcactgatgaatgcagccctttgcttccctgagatgtcaaatcctgaaggatatcatgttgggctggaacattctaagaatggagattatgtgaatggatatggcaacgtaattattgtgccttttttgccaacactttgtatggaaatttaagtaaaagtttaaaaaagccataaagaagaaaaacctgtttgtcaattttaataaagttaagggtatgaggtattaatatcacaccgacacaataaaaagtcataagtctaagactgcaaaacctaaaagtcatataggatattctttcattgaacatttaaagatgtatatatacatacatatcccatatatgtgtgggatatgtgatatatatatatattgaaatatatatatgtctttcaaatgtgtttattttgtgtgtataaatgttttgtgtatatatatatatgtttattttgtgtgtgtatatatatatatatatacacacacacacacacacacaaagaccaaagaaatcctctgttaagtgaatgaatgaatactcataatattacttgtatataagaagggatttatctggttaaatagaaagaggacaaaaagaaataattgaatggcactatcaagtatagaggacttaagtacagtgaacatttactagtgcaagcaacatgcaatcctttgttttattcccgtaatatgaacaaagataagtctgatttttagaatccaatttttggtgataagtacagaggtaatctttagacaccactgccaacagcgcaatgaaggggaatagctttaaaataataataataataacatacctaagagtcctatctcaaggctattaggcatttgttgcagcccttagcaaaagactctagtcataaacaggcctgttcaatcatattaatgaatgagaagagaaagtggcttgtcttatagttttcttttctttttatttttttctaacacacacacagacggatagacccacacagtttttctctgataattctatctattttgcataatctcctgctttttcctactattttccttgttttattctgctggtctgtgtt

SEQ ID NO: 1885306 - DNA, 4001 bp, Homo sapiens
taaatgagcaaactgggcatggtggtgcatgcctgtagtcccagctacttaagaggctgagacaggggcattgcttgagcccagaggtttgagtctagcctgggcaacatagggagaccctgagaaagaagaaagcaaagcaaagctaaaaaaaaaaagaaagaaaaggaaggaaagaaaggaaggaaagagagaaaaatagagagaaagagaaaaagagaaaagagagaaaggaaggaaggaagaaagggaaggaaggaaggaagggagggagggaagggaagggaagggaagaaatgagcatatcctgtgatcactttgaatctaagcctataattttatgatagatgttcaacaattcttagttctgttgagtctgtgtccgctcagcagctcagctgggcatctcaaaggtcaaatcatttaaatattttctctgagtcaaattcacaaacacaagagttgattctacatctgcagacaaacaggtaccagaaagccctacctcactgttacacactaagagtgtggaatgaacagcaggtgaaatagccaaacctacacaaatcaaccaacaaaatcaaatgggagttgaggagaggcgtaggtgttactcaggtatagtgccaagtggatctgaggacaagaatgttctcctatgcatctctgtatccttaatactaagcacagtgcctggcacaaaatagatgctcaaaaaccatttgctgaattcaactgaactgaaatttatgtctgacaattattaactatttgccttttcatttcgtatgaggttcacgattcattgttatatatttattcatacattgacttggatttaattgcttatatctcccccactacattacaaacaccataagggaccatgtctcctattgatcattgtataccatgtagccctggtacattgtgtggcacataggaggtgtgcacttaatatttgttgaatgaagtgaataaatactggaagtggatctctaaaataactgtgtacttgaaagaattctagaatcatagaatctttctaatccttttagttattatttgtttattatcaagtcttcccatttagactgaaccatttaagaaatgaagcaatttaatctagataaaataatggtaatgcaatagtaatatcagaatatttcttctaaattgatggtcaaaaatgctcatgagagtccccagaaacactcagcttcaagttttgttttttctttttttttgagacggagtcttgctctgttacccaggctggagtgcagtggcgctatctgggctcactgcaagctccgcctgccgggttcacggcattctcctgcctcagcctcccgagtagctgggactacaggcgcctgccaccacgcccagctaattctttgtatttttagtagagacggggtttcactgtgttagccaggatggtctcgatctcctgacctcatgatccacccgcttcagcctcccaaagtgctgggattacaggcgtgagacactgcgcccggcctcagcttcgagttttttagggaaacattttactggccaacactcccattttcaaacagacttcacagtcaatccagaggctgcagataactaacttaatcctcttctttgggctatataactgggtttgtctttttttttttttttttggcacttctactgaagggcatactaagcagagaaaagaaatccagtcaaaccataagcatgaattttggcagcttttataacagccaagcctagtgaacagttagtatttggtgactccaatgttgtctttctggaccttttcccacccagtcatggagatatccctccacccaaagctgctccattcatacctaaggctcaaatggctgtgaagacagtgtttgttaccggtctgcaataagataacttacatcagaatataaatgaaagcactgaagcttcctgcattggaaaagtcttgctaccttgctaccaagataaaaatatatttcagatgaactaaatagtgtgcttcatgacataattgacttaaatcctggcaaaagatccttacctggttgcaagtcaggaacaaagagcttcagagactggcgctttgagcagcattctgctaagccataaaaagatatctcctcctgcatatctgcattttaaaggacaataagaagcttcaaactgaaggaatcattccctaagcacaggttctcacaaacatagggatattatgtctcgaacaggtggacatggtatttggggtttagaagggaaccactgaaatgaggcatcctgccataaccagatctagtacataacacatgcataaaacggtatcaattccttttctcctacatcctgacccaatccaattttttttcaaaggaacacatgcattagaatcacctaagaaatttattaaacatgcctgttgccaggccagctgaattagaatagctgggtatgggcctaggaatctgtatgcttaacaggcatccaaaagatttatgtacactgaaatctgagaaccactgcattagatcagctgaggctacagaaaagatctttgcaactgcaaaggaaacaaaaataaaagtccaaagtgagcaccaaataggaacttttgtccctgccacagatatttcagaaagcaagtgaatacagcatagccgatcaactgatgcaagcaccccctacaccacaaataggctttgccctatagcatttgccagttactgtttaagcaaaccattgtttaactgccattaacctcataggattattgacactgggtatccatttctcaaagagatgtcagatatttgactaggttaaattgagaaacactggattctttggcttggtttcgttttgttaatggaacttcctcacctcagaaacagcatgtaagtcaattagcctttttctaactaaggaaacaatggactttattcacatggtatttcactcacaagtcccctaaattactggcttgccaaaccctgctcaagtaagcaggctgagtgacaataacaaaagctaaatcatttggcatttcagtgacaatgtataacagtgtataaattttttaaatccccttactgttctgccttctcagcaatgacacatctacaaaatgggcactaggccaagtaccctaccacaaaacaaaatcgttgcctgttgtggtattaatgttcagtgaagcaactggtctcagtacacagtcaagtaaacaggcatcaaagggtagaacctaactgttaacccaaagtatctgagacgggtctcagtcaatttagtaagtttttcttttgtctttttggccaagattaaggaggcacccgtgacacagcctcagggggccctgacgacatgtgcccaaggtggctggggtacagcttgcttttatacattttagggagacatgagacattagtcaacatgtgtaagatgtacattggtttggccaggtaaggcgggacaactcaatgtgggggcttccaggttagaagtagataaaagacattagggtgcattcttttgagtcctgatgagccttccactcaatacacaacttagtctgactcagtgaatctgcatttttacataaacaatagggcaaaggaagcaatcagatatgcatttgtctcaggtgagtctcagagggatgactttgagttctgtctgtcctttgtccacagtgaatttccttgtggacgaggatctgtggcaaattgcgagggaggtatgtagctatgttatttaggaataaaatgggaggcaggtttgcctgacatagctcccagtttgatttttcccttggcttagtgatttattttcctttcacataaccacagaggagaatgccatggagaggggcaataacaggcactgaacatcaggaatgctggcaggcgagtcagatatggctccaagtctgttcagtggtctccacaaggcttccacaaaggccaaaggtttcatgc

SEQ ID NO: 1885307 - DNA, 4001 bp, Homo sapiens
acatctgtgctcaaatataaggaaataggtcaaacagagacgcctcctcctgctgcaacgcctttcacactgcgtcaaagagttgcatcaaacaggatgatcagtgttgcaaggtgtggagaccacaaactgtctgccaccactgccaggcaccatgtaacctcaattcttccctggcaaatagtgtctgacacagtgcaaaagggcagcactgttagaaagactgcagctctaactaaaactgatgatcaagcaagaggaaaaaatccgattatcagctattttagagtacatttaaattcccaagtgcaatgacccctaaatgcaaaccattgtttttgaccagctatgactaaaacagctaaaaaggattgagaaacagcaagagagaaactatgccctctaaagaagcagacttcctgccttggctagcttgtgttagagcagattctgccaaataataccactataaaacgtgtcttcaaaaaagctgtatcttccaaaagatgatgtaacagttgctctagggaggcaatagcaatgttcagatgaatggtgaattcctttcctattgctgctctaacaaattaccacaaatcagtggcttaaaacaaaacagctttattactgcacagttttggaggtctgaagtctgaaatgggtttcactaggtacaagtccaggtgtcagcaggggtgtgttccagcttctagaggcttcctgcattccttcgctcatggcctcactcctccatcttctaagccagcaatgtcaggctgagccttcctcatgctgccgcctttctgattctttctctcctgcctctctcttataaggaacattgtgatgacattggacccacccagatgatcccagatagtctcaccatctcaaggtcagctgattatcaaccttaattcagtctggaacctcaagtctcccattgccatgtgacataacatagtcacaggttccaaggattaggatgtagatatctttggggggctattattctccctatcacaaaagggaacaccagagtcttcagtttagcaatcttcaaggaatgttgacaaagcaagaatctgaggctttgagaatgtaggtaattttcccgaagacattctgcaagtaggagatagagctggaacatgaccagatctgtctgccaagtaagcccaggctcatcctccacacgctgcccccatcaggaggcaacctggccccttctactgaatctctacatcagatggagcctgcatatgactcagcagaaacctcagaggaaattctgcttccttcaggaatttcagggcatggtggtgattggaaagagtcaggacagttggcctttacttcatattgcatcacaaccactaagtggctttgggaagtttgctaaaactttcaggttctaaggatcctcggctgtgaaaccaggaacttggactagatggtgtctaagacatctttcagttctaaaattctataattgaatggtcttatgggtaaaaccactttgctgcagaacagtgccactcagagcatagtttgtcgacctctgtcagtccagagtattcggtacctgtccatgacaagataaggagcttaagccaaaatgttaaccaactacatcagtaagtgcactgttcagtactgctgccatttgattttttgtagcaaggctttcgtggtgaaggaagcagtgtgttgatttacttcctggcataatcttcttatctcattgcagattgttagcaaatagttcctggatgagattctgaataatgctgatgtagaaaaaacattaaagttcagaggtgaatatgtgcttaatatctgaaaatttttagagaatgacagctggttgttcttgcctcacagaaaggaatagtatccagtaagtatttgtaaaaatacaaatgatgaaactatctttgggatctgtgatagactgcagtatttcttccagattatttacactctccctgcaagaaaattatacatccaggtctactgccatgggccttcctgtggaatacatttcttcccactattgacatcagacttgggtccagggacttgccttggttaatggaatgtgagcagatggcttataccatgtctcagcagaagttttggaagtcattcacgcctgtaatcccagcactttgggaggccaaggcgggcagatcacttgaggtcaggagttcaagaccagcctggccaacacggtgaaaccctctctctactaaaaatacaaaaattaactgggtgtggtagcgcacgcctgtagtcccagctactagggagactgaggcagaagaattgcttgaacccagggggtgggggttgcagtgatccaagagtgcgctactgcactccagcctgggcgacagagcaagactccatctcaacaacaacaacaacaacaaaaatcattgcatagttcagccatggctttttttcttctcttaaaaaatgtgggggcagggaggggaaggaagggggtgtcctaggtaggggtgaatctttcagcctgtaaaccagaatgaagaagacatgtagagcagagctatagtcaaccctagctgacatatattgtaagcaaaaaataatcctttgtcattgtccctgagattttggaattgtttgttactgcaacctaaccgaacaaatgctggtagaacaatttgtattcctttgggtatatacccagtaatggaattgctgggtcaaattgtagctctgtttttagctctttgagcaatcaccacactggtttccacaatggttgaactaattaacactcccaccaagagtatataagaattcccttttctctgcaacctcaccagcatctgttattttttgacttattgataatagccaatctgaccagtgtgagatgacatctcattgttgttttgattcgcatttctctaattagtagtgcattcttctttctattagtaagtacaacaaagtttttacctcaatagcctcatggcccagtcaggactgctttatctcaaaaagcaaagcagaaactacagctattatgaagtcaatgacagtagcattgtttacccccaggcaaatagatttcttattgctgagagcatacccacctcctccaacacacacacacacacacatacaggatatggattaagttgaatggttcaagtgttttatgttttcatagccacactccacttccaataacttacaaagtcctgtcagttctacctccacctcttacatgtctctccaatgtctctggttccactgccactattccattccaggccatcattatctctcatctggacaattgtgataatttactaagtggtatggccatatacatcaactcttcccccactctagctagcttgctatataattctacaaaagtcagggctgggcatggtggctcatgcctgtaatcccagcactttgggaggctgaggtgggcagatcacgaggtcaggagatcgagaccatcctggcttgatctcctgtctctacatggtgaaaacctgtctctactaaaaatacaaaaaattagccgggcgtgatggcgggcacctgtagtcccagctactcgggaggctgaggcaggagaattgtgtgaacccaggaagtggagcttgcagtgagtcgagatcacgccactgcactccagcctcgatgacagagtgagactccatctaaaaaaaaaaacaaaaacaaaaaacaaaaaacaaaagtcagctttccaaaatgtaaaattaatcacattattgccctgcttaaaactcattcagtagtcacaaaggagagaaaaaaaggaatcaaactttatcactacagaaaatgaccaaactgcaaaaataaacaatgagaagaagtaaggaataagtaatatgcaaaacaaccagaaaacaatctataaaatgataagagtaagtctttacctatcaataataactgtgaatgtaaatgtattaaattac

SEQ ID NO: 1885308 - DNA, 4001 bp, Homo sapiens
cactttgtaccctctcccgagagctttgaggggtacctgccgcctctagctgtgccttctctgtgcccttcaactctggagtgaggtcagatcttggctctggggccaccaccagctgtttcaggcttgcaaagttctgtccgacaaaatacagctccgcttccctgtggggggaagcattggccccaacaggccttcttcaccaacggggacagcagtcccttgagtggagccctggactcagggagctctggtcagtgaaactctcagctaggggctaagggtatggggaccttcatatgtgggacaggctcctcgctggggacgctgccaccaggcctgtgaggcagccagccaagttccacttgctgcagctggggctgctctggacggccaatccagacacctcccccctctccaccctctttccatcctcaggtttgcatttcttaggtctggcacttcaactgcaaagtacaagtcctgggctatctcctcctgctctgctgaaggccacatcgatgcttggaaggtagggtcagcccagtcccttgctccacacacccaactacactgatggagcgaccgtctacacagggatcctacggtggggagtgagccttgctggcctgatgcatggcagtggttcctgctccaataagaccaagaataattaataactgtgactaagttagaagctttggctgcatctgaattcaccagcgtttccagctcctgaggccatgtgcggtgtcacctcactcctggcagacagactcccactcggaggatgatttttcatagccagggtcgctctgtggaccttggatggaccaacgtgctttccatgtccaactttgtcaagatccggggaagattctccagcaagtctcttggaaacatgtgcatgtggccccaggcgacgtgaggggtgcagtctgcctgcgttatgcaatgctcaggccagttttccctgagagaggaatgctgccgatcctctgcggtaacccacaaaactccacggagatgcttggaaggaaaagcatcgcgtcctccagatgttttgaaatgttcaagtatttaaaagggaaatggaatttctgtttatccttttaagtgacaattattcattgcgtcttcctggccacagctcattcagcactactgcagatccggccagacccccaggagccgcggcccctgcacagccaaggccaagaagctcccatcgtggaggggggcgcattccggacctgtgaggcccggggttcgtttttatgcctccttaaagggatgagccagagaagaaagtcttcgcaaagcctttgccccaggaggggcggggctgcgcagggcgcctgtggaggccgtggccgggcaggtggggaggctcacacacaggccagaggcttccctggaaactgacgccctagggcaggtccagctcctggatggtcgcaggtgaagaaacgccaggcccaagggtcctgggagagagaggggaacagcgcccaggaagaggtgcaggttcccagggactgcaagggccgccgccaccctcccacaccccaccctcgctgcatcaccagtcagcccagggcaggctgctgaccctcccttggcctcagtttcctcatctgtaaaatggaaaaagaagcatgtccacctcaccagtggtcacagtcacaggtgctgacatggagaaggattgatgcgtcctcctgagtgctgccttgtcatgctataaaccaggaggcctggctctctgcctcccgggaaggtctgtttctaatcctgtgctgggtctgcgtggctccatggcctcagaggctgacaccgagtgtggtgtccctgggtcaccgtgctccttggtttggtccagcaggagaaagggcagcctgccaaggagaaggctgtgagcttggcaggggagaacttaggcgctgtgcctttgggaggctgggatttagatcacagctgggaagctaagtcctgactgcactggccggaaccaatgggctccagtagccggatgctctgccaagtcaggaggtaataaccgccacggcctgggagagaagctggcacagccgtgggcccctgccctgcggtctggcctcgcaggtccccaggccgtgtacagacactgtgcggcagggaagcagaggcagccatggggagcaaccctgtttctcagtgctacatgcctactctccctgagctgatgtctggaagacagtaaaggagacctgaggcagtgctgcccctccttccgtctgccacctcctcagggctggcccaggccctgcagagcaggtggtggtggctgctggtggtaaagcccgtccatccagagcctcgctctgctcccaaaccacccacctcccgctgcacatgtggcagcttcaggagcctggcggggctaagaggagatgacagaccccagcaaggacaggctcagcttcttggggaccgagtcattgcctgttgcttctcctgggggcctcgactgtccgagtgtgttcaggcacacggtgccctgtctgtttcccaggcacttgggccaaggctggacagggaggtgccatgtgggacgaaagcccaggctgtgcagtgctggtcaccgggagtgaccatgggtgaagtcgcgctgtgagtgactgcctgttatcactgaccacgcagggccatcctgggtgacccgctgtgccacaagcaactggttcacattggagcccccctctggagccctgggcaacccgctgccagtgggcctttctcctgaggcccctggagtcccggagcatcccgtgagttcatctgccatacctgtgattgccatgtgggcccagcgccctccaatggaaaagctgcattcagttctgcccgaggatcccaggcctacgacactgtcctcaggctgccagggagcaggaggctgtggggatctgcgttcttgccaggcctgggagcagcagccaaaaagtggacttacgtggacaaaatgttgggccagggaggagccctcggctctggacggatgtctctggtgcttttatgccacgtgcatttctgcagatttgatgcccggcagccagcactgggctgtggccatggtggtgaggcagccttgggtctgcacgaggctcggaggcctccaggaacctcccaggaatgtgactgtgcctggagagaagcgccatctgcacggcgcagtccagatgcttctctcctacaagcccatcatcaaacacacagctgcccagacttcagcaggatttgtgcacaagaaacgcaaaggcacagtccatcgggtgaggcagaggtggaaggagcaccggggtgggagtggaggagcaccgaggtgggggcgcaggagcaccgaggcgggggcgcaggagcaccgaggcgggggcgcaggagcaccgaggcgggggcgcgggagcactgaggctgagctgtctctagtgatctctcaagcctcagtgcagtggccacagggcaaggtgcctcctggtgtgtcctcgcctccaaatcaggctgctccacttcccaggtcagagtcctggggggttgtgttgaccctgagcccccacgagcatccaatccagcagagctggaaggacccaagaacctgcattcctcatggctcccatcatgcttccggtccaggagccaccatccagaccacactcccattcatcccctggccacggaagctgaagccttggtttccccacctgtaaagtgggagtatcaacatcacccacatcaaagggcctggattagatgcggtgatgcccgtggactttagcagccccggtcctccaggggccctcccagggagctgaggcccgggtggtcctggcggccgctccttctccaggccgaagacaggaaggtctcttgggctgacctcaggcaagaggcggggtgggtcacggcctccagggccaggctggggcctccacagaaagcccgtgggtggcgagagggagccg

SEQ ID NO: 1885309 - DNA, 4001 bp, Homo sapiens
gattccataaaaaatttctttctttttgtaagtaactcatatttatttttgaaataatttttattagaagtatttttagtatgtgggaacaactggtgttggtgttatcaatcacttgattaatttattcataagatatctttgttgaaaatataaatatttaaaacagtgacccaaacctctaagggaaaaacataaactgtggcaaaaacaacagaaaagaaagaacacttaaataaaataatagaagtaacatacatgtaatctgaaattataccaatgaaaactagtgcataattttcaatatatagaggatccatttatatatttcagaaaactgacattagaaaataaaaggggttagaatatgccagccagaattaaagtgaaaaagctaaagattccttttgtctcttgaatcacaagctcttatctgcaaaatgtcacagcgaaaatttctgccagtattaaatgggatcttggtgagcctcatttaatatctctattcatactcaaacaaaatgtttttaagtaatggagatgaatattatggttttaaatcacaaaaagttaacaatactgaatcatattcagtactgaaagcaccttaaacttgaagtatgattcttttcataatgacatatggttttcagaaaaatagcagaaactgacattctagaaaaacaaaatgagtgattcacaccccagtaaaatctaatatcacttccaggatattaaatacttcatgtgccaagttagtcatagattctggccttacttcaagaggtactactgatattcttagttgttttgctttttatttgttttgtgtgtgtgtgtgcatgggttttttttttaaattctaatgaatccataaaaatttatccacatatgaagaattcataatgaaacaaacttattgcatctgattcatgaatcttcatggaattgacatgaagacttggctttagagatctctagaactcccaactaaaacaaaaataaattacttctaaattatctacattatttgccttcatagttgtgtgataattgcaggatctcggggcaatatccttgcaaatgcatctagtcatgttcttggatgtctttatttattaaataacctattatactcaatttaacacacatctctcaagtatgtgtacctggctctgtgataattgtgaaggattaacaagacaataaaatatagctgactcttgaacaacatgggtttgaactgtgtggatccacttatagccagattttgttcaataaaagttacacctagtgtgcctatctctcctgcctcttcttctacctcctccacctctttttcctctgtcacccctgagacagcaagaccaacctctcctctttctcctcctcctcagcctactcaatgtgaagaggataagaataaagaccttttgtgatactccttttccacttaatgaatagtaaatatatttcctctttcttatgattttcttaacaacactttcttttctctagcctaccactgtgagaatacagttgtactacatataatacgctaactaaatatatgttaattgactgtttgtgttattgatcagacttccagtcaacagtagtctattaattaagcctggggggagtcaaaagtgatacacaaattttcaactgtgtggggtgccagtgcccatgactccttcaaggttcagcgctatggtctcaagtagctcacactcaggttgacagacagtaaagtcaacattacaacagaatttggcaagtgccctaaaataaaaagaaatgggattctaggagagaaggaaaagaaagttcaatgtctcccacatttagctaaaatcaccttcccccaaatgtacgtactttagatataagtcatacctttcagtccagaggaaataagcatccttccatgcaaggggttcttaaattttgttgttacttttatttgtttgctttcttgcttgtttttatcttttggcctaaaagacaaaacatcaatgtcaccatcttctactaaatctcatcaactgtttctcaaattaaaagataactgcatcttattctcttttgaacatacattttgtttcaagatcctccttaaaacatgattaacaaaagtaaacacaatactatgttaaaatatgaatatataatgctataaacagttacagatattatttttttctgtacttagggttgtaatgctataatcaaccaattttttccttacaattattttttaagtgtagcaagaccctgtaagtccagtgaatttttgtttgcttgcttttaaaaaataattatttctattagattatggcatattttaatctgtttaaagattttacaactaaattctgacaccaaatattaactctcctatcagatttagagatttcattaacgttacttctattttcattcaggcaataataaaaatgctgattaatatagttaagtacagggtcttctggaattctggggtagcatacagtaaatgtctccagagaaatacttaccaactgtttgctgctgaagaacccactccaatttaaggcagtgtgtactaaaggggtccctgagactcaaattgaactttttaagactctaacctttttaattcacttataggtattttcattccatctttagtacaaacctatgagacagatctattattaagctatttcaccaaaaaggaaaccaagactgcataacttgcctaacttgcatggtcatgcagttgattgacagactaagagactcaaaggcgatgcattgattcccaggaaacaattattcaatcatttattattcaccagattgttctatgactatatgtccgtgatgttttaagacattttaatatggatttttacaatcaatacctatactacacacacctgaatggctaaaactttaaaaattggaaaaaccaaacactagcgagaacatggggtcaggggaactctaatgtatgctgtgtgggaatgtaccatacaatattttccttcactttgaagaagaggcttgggattttacatttgatatataaaatcatatataccaaatattttcactgtaaccaaggagtttcctgcctagaaatttactcaagaaattggaaaactatgcacaaaaaaagtttgtaataagaatattcatgaaagctttattctttgtaatgaaaaactgaaaactgtccaagtttctacagagagcaataaactgtggtgcattcacactgaaatatgactcagtaataaaaaggaatgagctactgataagtcaaaaaacaaggatgaatctcataaatatgcagagtgaaagatgcttttccagaaggtgatgtatagtaaaaaaaatgcattcccctattttattgagaaaaaggaagttatactctataccatagtttgcttttttgtttttgccgtttttttaaaatttttttatttttttcacacatatgggctatcttttgttctgctttttatttatttatttatttattattattatactttaagttttagggtacatgtgcacaatgtgcaggttagttacatatgtatacatgtgccatgctggtgtgctgcacccattaactcgtcatttagcattaggtatatctcctaatgctatccctcccccctccccccaccccacaacagtccccagagtgtgatattccccttcctgtgtccatgtgttctcattgttcaattcccacctatgagtgagaatatgcggtgtttggttttttgtccttgcaatagtttcctgagaatgatgatttccagtttcatccatgtccctacaaaggacatgaactcatcattttttacggttgcatagtattccatggggtatatgtgccacattttcttaatccagtctatcattgttggacatttgggttggttccaagtctttgctattgtgaatagtgccacaataaacatatgtgtgcatgtgtt

SEQ ID NO: 1885310 - DNA, 4001 bp, Homo sapiens
ctggaggcaggtgatgctccggtgagcacatcagaggcagcagccgcagtctgctcaccctgcagctgagacgggggagaagcttcgccagctgcctcatcaaatggaatgcaaacagagaggagagccccacttgctcatcatgctcctagctactccagcctcgctccagggtgctcagggcaaaagagggcagccctctgccaaggagggcttcctggtgtgtctttccatggaggaaggactcctctgggaaggactcctgctgggggacttggggcatctggattgccagctgtactcagcaaggagcggccgcagaaagttctgagtgcttcttgagggaaagcataagccatcagcagagagggagagagtcagagcaagagcgagagcgagcgagagagagagagagagagagagagaatgggcctcccaatctacaaagtccctgcaccagaagtaaggacatcaggcttgagaccttgaggctgcagctgtgcacacccattcccccagccactgctcatgcctgcagttcctgccacagagagaggccttccaccccacagctgaaaataaaacttaaatgcacatacccctttgacggaaaaacagtgacttcaaaaccatcaaaacaagaagtcactgattttaaatcctttactgagattgatagggaaaaaggattatgcaggagctggacgtgaaccgtggctgctacacaatttgggctagggcttactcttctctcattaaaaaaccctatttattccaccaaagtaggtagagttctccctctcctctttggattctctactatattccttagtaacgtcatgaggctttctcaggactaagcctgcaagttgtctattaagccagctttccagtggggactgcctaatattgaccaaatactttagagagtcatatcatctgtgagctggcagagatccagaactccagtctagcactcacattttacagacaaggaagccagtgccagggccttagcctggtttcacaactctttctctggttctcttggtgactgacaacaaaacgacgcctccctattctggtgtggcttgggcttctggctgctggcacaggaatagccaaaatccttcctttcaagctttctgtgtaatggaaaccctgcttgactaattagggcccacctctctcaaactcctgaatcactggcattcattaaatatagaaaagcattttatccccctaatgaaggagaactggaataacatagatgagtcacacacactgaaaactgtcatgatattcaagaaaggtgaccttctctcacacctgcagacctgggagggtggattgaaatctacatccagttttctccttgggctctgactggcaggagggtttgttgcttgtttttttttcttttttctccagttccttgtagtaggatggagatgtgggttctgttttatgaggtgtggattgcgtgggctgatggcgtggaggaggagactagaagaaaagcaatacacacacacacacagaaacacacacataccgcccccacacacattaatgcatacacacaaaccccacaaaaacacacatgcagagatacacatgcacacactcataccacacacacagacacaaacacaaccatacactcacaacacacaaatgcacatatcaacacacacatagacactctcacgcacatgcaaacactcagacacatacacccactcacactacacacaaacacaaataaatatgtactcacattctctctcacacacactctctcacacacacactcacacacacacacatacacctttggttgccacagaccttggtgtttgttcccactggctggctcagcagaaaatgtggctgagttgtaagactctgttttgaatgtgggagttggaaagagcaaagatattcttcaggttcaggaaggcaccggccaacaggagccgaaggaggaagagagaagagatgattttcttccctaagaataacttttgaaggtggagctgaatttcacctgttcaccttggtgatgtcactttaccccactgtttctcaacgtgcagtgcctctgatgaacctgatgccaggcctgtgaggtacacctttagccacttctatgatgccagtttttgttgacaacacatgttctgaatgcaccatggctggctgactttgactgggcagatagcacaaatctccagtctgaaagtcatcataatacttggaatgtttagaaaagtcataacttaggggtggttcgtaacttcttagaattgtgcttccctcaaattatatataagcagaagagagcagctttggatgatgggagtaattcaggagtaaccagggatccctagatctggaagaaggaagtaaagttagtgctttcttcaaaggtttcaatatttccttatattttagtgcagcttaaatccaaaatcataactaaggatatctttgctatgggaaatagcttgttaaatggatgctgttggccaatttaaaaagaatgacatgaaatgattccacaagctgcagatctacagatgggaattagattgggtattctgatttaaggaaacaaatttgagagaaaaagaattccattttattgcaaaattagagttgaataaatcaggtaggtaatgaaagattcagggaaagatgatacttctaaaaacaaagttctacaatctccaacccagatttcacaagcccccaggattgtttcaattttgtcagtgggcttaaagaacttatccaaaaattcttaaaataacattaaatcctttaaagtattttgtaagatgtaagagtgccattgtaaaaaagagaatagggattattatgacatccaactaattatgggatactgcaagcaccagaagtgtagtcattgctgaattagtttctgaacttccaactcagaacagatctggatttgctctacagggtgtgcatctcttatcagatttggaatatatatatatatatatatatatatatatatatatatatatattggattttggaatatttgcatatacataatgaggtatcttggtggtgggacccaagtctgaacaaacacgaaattcatttatgtttcatatacatcttatgcacatggcctggaggtaattttatacaatattttaaatgagtttgtgcctgaaacaaagctttgactgtgttttagctgccatctgtcacctaaggccaggtgcggaattttccacttgtggtggcatgttggcaaccaaaaaagttttagattctggataattttggatttcagatttttggattagggatgctcaacctatattactttaaggagcagtattgctgctccaaacagggtggtcttctctgtgggagtcagagagattatagatatttggtgctttaagtcccattaagttgggctactctttcagaaataaatgatctcaattagtataatctccataaagtgacaccacttgcttatgaaactcattttcttttaaccaaatgtcccccaagtgctttaaaatcattagtaggttgctgaatgagaatgcagggaaggaactagcacctaatacttctatgttctttatggacttttctctttccagaaataaaagcattgcctactttcctgtgaactacatttgtgttgagaattagttcacaatgaaaagtgctaagcattactatatcccctgtagtaataacacaggtgttatagacacaaccatggtgtccaaatgaggaccagcagaagagagaaccaaaaaatgcatggatgtgggggcatggcagagaagttgaaatgaagtttctggggaaactggattttatccctatatttctttatgtattcagtttagtctatcaaaaaggagccctgcaaataaattttcttcataaaaaaagctgattagaaaaggccattttaggccaggcgcagtggctca

SEQ ID NO: 1885311 - DNA, 4001 bp, Homo sapiens
ctggtgctcatcatgctcccacaagcctcagatggcttttatttcacagcagacaacaaacccatctttctgtcaaaggccgtaggttgaggtccggaaatgaatttttaaactatgtcttcaggccactaaattccaaggccatttctctttctctctattcctaaggacccatcaccacagaccccaggtgttatttgtacaccaaacacagccgtgcaactaaagaaataaaaataaaaataaaggttaagcgctctttgcctcccacttctaaaagaaacttctgggcagtgtttctcagttatgaaatgtacgcttcccaggagcagtctccgcgttttccagcgccttccctgcctgcccggctccccggactctgctcctcccgctgcccaccgaagtggccctgcctcaagtgtcctccagctcacactgtgcttctcaagcagtggctccccaaagatgtccccaatgaggagggtgaacaaaaagcgcctttcacaggatctcccaggcactgccagagcgaggcaggctttgaggagcctgtcaaggagggcaaaggcctcgctttgaaaacgcttctccagtgtgctggctcgtgggacttggcaggcccagggaacggcgccgcggggaagaaagcccctggataggcctccctggcgggcaccccctgctcttttcattcggccccatgtgacgcccgtgagggagctggcaggccagggcctggtgaatgaatcctgtttgtcagggcccccgccttgactgcagcccatacgtcaggacacacgcttcccgactgctaaatgacggctgagaaaaggacagtggttttcggtgtttgtaggacaggcaggagtggccaggcaaggactgagatcagtcataggggagaaaatccaaaaagtaaaaactccaccgaccacaggagacttttcttctctgctctggtcagcaagaaggtcccatgattcagcacagaaaagcaccctctggcagcccggtcctgtttagttctgggttcggtgcaatttctttgttgaaactcagtttctccctctgtaaaataggtatagtgacacgagcccatgggagctgctcagtaaagctctattgtttaatcagctgacaaatggcaaagccaagtcctaaatgcttactcaactggccaccagtaatgggtgcataatgagagtgagaattcaagggcagccacctacctcgcccatctgtttatttttcctgccttggtctaaaatggttccaaggccccagactcacagcagtcatgcctcttccgtggcggccagaagtgcagaggacagtgttattcaaggtcatctgaagaaggcagggacccacctgccacaaagggtcgttgtgaaaatgcaaacgtccaggagcaaggattaaggggaagactcccacaccggagagcagccaagggcacccccttgccgagagcaaaaaaaacatgtggtcacttctagaaggcagagtgacaagtcaaagcctctctgtgagttagcagaaatcattccctccgggtggaggaattacacatgtctttctgggcaggcaagttaggaaaggggtgcccgtctgggcaatccagtcaggacgagtgcccctttctcccagactggggacgcagtctggagggcagcgcccactacccctccctctctgggcaccgtggcacaccctccggggccctgcctttaaccgctgtgtagcctgacagggaaacgtcaaggtcaaacaggaggcctctcacagctgcaggaaggaacaccaaagcatcttcttgagaaataaacaatgttgcctcttttagctctaattttttctgtatggctttgaagtggcagtgtctagggaaacccccaatacctttcaaggggggagatcaaggactcctgcgtgttgcagtgaagttaatgaagccattcatccattcggccaacagccatcatcggagctctacagcgtgtccccagtaagtctgctgtcaacacgcagacatggggggcgtcagcacagcccttgacctctgcgaggtcacaatccagggtggctgcaagaccaacagtagcaccccccacccccgaccaatgaagtccagaggagcagagaaagtgctggcagacacagaggatggagcaactcacttattttagaagaaccaaagaaggcttcacagaggtgacttctgggggtgttcttaagtgaggggtagaatttctatgaccagagcagccaggtggagggaaaagcagaagcatagctacggaatcagaagagtctgtgctgtggccaaagcatggggtgggaggtgcggaggcaggaagtccctgaacacaccaagagtcagaactcagggaggcagcggagagaggacccacaactccacctgggccttagggcagctctgacgatgctgtaaggccagactgtagagactaacaatataggcatcacctggaagacttgaatgacccagggaagatgcagaggcttgaggaccaagccagaggggacggaaacacagagactcgggtttccagaccggaccgggcgcatggtgagggcacaggcctgcaatagacagcacaggagtggagtgggtttggaaggccaatgttgaatgtggttgtggagaagccaagtcgaggctcctaacaatgcagtcctgtagaaatgcataacagttaactaaccagcgatgaatagctagttttaaaactaaaaggcaaagagattgcaagggaactagggccctgtacaaggacccctgccgtgctctggggctgtgggagtaattgggtcagggcaacagttctcagactttggggtgcatcagaatcacagggcggtgtgggaggccactgacaatccaggtacctcggcctcacccccactgattttgtgtcagcacctacagaagtaacaccgattccagctccccagttacaacatactacaaatcaaggagtcctttaaactttttaacttctttctcactaattaactagaaataccctcccctgtttaccttttagctgaataatctctttaactgattaactgaagttaattctcactggccagcaaaaagttcggtgaaattagcctcgggagaaactaagatggcaaaggctattttgtgggaggtaagagaagagggagaaacagagacaagagacagtaggggggaatggctaagaatggtccgtctgggcattgttggtgaaacggcttagtggttgtggagtcactagagccacacgttgtatgtgaagtcatcaaagcggacatcagggagccctggagttggtccctcatccccaggaaaggaggacaccggctttccaccagcctcagcaggtccaccctcagacaaggctccccataggctcctcctcaggctgtcctgctgtgaacattgaccccacaatctgcacaacctgtgtagaatcacttccaagttgaccaagacttgctaaattatctcatgaaggacaacaaaggcacaacttaaaaatggaagaaggtgaatataaagtaaacccaaaactcctacttttttgtcccttctcacactgctataaagaacaacctgagactgggtaatttagaaagaaaagaggtttaattggctcacaggtccacaggctgtacaggaggcgtggctggggaggccttaggaaacttacaatcctggtgacaggcaaaggagaagcaggcacgtcttcacatggcagcaggagggagcgagagaaggggggagtgctacatgcttttaaaataccagatctcatgagaactcactgtcacaagaacagcaagggggatatctcccaccatgatcctatcacctcccaccaggcccctcccccaacagtgggaattacaatttcacatgatttgggtggagacagagagccaaaccatgtcacctacctatcattaaaaagtaatgtcccaaccca

SEQ ID NO: 1885312 - DNA, 4001 bp, Homo sapiens
tctgtcgcccaggctggagtgggttgttgtgatctcgcctcattgcaacttccatctcctgggtttaagcgattctcctgcctcagcctcctgagtagctgagattacaggcacggaccaccttgcccggctaatttttgtactttagtagagagagggttttgcaatgttggccaggcttgtctggaactcctgacctcaagtaatcctcctgcctcagcctcctaaagtgctgggattacaggcgtgagccaccacacccggcccaagtcaacgtatttataatatgtgaattgtttgcacacctatttcaagcactggaaaagaaaaaaaagaaaagaaacaggtccatgaatgaggtaagcagagttggacccaaatacttcaatgccttctcaacaatttcttctaaatggcttcccgaaattagctctgcacgacctatctttcttggggggtggggaagcgattactttttaaaagccacattaaagtgtgtgttctatatcacgatggcagttaagggaggggaggcgtctacagctgacctggggaagttttaatcattgaactatgcacaagtggggccggggcgggaagcggcaggaaaatgaggcaccttctgcagaacctagccagcctgcaggcgttcctgatctgaggaaaacactttaattaatatgtaaaacagcagtggggagaaaagcaaggttaatttccaaaccacatcactaccagcggtatttgggttatgaaaccttgggaaacttctaggagatcctgtttgaaggcacagaggtgcttttgtgtgtgagtagcttctgagatgctcaaaagctcttttatctgccccctgcagtggtattgctctttctgtgtttaaaaacactgcctttgactggcaggcttttgtttttaatttgcagtgcatcctccatttttgtttggaacttgcctgaaagcagcgtttaggggagagagagctgtttgatttcctttgttgcggctttcttagctgctggctacctttggaatgtgtgacacaggcgtctctcctggttaggaaaatgttctgtacttgcctggggtgagactgtagctcatttcctgggttgagatctaaaatcctgagcagagttaagtgtatcaaatagtggctgtgccaaggatcagtgtctggtggagacagcggattttccaaggtcatggaagtgaagaaacagctgacaagtctttccctagcttgagcagaaacagctccattcagtgcgtgaacaattaactcaattagagaatgtgcagctttctaaagacgcgtccactgtgagtgcgtgtgcctgcgtttcctgcctccctctcctcacagacacctcaaaagcaacatatctgaaaagtcctcttagctaccctgtctaggagaagtcagaggcttgaggacgatactgtgttcctcccaccgcttggtatcccaccaacacccgctcctggccattagacactcaagcatctttcaagtagggagatgacttttttgggggtcatagactcctttgagaattaaagtttaccccaggaggaaaataatatctgcacataccaagatcagcacacactttcaggggttttcccatacctactttaagcccaattaggatttctgtactaaaatcaatccctctgtcccatttcctctgccacagccgtatgtgcagccccacgcgttacttacatctagcctggagggttaactttgacttcccagcttctggcacaatttccttctccatcgcaggccggagtggtctccacattccccaagggctcacccatgacctttagaagaaagtccaagcactagcttggcactcaaagtctaaggaattcttcatcccgtgctccaggcacatgaaatgcctgtgttttcgtgagcaaacgtttctcctgtggccttccagtttctcccagtacatcctgtggactatcgtggaggatttgcattgcagtgtgtgcctctcaggtccatgttggagtgccctgcgtccgcctccctctgcgcggtccactcagctgggtggcgtcactggtgactgggcttctgcctccttcctttcactgggagactcctcagtcagagtctgggtcttcatctctaaaccccccggggcagcagcagtccctgattttgacataggagattaggactgcagcttgtagggaggtggtgatccacggaggggcttcttctgaagctgacttttgtagcaagcacagtgttccaacttacattaaatacacgtggggtggcttgatatgacgatggagaagatcccacattgcacaaggtgggagctaaagccccagtcctcgccctgcagctgtagtacacagcttcacagttacgtgcactgccacatgtatgtaataatctggtatgtaacaggtgcttgttgaatatttgttggatgaatagatgagtgaccctagaaaaacacaatgcagacctatgggtagaagaagaaaagaacctggagtttcctggaagttaggggttccagcccacctctgtccacagccatgtgatctcacacacacacacacacacacacacacctacacctgcacccatgagcctccccactttgtcagggatcatgattcacaggttatgctgcatctcctaacttttccatttctttgcactcactttttcactccatttataggcacacagcaaccccgtctcctgcaatgacccctgctccaggcctcacataaaccacctgctatctgtactcggcagccctggtccgaaggcaaacacagtcctggttgccccacctgacgcaattgctcctagcatttcttattcactctccagctttcgcttggctctaccctctgctgaaacagctaaccctcttgcctggcagagtcaaggaaatttttgagtccagggccttcaaccttgtgtcttcaggagcctctgcaaagctgggtgccatgtaggtgggctctctccttccactccctgtcgtcttcattctctagccctccgtatcacccttctgggcaattctttctcagctcacttagcgaatgtaaggaagtgtttcattttcagtctttcaaatcttttttcaaatacttcgtattcaatcatttcctcttcttggatagagttttgtgttttaagtacagtgttatccaatggctagatccgcacctctagccagctcaccactctgtggcccagactctctttgccaactgtttaactctcgtgtataaatgacaggcagctgcatatgtccatatgtccagctgtctgttctgcagtgggtcacttatgggatcagattgtacatctgcctgtttcacttcaaattgcctcttctttgcaagcatccaggggtgtcttgcctcacatacaaacaaacacagaacaaaactaaaaacctcaaaggaatttctgtgttgaagaggttttaatggtaaaataattaagtttacttgcgattaaaaaataattgtaaatttttattaaaaaaccctcaaaactatcttgctgtatttttcttttattataatcaaagtttaggcaagaagaggggtatctattggctcatgaagtttaacagttccctggattgacctagaacagtgcttttcaaaataagcatcaggcccatctagagagcttggaaagagatctcactgagtcagctccatcttccagagtttgtaatgcagtgagtctgggagctgaggttgagaattcgcatttccagcaaggccatgaggctgctgctgctgctttgggggccccactttgagaactcatagcgtcaggcaccacaggacccagatggtcaatgatatccggagaatcaagtctcgctttccccagtgacacagaaagttcctggcactcccaggctaacatcctctctggagttggtaatttccaaaagagatctttccaacttccataaaaacttcaa

SEQ ID NO: 1885313 - DNA, 4001 bp, Homo sapiens
aaataaggaatacggggctcccagactgtagagaaaacatttcagttatggatctgcatcggtgcccatccattgagtgacaccttccagaactttgacactcgatgtgacccccactccacagactacctacctgcctgcctggccccctggactctatgtgtgggggctcttcaaatgctaaccttggagaaaaacactgaaaactctgggcattaaactgccaagggctacagtcaggtcttaattcctgacactgggttcaacgaagttccaaaactaaagtctcacaaaatcccactgacctgggattaaacccttaagtgggaacatttgaatattgtttttctcacagagaaaaattttagaagtacaacaggaaagaagatgaaaacatggatggccaaaaaaattgaagaagtgcctacaacgtctatgtacttcacatatttaatcttcatagaacactgaaggcaatattgctttctacattttacagacaagaaactgaggctcagtgattcaaagccagtcttcaaacccaggcccccaaagcctattctatccagtacttttcactacacccacttgcctctcgattatatttctgcaaactgggcattcttattgtttctagcatttttatgaccttgttcccacttataaaatagggagattagaataaatcacctcaaagtcacttctcagctctgtaatttattaaaagaaaggatcttcctacaaggcagaggcctgaggataacaggattcttttaaagtttggaaacaccctgtcccctcacttggggagggagacaaagcaggaatccatgggggagctggttgtgggctgagaaaccaggcaagtgtgaattctaatcctggtgctgacattgacttcctcttaatcctcagagtcactttgtttctgagtttccatctatgcaacaaggttaataggactcatcaatctcccaggagggtgttcacgtctgctcagcatttgtaaggagctaaagtctcacttctgagagcttgtggcagttttacatggggggtaccctaagaaacaaaaatcatgaatgctctaattcagattactgaaaactgcattaaaaaataatagtattatgtgtttccaaaaacctgctcaattatctcgaatataaattcattttgaaaatcaatagttcattacttgctcagatagtaagaggaaacaatatgttcctaaaatccaacctatcagaaggcacatagtaatagaggttctagaataaaatcagacattttggaattccacaagctcagcaatgcaacgtagtctctttttttgtttaaatgtaatctttaccaacagaatgatagattgaatttgaacacaggctattctcagtcaaatggtcagaagtttttaccctgataaatgatcagaattttttaccctgaagaaacattctggaatagaatcatccagaacttgcaaatttgctcaaattttgaacggatggtaatagccaaacacaccatgagatctccagttcttacactttgtgaggttatgcaatctgctgggtaagcttcatatttacatgcctttttgtacatgatttgtatatatgtatttggaaatacacacacataccacatacatacatatttgaacacacacacttttttttgtgtgtgtacaagtgtatatataaatatatataaatatatatataatgtgctcccagatcatacagctttaagcataagattttttttcctggcctactgtgatgagggtgccttggagaggcagggaggggagtgtgtcagcaagctgtgtctctgcatctgtatttcctccatcctctgcataatgggaagagaaattttctgacattgctctcataccttattatcatcagagactaatcgcttctacactccccttgaaaagtaatgagacttgcttttattttgtgtaggtcttccatacgactttttctttcatgcctaacaatttccgactgcctttctcagacagcgatatagcagggacttctttttcccactctggactccattatgacatcacagtagctatacaaaccacaaagtgaagcaaacaaaagaatttttcattttctctttcattcaataaggctgcattttctgtcacactacaaccttttgacccgcgtcctaatggtgttggtcacccaagggcagaagttcagccataggtgaagtctgtgtgtgtttatgttgaggagaatgtgtttgcattcacttcctgttggctgtgcttgcacagtgcagttgctctcccatagccctgaggtcctgcctgctgagtgagctccatctcctgaaaggttaaagacaggttatttaccccttctccttccccccagtcaccaaacccttttgtcactgctgcagctgagctgacattagttcagttttacctggagaaggttgagggagtatgtgctgtaataccgtctatcccatttgattgcaatcatttcccagtctgcatttcctaacacctgttagtctatgaatcctacatgttgcattaaaaatgtacctttgattgctgttttaaaatgttgcaagctaatggaaaaccatgtattaaataattgaagcaccatggaaaagtagattatatggggaaagttctgatttaaataagaaaatcacacaatttcccccaaaatatcattttttttctctttactatgtctactaccccacctcacctgctactgccctgctttagcatcctgcctactctgtttccaggagatgaacgctctaactgccaccatttgtgctaagtagctgacttgttatgggaagtgttgctgcatgcaagcatttattcattcatgcatgcatgcattcgtctgacccactcaactacccatctaactattcatttcttcctcttccagacaggcctgagctctaacaagtagacaaatgtgaattactgtaagtagtttggtgtggctgcagcatagggtgggacaagggataggtaaaaactgaactgtaaaagggcatagagttcatcaactaccataataaagaacggttagacacactcatggctttatatcctatccctatagcccttgtctgtaatccccctgctacatgagcaggcactgtatacatagcatagcagtggcttccaggagcttcattctctcccattcaactggtccctaatatttaatttggtacctctccagaaacactgatttactctccctgctggttctctttcccctctatgtctgtatgatactctgagacctagcaatgggcatgtaattaactacttgacctctactcagctaggtggacagatgatacgcaatgcttccttccttcttttccatttttgccaggattccaagttatgttgtgtgtccctctgctgctcagtgtcttgtttcatctttccccatatggtgtgacagatcactacaacagaccattatggatgggcccccatgtgggaagatgccctactgaggcagattaatgattatcctggagtagtgccacattctgtttttcaggggccaaatccggatgctactgaggaagtttttttttttaaacccataggcacttaattgtgcaatgttatacttcccaatgccagctggtcatcaaattataagatgaaacaagaatatttataatccttgaaatttcagctgagcctatgttgtcacagaggcactccttaccatatggcccttccttttgcaaggttccaggaaacccaccagggcattgagtcccaagtgttaatttcattttgtctatttacttcctgttatagcaagagataaaatacaatgaaatacttccattccattcattattttttctttgaatctatgtcctcttcaaatataagtgcttctccccataaaatatgtgattcttcttcccaaaatgtttcagcatttcttactgtaaat

SEQ ID NO: 1885314 - DNA, 4001 bp, Homo sapiens
agctcttgtcacactgtccccagaacctggccccgactaggagaacggcctgccttggttaaggggtcattcagcattcagtgttgtctcactcagaatcctgcacttccagctaaaatccagctcaggtcaaaggcactcagtgcagtaaaggcatctgtgctcagaatccaaatatcaatagaacagaaactaaaaataatcaaaaccactgaaaggaggttaagagtcctgtcctgaaaacagctattatttgcccatcctctaggttacggtcaaattaggactcaggaagcgaaggctctagagctccctcagatggttatttttatttcaattccatccccatgtcagagtgtatttcattacttactagacttgggacattattggttgcctgctgtatgagtttccgagggctgctgtacaaaatactggcaccgtatggcttaacaacagattgattcactcacagttctggggtcaaggtcctgagatcaagggccatgctccctgtgaaatcagcagggaaagatccttctctcttcttccagcctctcttggtttgctggcaatccttggcctgcttcggcttgcagctgcatggctctgatctctgtcttagctgttatatggcattctcctatttttatagggacaccagtcatcttgaattaggaatctgttccactccagtatgacctcatcttagctaattacagctacaaagaccctatttccaaatgatgtcatgttcagaggtactgggaggttaggacttcaacatatctttttttggaggggacacaattaacatcgaccctagacctttacctttttctctagtaaatcccagatttttccaaaagcatactaactgataggcctacagataaaaatacccaagcagagaccgggacgaccctgccaatgtggtaatggctcgtcccaacaagttattccttgtgcataatagttcttgggctcagccacagaatgtgctctttctatgtatttacaagattacaagatcttgctctgtcacccaggctggagtgcagtgatgcaatcatagctcactgcagcctctaactcctgggctcaagcaatcttcttaccccaggtttcagagcagctgggactacaggtgcgcaccaccatgtccagctaattattttattttttgtagagacagggtcttgctatattgcccagactggtctcaaactctcagcctcaagtgatcctcccaccttagcctctcaaagtgctgggattacaggcatgagtgactgtgcccagcctctattatttcttataactgcatataaacctaaaattgtctgttaaaaaaagaaaaaagaaaaaaagaaaaagaaatgacttgctggggttgggttggtagggaggagagctgggtcctggtctcctttagagtaatgtgctttgattatgtaacaattgtggagttctgggtccttctgcacctggatctttctctggggaatgggaaggcgagaaagataaggcagggagaaagtggggatgttgcatttactccccagaccaccctatgtttctatgtgtacaggacaacgagctgggccatccttccctaggagaataactggtcacctgagcccagcagcaacacctcagaaccttccagaaagcccaagaaattacaaagtcatgctgccagtgggcccacaggtcagcaccgtgttgccagcaggatgtcctctcctcagccacacagagacttggatctgctgcttctgaacacaggctcccacccaggggagatgtctgtaggtcttccttcagccatgttcccccagggaggcttggcctggctcagactctccttgcgctccagcccccgaggagtttctaaaacctgcctttgccaaggggcccatcaaattctgtttagaggcaggagggtttgtgtgccagcaggacggttgctatattgcccaggctggtctcaaaccgcccacagagagttctggaatgtcccccatggcatcccatccactgggaacctttgcccttaggggcttctggggcattcacagacaatagtactgttggcttcctgttccacccagtgcagaccagaaaacaagtcataggaactgagggccttgccttgagctctgcccgcttcaatcaagaggccacttggctttttcagctgggcgcggtggctcacgcctgtaattttagcactttgggaggccgaggcaggcggatcacctgaggtcaggagatcaagaccagcctggccaagatgatgaaaccccgtctctactaaaaatacaaaaaaaattagccgggtgtggtgatgggtgcctgtaatcccagctaactcaggcagctgaggcaggagaatcgcttgaacccgggaggcagaggttgcagtgagcggagatcaggccactccactccagcctgggcaacagagcgagagtccgaagaaaaaaaaagaggccacttggctttttcagagagcaagaggcacgatggcagggagtcaggcagatgacttcataaaggagaccagttcactgccctccgttggcctccccacactttgtcttaggtcacccttcaactgctgcgtcctctcctgtgtttgattggtgttttcaaacgctcagcagcaaaccagtggaggtgggcttctcaaccagcagctcccagtctatgaggtcaacctccaaactgatttccacagtaaaaccatcctttcctctgattggaagggatttaggctccccctcccccaatcagcaacttgcaccctcaaaatgaactactcctgctgagctgcctgggagcaagattagggggagacactctcctctctgccagtgagtcacgccctctaacaatttctgtcctgcccatatggtcccattatgattggggaaaataaagaaaaatatgttactctttataatgtatagaaaatctaaatattatagcaaatctggtaaaatcaacataaatattgccaatgccaaaccactgtgtctgtgtgactagaaaatgatgaaggtcacaggtagtccaggcttattgtaagtggcatctctacccaattccctttccaccgcttgttccttgcccacagaacttcacatatatttattcacatgtcactatagcaacctaaagatgaaatatctgaatgtaaatgtaagaagggataaaagcagatttcacagattcttcagcgctttgaaaataggctgcatctccttccgtttctatgtgaccgtaataacctggaccaggattgcccaggaaaacagggcgaggcaacccctgggcgctggggtgccaggttgggcccctccccagagcagcctccaccaatgccgcccttgagccagcatgaggaggcgcctttgcctcccggggccatcctggggacacaggaggatgttgtaggggcattgctggaacctggagcctgcatgggatgcacctgaggcgcggatgcgctcggccccgccctacctgagcacaggttggggagattcctaaccctatccctaaccccaacccaacaaaagggcgttgacttcaaaccagcccaggctggctgcgccagagccagccaatgagacatcgccctgcttcccggtgagtggaggacacagccccctccagggagctacattgagtgtgctgagaaggacctgtcctccccacctgtccacactcattttctgattttttgtttttaatataaaaagaagcttctcgttccactgttactcacatggtttaaaaaactgccctgattgatagagtttgaaaagaaaaaaaaaattcacactggggtggaaataaaccacagggtgactgacttctcccgaaacgatgtttttcagatgagactgggggctgggggaggaagctccaggacagcgtccctctcgggagcagaaccggaaggcccgcgtgcatacagacgggcacctgta

SEQ ID NO: 1885315 - DNA, 4001 bp, Homo sapiens
tggaaaactatgatagtgaccaccctgcacatctgatttgcctgcctcctccaagtggatcccatcctctgcctgcagcctccaccaaaaagcctggcaggagttcccgagtcctgagttctgagccaggtgttttgatgtttttgcagactggttttaaagattatggggtgaaagcaaaacaagaaggaaggaatgttctctatggacttgcctgtagtcactcaacaaagctgatgaaccccaggagctgccctcagctgccctgggtgcagagggtcctgctcccactctcaggcacagagtctcaggccaaagggctgaaggcagagctcgctttgttctgccggggctcagagtctcctgggcacactcccccagctccatgctcccactcaggagaccatcaggggatgacgggccaggggcagggcacgtacactgccacctggggcatggtggccggtgctccccagaggtatgaggggcaccagaaaacgactacaggtgaatcaggtgtggggagaaggtattattgtaaacatgtatacaataatttttttagttttgttgttgttgtttggagatggagtctcactgtgttgcccaggctggagtgcagtggcacaatctcagctcactgcagcctctgcctcctgggttcaagtgattctcctgcctcagcctcccatgtagctgggattataggcgcgcaccaccacgcccggctaatttttgtatgtttagtagagatggggttttgccatgttggccaggctggtctcgaactcctggccacaggtgatccgcccacctcagcctcccaaagtgctgagattatagacatgagccactgcaccgggccaaaacatgctttttaaatcacaaaggaaagccgtcagggatgcatgttacatgccccatgtttgcatacttaccggagcagcccctgacagcgcatcctgcggccctcttcagtctcacccatggccgaggacctcaccctctgcctgccgcccccgggacgtagcctcccaccacccgctcaccctcagtcacactcggctccatgtgagtgacgcctcttggctggaagcttcctggggtcactgtccacatgccacgaggccccatccccccaccccaccctccacatgccacgaggccccatccccccaccccaccccacggggccaccctcttcgaagctccttcaaacacacgcccgcgcccccatctgctctttctggaaacgcacagaaccctctgcgggaactcagaatggagcactcggttctcccgtcatgaacgaattgttcctattggcgctcagagcgagtgtctgtgttgtgggcaaagagcattagaaatgtgtcatggaaagaagagacttctaattaaagcctctaacaacagggccaagaaaccgaaggtcacgggcgaggcgctcacagccccgccttctgcatctctagacggagtctgccgagccaggcgcagccctgggacctcagggaccgaggtcgaggctccgtcgcggcctctgctcccactctgaactcgccgcctgtgggtgcctcctcttctccccatgcccctcctccgaccccgggcccgtgttcctggcggcttgcgccccacctgccgcgtgtgtgagctcgtccctgtcgccacgctcgaggtggcggtgtggctgcgtcggttctcgccgcctttgagccggcccgggctgcgcgcagcctcccgcgtgcctggagaggcgagtgctgcgggcaccacccctgcgccccgagaccccgggaaactcctgccgcgccctcttcttgcacttactcggagcctgtgaggtgtgttcgcgggctttctggtgtctgtgaaaggaaccggggggacatcgatccgtttcaaacacacgcctgtgtccgtgaggagtccgagaggcagagctggagcgtcgcccggaagctgccctctgtggccatgagcgggtgtccagccccttccaaggctgcaccggggagacgctggttttctgctcgctgtgaccgaacaaagcccctaagagtcagtgcgcggaacagaagagccggaccccgacgggccgagtcccaacgtgaggcacccggcagagaaaacacgttcacggccccagccttccgcagccacagaagaacacgcacggggccacgcggcgttcacaagggattcatggctgtgtttgaagttttttttttttttttctttttttttccagtgagacaagttttactgaaaacttttcctatctggctcatcagatctcaggccgtctctggtggttttagctcctttaatttaattaactttaaaagagctggagagtattagtaaaatatactccctggtcacaactccacgaatgttaacaacctgtccaattacagggaagggggtcccgacccctcgcacctgctaattaaaattgctaatcaccagcaattatctggccgagctttagaaaccatttgacccttcgcccaccaagggagcgatgtttgcggcccctccccggagccgagccaagctgtccccagcgcctgcctattaagtgccactaataggaaatcaacaaaagcgccgtgacatctgtgtagacgtcccaggccccaggtctgagtgcacaggtgctggccatgaggctgccaaagaaagtgccaagagcaggaaattcaccaacaatgaggcggactgtgctcgcggcggaatcggcagccccatcacccgcagccgcgccttggcctccggataattaggtccccaaaccaggcagccctttgtcctgagcggctggctggccaaaagcattggacagggattttaaaaatctcttctttttaatgactcttctccctgctcaagcataaatgaaagatgttatttttttaaaaagtcctctgagaggatctcaaatgtgtagcccttatgttgtagggagagtggggtttcctactcttactgctggcgtgcagaagtgtcctttcattgctggcttgaagcgggctcacagaagagacggtgattgtgatctgctactaggaaaaagttctgggatagttcgggctcccaaaaggcagcttcctgggaagctcgtaggttttagcaccccaatccataggtttctgcagtgcctgcttcttccccgcaatatgatcttttaaaaacacccctcggcccattcagcagattcacagacacatcacactttctttcttgccgtttgaggatgagatggtctaagtttagaaattcatcctaggagtggtttcaacagctctggatataaaaacagcgcaagaaggaaatgtaaatgtagctgagtgggacgcgtgtgatttcagacccaattaccggcagactgcaaaggagacagatgcagatggctccagatgcggggaagtgcgctccggtcgagggccgtgattggggatgatcatcgcctacagcggcctttggtcctttatgaaaaaataaagtgaataaaatagttttaccccatgggtttcaattccctgctcaccctctcttggcctccccctccatctccctgcagcctgggtgagaccttcagtccgcaggcgggcattgaggcctcggcacagtctggccttatttctacaaggggagaaggagcctgacacggtcagagttttgccaaagccacggccattgccaaagtccactctccacgtgtgtcttggctggagtggctggtttctggaattcaacatgtaaaggcaccaatgatccctctggaaacccagaaaaaggcaagttggaggctactgccgcgttccacctggcgtctgtccccacgccacagctgggcacctccaccctccccccacacagagaggggactgccggacacaggctccagagaacagggctgccaagacctacggaggcctccccatccctgtactggggaactgagatgaaagccacccccgcatttgtccaga

SEQ ID NO: 1885316 - DNA, 4001 bp, Homo sapiens
cccggctaattttttgtatttttaatagagacaaggtttcacgtgctggccaggctggtcaagatttcaaatattaaagtttgaaaagcatgtatgcctagtattgggtctcaaatttggcagcacagttgaattatctggaaagctttaaaaactgctaattcccactttccaggtctggaacgggaccttgcaccgagatcttttaaagctctcaggtgactgtcgtgggtgagaatttgagaactctggagttagggaactcaggtgacactcccaaccacccatattgtggctcccaaaccttccctgtgccatctttcactctaactatatcaggctgacctccagtttccgaacaccctatgcttttatataatgtgttttagcctattaccagaagtcaccagacattgtacatgccttcttctcatgactggagagggtctaggatgactgcatataaatttatcattgaaaatgccatggctacaaggcacagagacataaatacatgaatttactcaattgtacatttagttttcctgattaataaaatgtaagacctgattcctccagatgacagcttactatggtactacatatctttttttgttttagtcttattgaacatcaaaaatatgagggtaattggaagaatatgcttgtttcattgatttaacattgggggttataaactgaggagcttttaaaaacatacacagtgcagtagcagtagcaactgcttttcctttttttgttttttttttcattttgttttgttttgtttttgttttttgagatgaagtcttgctctgttgcccaggctggagtgcaatggcgcaatctcagctcactgcaacctccacctcccgggttctcctgcctcagcctctcgagtagctggaattacaggcacgcgccaccatgcccagctaatttttgtatttttagtagagacggtgtttcaccatgttggccagactgatcttgaactcctgacctcgtgatccacccccctctgcctcccaaagtgctgggattataggcgtgagccaccgtgcctggctgcaactacttttcattactctcactgcttcacctccacttgtgatcagtgacgcatgtttgagagacacctggctttggagacagaaatcaggatccttgacctctttattacctttcctaatggaatgaggttgcacacatgggccgcgctctgctgcacacatgggccgcgctttgctgcgcaccggcagttcacagagccccgtagttttggggagcactcctctgtcactacagtgcctattgtaaaaccttaaccacgggattattttttccaaaagacctcagataaatacttacttgatgtttttattcacacaaggtgttaatttctaacaagacttttatgagcacagcaaacagcagttgctttttcatgtgaacattaagtaagactcaaggtatgaaaagcctgctgcaaaggatccaaaaggatctgtgggatttggtgggctgcagcagacaaatggcctgccagtctgtgacaagtgtgcagtcaccgtgggcgccacccttgggaggcacaggatccactaagtcgtcgggattaccgggctctgtccgtagcagctcctggacagttagggccctgtatgcacatctctgcaaaggctgttggtcaaacacatgaaaagccggtattagtggtgtctgcctgagccaccgtaaatcacctctccctctgggctgccactgcattgcctgtgcacagcctggaggcatggggcgtgtgtcactgggggaagcatgcagttcaggagtcctgttatgtccacatgaatgtgaatatgaaagcatgccctggcgcctctgtgctgggctattattgggaccaaggactcacacacaacagtgatgtcatccagatgcacaatagaagattgtactgaaacgtcagaagccagataccaggttttctctcacaaacggttgttttaagtgccgatatcacggcttgacaatgttagtgctggcaggacttttgtttttcattatccccatcttcatccttaaacgaactgtagagatgcagagaaatagtcattagaatgaactaaattaaaagcaggaagcggttaactttatgtcgactctaagataatgttagtaaataaaaaggctaattggaattctctgtattctgataagaactttttattagtaagttatttgtgctttaatgggctgcttgtggcatgtggttgagttgtgatgctttccattactcatttttattaacacatacagtaaatattaaaatagatcttgggagtgataacataggtagaaaatgatgggtggcttgtcagatacaaaatacagcagcatacttacagatgtgttctcatgccattttcaaatttatattggctatttttaaactatgtcaagcctttctctgacttctgttttactgtactgctgttcttgacattcccatcccgcagcccaccagattgaaattttggtgcagcttataaaaggtatccccaaagctaggactttgacagccagtgatatgtatcttttttaaatgtttcattcagggtaagcaaatgagcaacagcaagggaaaatcacattttagtatttttctccctgttaaagatcgttttgtgctttttaactaggataccagaaagcaaagtatttcagtattccttttagcaaactacatatactcaaccagatttctagtagcatttttcttcaatgtttaaaaaagtgaactttttaaacttttactttctattcttcttatccttctgtgatatgtgtactttttgccctgtttagaatagataaaatatagctttaatttttctaaaaacattaaaatgtttttctaatggtctgtaatctgtaatgtttctagaatttggtagaaagtcaattcactaatttaatggattagtgtaggtcagttcttactgtaaactttaaaaggtataagagctccaggctaggttggaacttgtccctaagtcatatttagggagtttctgttttattttgtaaaaacattcatctcacatttcctaaaaatgaaataaggcagcaaaataaaactcatccaaggactctggttacttgggttttatagctaactaagactttattttggctttcctttccctttcatgttctgacatgtccccaaacgtttaggactaagagaatgagaggggaggcccaggctggagagctcctggacagggtcttgggggggacttgtctttcctgtaccccctgggatgtcactgtgttcccccttagggacaccaggaaatttcatatgaagggactttggtgcacctcccacaggcactgctttggttttatgaatatcggcttttcggtgttatgggatccttctgcttcaaagtgaaactagttctgaaattttcaagttcaaaaacttccataggcaaaacttttcatggaaataaaatatttttttatcctcattaagtaaaattcagacatttgtcaaaagcaaatatagctctcaagccttgtggattatacatttttggttccaaagaatgaggaacctctggtagccccaggaatgggagattttcacactgttgtgattctgaagtcaccaacttaacaactagaaccaaacaaaatcagtgctgttcagtgccttctgactgtctgcttactctccgctgagtgctgaaaagccccagccgtgtgttgcttaaggtccagtacattactgtagaaaataaggtttgtgggttcctagtggtctctgtggactaactagtggatctgctggcagcttggtaattttagaggaaatatgaagtataagatcaattggaggctcaccgagcctggctggcaggtgctacttaccctgcctgggagtcctgacagtagcccaggaaggttcttttaaactcgtgactgtatcg

SEQ ID NO: 1885317 - DNA, 4001 bp, Homo sapiens
agcacctgagaaaataaggccctttgatttttttatatgggcctttccaaatattctactgcacatgacattttattaaatctgggttctctaaaaaggaactttataaatattcacacaaagatacctttcattccttgtacaaccatgtgtacattgtatacctatgtgtttgtccatgtgtgcggatgccatgcaagagagaaacttaactaattgtttaatgattgttccacacaaactttgctgaaagtacatataagtgctggtttcacagattgtctaatgagttggtttttgtttaattatagaaagcaattaagtctgctgtgacatttgaagaaagccagcagggttttcttctcagatgttttcagttttaaagtccaaagaactagaatgagagttgtgtttgtctccagctatgagtatttcaaatgagctgtaagtaaataatattttgtgatgagattttctaataagcagtaattaagattttcttacttatttcttaaatgatgacagacacagctcactccaattctagtttggtttaactctgtgtgtgtgaaatacatttttatttttcatatttttaaggcacaactatttactatcagcattttgttatttatacatctttttagtcaaaattttataacagtggccacataattttttggaataaagtcgtagtcaatttttttaaagaggcatttaagggttcactgtggattataatctatttctggaagcactcagctggaaaaaaagaagtgaaagcaatttcaagttttgaccagcatctttaaaatataagaacatcatttcccagggaaacaatgaaagcaacaaatggtaatgtcatttaaaaaaaaattcaggtcaggcggtggctcacgcctgtaatcccaacactttgggaggctgaggcgggtggatcatgaggtcagaacctcgaggccatcctggccaacatggtgaaatctcgtctctactaaaaatacaaaaattagccaggcttgatgggaggtgcctgtaatcccagctacttgggaggctgaggcaggagaattgcttgaacctgggagatggaggttacagtgagccgagatcatgccactgcactccagcctgggtgacagagcaagactctataaaaaaaaataaataaataattggaggacttccacaaacatttaaatgatcagaatcaactttgaaatatgttatttaactaagtctgttttaccttcaaaatgaaccaagttagtatgatataatttatgagtaaaatctgttgaaatcttgagctttatgtaataagagtttgagaaagcacaagaatgaggcagcaagaatgaacaagccatgaaaaagcacagcctcagttttgtaggttgatttgcttcatgggccaaaactgctttcagaaaatattctgacattagcaagaatgctttaagaacagagatttttgtctactgcattcatacttaccaaatcagccacttgcaatgctgtgttgagaagcagtaaaaataagccgggattaggagtcttaacgactgtctcactcccttttcttctttttggccctctgaagtcactagtgtatacaaacaaaaacttagaaagaaaaaaatctcaaatacagtgttgcccaacaaatgcagtgtcctcacctcctcactcttcagaaagccctctgatcacctctgctcacaagtgctactttgggaagggtggctctcatgacacctaggcaggggacaggccatgtttagcaaacactagttctttcctgttacaaatcctaaaaccacaatacccatctgtatgagtccgttttcacactgctgataaagacatacctgagactcgataatttataaggaaaaagaggtttcatgaactcacaattctatgtggctggggaggcctcacaatcatgatggaaggtgaaagccatgtctcacatggtgacagacaagagaaaagagcttgtgcagggaaactcccctttataaaaaccatcagatctcatgagacttattcactattatgagaacagcacaggaaagacccaccctcatgattccattacctcccaccgggtccctcccaccacatgtgggaattcaaaatgagatttgggtggggacacagccaaaccatatcaccatccctatatgtatttgtcattgaattgctgattctttggtcaaaattacctaatattaccttttttcctgatacttgattttgaaataagtcctatgaatctgtaaggcatcagttctttacttgagagccacctgcttgtttcctgattgcagaataatgcagcaaaattatacaggatggaatcccctcaaagacaatgcctctggagagagatccagcaacttacaggaatgggtccacctagttcagggcagcctatatttgtggaaaaccatacagcctatatttgtggtaaaccataaagaacttcactccaaacatatggataattaatgtgtttgaaatgagaaagaggatgcaagtctgtaaggtgatcatattagcaacatggttttcagagaaagaatgtgcaccctagctcctttggaaggagttgcttgacatttcccagtatctgaaatcaaagtgcggatgccctgcccaatccccctcagaggagcacctttgcagctgatcactgccagccaggagcagccttgtgtgttctgtgtgtgcaaggtcaggaaaaagtttgaaaacatagctatgaagtaatagaatatctctgtcaaaaaagaagtagggtcacttatgattggaaatgtttgagctgtagaaactgttgaaaaactaaaggatactgcttttgtttttgagttatcactcttttcttgtcctcaaaacagaatggaatatagacacctatgtgggtgcacacacacactctcacacgcacgcatgtacacacacatctttcctctctcaccagaaaaaaatgttgtgttggagaataatgcaaacaggcaaggaacaagcagactttagacaagacattcatttattgttacaaagtgatttgtggctactcattgccaaatgactggagcatgcagtaatggaaacctgggaattaaaaaaaaacaaaacctcaaaacaccaaaacttactgccaactccactggtcaacaatacacttaatatctcaatcccctactccctatcaaataaacaacctttgactcagaagcctcctttatatctttgaacatggaaaaacaatgggctttgctgttttattggtgtttaattcccaagcacttgtccttacttagggatggggttgctcatgcaatttaaatgtcctcacataagtagatttttggcgattgctcctgcacttttcatttcagtcagctgagcagggtttctacatcctatttgcctccctcggagaagaggaaatttctgcaaattattttctgtttattcttgtggtaaggtaattcacttcctctaaggctcgaccttcggatttgaaaacgaagtgaaagtgagtgtgaatactgatatgacatcaatgttttggagattgagggaaatttccctttggccagtggctgatttaaagatgtaaagagtcctatgtggggcatactgagtcctgccaaaccgaccttcccgttcagatggtttggaaactaggctgtgccacatgctatctaatttagaggtttctcttaatcctgctatttcctatcatacatcaggggctttcacaacatagcacatgtgtctgggaaaaactgtaagtgaaacaaccagggcaaatctaaagacctaagagaatggtgagcaactttttattttttcatcctgcccaatatcttaagtgcctctccaccaagaaaaccccccaaaaaccaaaaaaaaaaaacaataaaaaagattagctgtccactttgaccactttttttcactcaaaatgaatcatggaa

SEQ ID NO: 1885318 - DNA, 4001 bp, Homo sapiens
tatttacaatccctgagctagacataaaggttctccacgtctccaccagactcaggagcccagctggcttcacccagtcgataccccactggggctgcaggtggagctgcctgccagtcccgcgccatgcgcctgcactcctcagccgtcgatgggactgggcgccgtggagcagggggtggtgctcgtcggggaggctccggctgcacagaagcccatggagggtgtgggaggctcaggcatggcgggctgcaggtcccaagccctgccccgcgggagggcagctaaggcccggtgagaaaaccagtgcagcgccggcggactggcactgctgggggacccagtacaccctccgcagccgctggcccgggtgctaagcccctcatttcccggggccgcccatgcctacccggaactccagctggcccgcaagcgccacgtgcagccccggttcccgctggcgcctctccctccacacctccctgcaagctgagggagccggctctggccttggccagcacagaaaggggctcccacagtgcagcggtgggctgaagggctcctcaagtgccgccaaagtgggagcccaggcagaggaggcgccgagagcgagggagggctgtgaggactgcctgcacgctgtcacctctcagttttacttgtgatcccacagagcttcttatgaaatacttatacaaagatagatgtttcaggataaataaaacctttatctcttctacataactaacattctattaaaaaaatcctttatcacttcaacgattgcaaaaactaacaaagtcattgttacattttgaagagtggccatgcattataattcagtattgtttcttagtttaacatcaataaaataatttaaaatgaaaatttagaagatgaacacagttcggcagtctgtgttctatcaaactatcaaaaagtagatcttagtagtgatggcagaaagatagccaaacaggaaatctcaggctctacttggcccacagaaagtttaactggcaaatatccacaaactggaacatcctttgaaaacccctacacctggaaaccagcctgagataccagcaagggatgtagaattgaatgaaatctgaatcagaagggtaagaagaatggtctcactccacctgggcttcccccttccccttccccaagttggcacagcagatggagatggtttccctgcactcacagtttctaccaggaaaaaagagaataagaggtagtcattcagtttccctaacgttctaagatgctactcaggaagtcaactctggtttcacctcatggggaatactaggagaaatggcatggcttgactgccctagggtcaggcagaaacaaagaaaattactgatgcacagatcttggtggtacctctgttttcctgacagctgtgctgctcgatcagggatatcagcaaacctcatagcacaaccacaaagttaataagctggttcccttcagaagcacagtgggaagtacaatttaacttgagcccctagactactagtctctgggctcagccttagaacccacatcaacaaccctgcctagtcagggaaacacagcttcacctatttgtgagaagagaagaggtagattgggcctgaccagggaaaacaagtagcagctccacacagccaaaaagcccacacaatgactccaaccaggaaggaatatttccacctttctatattttggagaaacacagcaagggctagtcttactttatccggaaagtcaataagacactaaactcagttagaagcccacttcatggctctacccagatagggagaaaaatcttcagctttatgtaagtagtgtatttcagcctcaggtcttacctgtccagggtggtgaccctgcctaacttcagagtctaacatgcagtcttgtctaactgtagattccaaatagcagaattttccagccaggaatacatcttatgactgaattgaccagaagccattgtattatctagccagtagtttcatctgacagaaaatcccagacagtggtctcgttggtcagtaaaaccaatcaatagcccattctgacatcagagcaaaggcagtggatcagccaactagagaactcacagcaatttctacctgcctggggttttcactatctagcccttccagaatcacaggctagactaaatatgtgaagctctggactgggtgtggtggatcatgcctataatccttgcccttttggaggcagaggtgggagaattgcttgaagccaggagtttaagacaagcctgggcaataagataagactctgtctctacaaaaaagaaaaataaaaaaaattagccagacacggtgatgtgcacttgtagtcccacctattcaggaggcttaggagagtagattgcttgagtcccagaagtttgaggctgcaatgagatatggttgacagtgtacttcagcctgaatgtcatagcaagactctgtctcaaaaatgaaaataacaaaatagtgatgctttgttcctgccaaagaactcctgtaaaggccaaaaaacaaagctatctcctaaaatgtgcagacaacaacataaaaacacaaggattacaaagaatcagggaatcatgacacttcaataaaaaataaatagactccaatcatgaaccccaaagaaatgaagatttgtgaaataactgaaaagaatcagaataatactcataacgtagttcagtgaatgacaagaatatgcagatataaaatttaataaaatttggcaaacaataaaataaaagatagaaaaccaacaaaaaatagaaacaataaaaagagcaaagtaggaattctagagacaaaaaacaatgactgaactaaaaatttcaacagaaaacttcaagagaagactgggttgatcagtcagaagaaacagtgagctggacagaacatccagtcactggagaaaaaagacaaaataaagaaaaagaatgaagacagcctatgggaattatgggacacaatcaagagactaaacttttgcataatagaatttgtagaatgagaacaaagaggaaaagggccagaaagcacatgtgaaggaataatggccaaatacttctttaatctgtgagtaggtgccaacattaagttataggaagcacagtgatctccaataaaatccacccaaaagagaagtacaccaagacataataatcaaactattaaaaatctaggacaaatgaaaaattctgaatgcagcaagagataagaaacatatcatatacaagaaggtcccaacatgagtatcagcagaattctcagcagaaatcctataggctaggagagagtgggatgatatattcaaaatgctgaaggaaacctctgaactaagaatactttatccaacaatttttttttttagaaataaagcaaaggtaaagatttttatagaaaaacaaaatctaacagagtttagtttatcatcattagacctgtgttacaagaaatgatgaagatagttcttcaagctgaaataaaagaattctattgattttaaaaaattaaaatgtataaaatgtaacagtaagtactcagtcagattcagaataatactgtaacaattatgtgttaattatgtatatctttagccattttggaaaacagtagggaggcacctcaaaaaactaaaaatagaattaccatatgttccagcaatgtcactattgggtatatattcaaaggagttaaaatcaatatggccaagagatgtctgtgctttcatcttccttgcagcattattcacaattgctgatatatggaaataatctaagtgtctatccatggatgaatatattttttaaatgtatatagacacaataaaatattatatagtcttacaaaaacaggaaattctgtcatttgtgacaacaacaataaacctggaggacattgtgttaaatgaaacaaactaggcacagaaagacaaatactgtatgatctcactta

SEQ ID NO: 1885319 - DNA, 4001 bp, Homo sapiens
agaaaaattggcataaagtagaacccggaatcttctgttcacttatttttctggctattacatcatccctgaaaataaacaaataaataaagcaggggtcagagaaggtatagtactttttggatgctgactatggataaggctttttgcttgtttccacagcacttcctatccctgctttctgtatccttggaaagaaatgtggaataatgaaaatagcaaaaggcttggcagccaggcaggcccaggtgtgatctcagtcccaccattcattctctgggtggccttgggcaggtcactctaactctgtgagccaaagggtcactaaagcacccttcctggaattcctttgaggagtcagtgagggagcacacagtgagtggggcttcccttcatatcccctgctctgggccagggaccaggacctggtgtcagggtctttacccagcactgtaccaacacttgctctccaaaatgggactagggtgaaatttcttcacagtatgaaaataatggcccagggaacgaagcaaatgccaagagctgagccttagggaatgactagtaggcccagattcttggggtgacttccttcgaagacttcatttgttaacaccttccttcccttcttgttagtttcagtgggaagtaggattggggtgatttggagaagcagtggggaatttagttaggggagactcctgggtacctgtggggacataaaaagggattggtgtgggatggcaggtagaggccacaagaggagggcgtgaatgctacatgaaggagtttgttgttgtttggtggaagaggaggaggtatgcatgtgaggaggggtggccatgagcctggagctgtcctgcagggcagcttctttcactctgctgcgtatgtggtggagagctctgacccaccctgctcttgagtgtttctgaatgctaggagcggggacaaacctgcaaggctgattggatgttgaggaacaagtatgtaaagagaagtgtatacataaaaaccaaaaatccctggggctttgaatccttctagagctcctggccaccttcttcaggacagcaactgacagtgttgtgaagtgcttggctttgtccttctcgcaggccatctgggctaagtagtgagatccacgtggccaggaaggaaggcatgcatctccccaggcctgtggctctccttgtattgaccttgctgcttcctgggctaagcagctgcagtgagggtgtgttgccctgaagcagttacgtcattcattaatccaaattctgaaagacaaatgagcatatggtgctaaaatactttttttttaaaagccacagtttcattgtcttagtcaaagcaagattattacgtgattattttcaattcaatatatttgttttggagacagtttcttgctctgtcacccaggctggagtgcagaggcactatcatagctcactgcagccttcaactcctaggctcaagtgatcctcctgcctcagcctcctgagtagctgggactacaggcacctgccaccatacccagctaactgtttttccagtgtttttagagacagggtctcactatgttgtccagactggtctcgaactcctggcctcaaatgatcctcccacctcagccctaaattcatttttttaaattagcaatttcaagtataacaaatttggaataaaggtttgttttctattaataaaaatgaatagtgacaaaacccccaatattctagattgtgagacttccctcttgttgtagttggaccacatttaaggactaaattggaaggaaggagcaagaggagtctgtgacaaacctgtggttaagctctctttgaagaaatcgcacagtatggctccgtgctctgaacatgctctgtgtctgccctttttcaaaggcgagacagccacctcgaggccagtcagaccatgaataatggtctaagcccttgccaccaggatggagaggtctgagcagtacagtgaagaggcttcatcagcaagggctgattcaacggcacctctctctggattcaatggcattctttctggaggttagcccatttctttaagtcagctccatccaagtttgattatccttctttgaatctcttccaacaatttgacatccttgaggttgaatagctgaaaactgcacatagcgcagcactccacacaaaacacctttagaaatttctagttgagaagaacttgggcaaagtcaaatctccccacttgattttgtttatgttcctctcttgggatttgtcttgggcatgttactgtacaaataactgctatcatcatcatcatcaacaccagttttaagaattataatagcaataaaattgacttaccatttttgagactggagttttgttacctgatatggtttgaccctgtgtccccacccaaatcacatgtcaaattgtaatcccagtgttggaggaggggtctggtgggaggtgactggatcatgggggcggacttcccccttgctgttctcatgatagtgagtgagttctcatgagatctggctttttgaaatgtgtagcacctcctcctgctctctattcctcctgctcctgccatgtgagacatgctggcttcccctttgccttccgccatgattgtaaatttctcgaggcttcccaagccatgcctcctgtacagcctgtggaactgtgagtcaatcaaacctcttttctttataaattacccagtcttgggtagttctttacagcagcatgagaacagactaatacattacctaaaacaaattttggaaacaaatcaggtcattaaaaagtgcaagcacggccagccatactaagccacctgttcactgtgttgctggggtttttttttttttttcaatttatttttttgagccagcattcttttgtgaatatcaatttctactgggcaatcaggccatgtggtctctcctctggactggcccctacagccttccacactctgtgacactcagtggccacaggcccctggaaaattggatgtgtgactgagtctttaagaggtggagtgacttactttaattcagtaagtcaatatgttttaaactcagattgtttgttccacaataggaaaaagctgtgaaatttcttgtctcagctctgtctaccactactttggaggggctacaggtatcagtgagataaaccaaagtcagatattcaaactggggcataaaatgttctgcatgagtgtcaagaatggttctttgggtgtggcgaagggttcacacctacatttaattttcgaaatgtgtttcttaaaaatatgccaaaaagatacctagaaaaacacatatcactgattgaaatatgtaatgcatttaaatatacatacatatgtatatacacacacacatatatgttttcataatcacactaatatctgccctgctacactgatggtcaaatattttgggagagaacatctggcagcctacctctagtcatcttttcctctataaaactcttccaataccctgttctagctatgcttaaccttccaagcttatcaaacaagtcaggttctctctccactccacacattgctcaaattgcttccactgcctcagatatcctgctctgcccccattcttaacctggctacctactcttagagtttcagtgatctcttccaggaagccttcaaacatgcacacacaaatacttgactagcatctcatgcacagatacttgcatacttgactggtacctcatgcttacttctatcagatgatagcgttggctaccccgtataggacgatctgtttacttatctgtcccccgccacaccagacataggccatcaggtccaccaggactggtgtctttattgttgcatgtttccattcttcacacagcacctggaaaataggtaaataaatattaagtgagtgaatgaatgaatgaatgaatgggatgaaggaatgaattcttgctactgactggtgcata

SEQ ID NO: 1885320 - DNA, 4001 bp, Homo sapiens
cctctgcttgaatctggtctggctctgtgacttattttgactgacagaataaatatgtgaatgtaatgtgtataacatctgaggctaggtctgtacagatatgcagtattcaccttttctgattaaaatgcttgcttttggggtccaactgtcaagaaaagaagcccaagctagttctttggtgtgagccacatggaacctcccaactgtccttgccagatgtgtgagtgacaccatcctggacatcctggtcctagtggccatcatactgcaatccatgaaagacctcagttgatgctgtgtggagcagaagattcgcccagcttagccctgacaaaatatctgatccacagaattgtgagcaaataaaatgattaccatttaaagccattaagttttggagtagtatgttactcagtagtagacaatcaaaacagtgattaagaagatatattatgaggctgggtgcaatggctcacacctgtaatctcagcactttgggagcctgaggagtgcagatctctcgaggccagaagttcaagaccagcttggccaatatggtgaaaccccatctctactaaaaattaaaaaattagcaaggtgtggtgacatgcatgtgtaatcccagctactcaggaggctgaggcataagaatcacttgaacctgggaggcagaggctacagtgagctgagatcacaccactgcactccagccggggcgacagagtgagacacaatctcaaaaaaaaaaaaaaaaaagaaaagaaaagaagaaggtatactaatggagacagagtgctttgccactcagtagttactgaccttgagcaaatcacttaatttctttgtgccagttgcctgatctgtaaaatgggagaccccacctcatgtgatgactgtggggttaaatgactgaatgcatgaaaatcacctgaaactgcatctggcctataaaagctgctcaatacaggagtataactagaactaagggaagaagctgtgaagattaaaaagaaaatcagctctaaaaagaaaactctagtgggattgtcaggacatggagtaaactgcctctggatgcaatgaagtgctttccctggaagcattccaatcgtgactggctggctgcttatacaattttgggattgaggaccctgctgaccttgagattctatgtttccgtggtgctggggatgaggtaggcattctatgtgctcaataggcttttctcgaattgacttaagttagatatataagaaagaagtactcacccagctaaatcatgacaatttcaagattacccaacatattttatttggcataatgttttctcatcaaccattaatgttcctgaacacatcctttatctgtaagataaaggacttgaagcagacctaagtggcttattaattattgaatggactgcttatactaccttcctgcctgcgaattcaaagctggaacatgaggcaaagccactctgcctccctgcccagagagggactgtcccaacctccccagtgcaggggcgaaaaggcacaaagacacagatctcacttcactcctctgcagcttctgagaacacttaaaacaaaacagccccaatgtagcccctgaaatgcagaggttcaagaaaggagaggtaccgatttcttcaatagttcacaaaggaatagggaggtctgaaatggaaatctttctgcctgtgacagtctcataaagtgtccccagactgttcccaagggccctgggcaataacaaccctaaaatcacttgtaattcagctgaatatttcttaccaggtcagtctagggcagggctccagatagggacagagactcaggagagcagtgcttctgggccagacaggggtggggccccaggcttgcttcctgtgctattcagtttctccacactcggacatcaaagacagtgatcttctgactctaaatgagggcagactgacccaagaaacagggacaggtggttactttgctactcactccgaaaccccacatggggtattttaatagtgttctccatctgtccaacctcaggggttaatcccttcctaatctgagctgtaataattgggtaatcagacaagacactccaaaaagcccaggccatagttttgctgttctttttggctagacttttcttttattagagtgaagtatagctgacctagaaatttcctgtttcagcttcagtcttccactaaacaaaagcagacactgctaagaaggatgcatgtttagaaagcacagccctccttcttggggggaatttcagtcactgctcactgaacacacaggaaggagagctgctatgcgcaaatcacatgatcctgctttttgctacaaactgaaaaaaaaaaaaaaaaggaaagaacagaaaaagcccccaaaggcccatagttagcctgggctaatgagctcactggtgtgagtccaggaaacatcccagaatgaatacatctgctgagatttctgtcttttgaaaaaagtaaccttgctgtggtggatagcaaatgaaacatcaatgaaagctgcatgaaaccggatcagggacttaacctaaaacccacgaagaaaacctggtaggtggttaggatccgggacagaagtaagcctgactatttgaggattaaccatcatggaggaaaacatagattttttttttttcaaagaagaagaagaaaaaactaacacccaagctgctgaggcctgatcacactgacctacaatccgggatggaacaatggtactgtcggcctgatgagctggagagttcacaccaaaccaagtctcacactgacgagcctcctggtcaccgtgcagggcaggcattatgatttattcatggtagcacccagcacacgggagagactctataaatgctcacggaatggaatggacaccatgggggtcctttctaagctactctggaggtgggaataaccacaatcaggtttttaatctagtgtatttcaaacattttctagacgtgtttgctttaaccaaaaaatacattcccctaagggaaggctgaagggtagggagagagctgggagcaggcgatagagattggtacagggaggtcttgagaggaaatgcactgtcttgcgggagggggaagcgtggaggaaagtgaacccactagggagacggaatgcttcctttccccaccacagctactgagtaggttgatttgtagcacattctgccagctgcctgctctaatctgttctctccttctgtagtaataggaatgtggccaggcacgtggttagaccatatttcccactctctagtagccagatgtggccatgtgactagatgtcacccacagaagtgagaggaagtgatttgttccatgtcggagtcaagcttcttagaaatggacgtgcttcttccgggatctctttctccttccaccagctaaatgcagatagcaacaaccacacagtggggacacagagaagtgaagcctggggccctgaatgatcacatggaagagactcacccttctggtttcaatatttgacttataggtgagtgctatgatctgaatgtttgtgccctccccaaattcatatgttgaaatcctaatctcccaggtggtggtatcaggaggtgaggtttttggggaaaggattaagtcacaagggtgatgtcttcatgaatgggattagtgcttttataaaatagggccaagggagctcattcccccttctactatgtgatgacacaggtagaaggcaccatctgtgaaccataaagcaagccctcaccagatagctaatctgctggtgcccttgaccttggacttttcagcatccagaacagtgagaaataaatttctattctttataaggcattcaatctatggtattttgttatggatgcccaaatggactaaaacagtgagtaagaatagacctctattgagttgacctgttttattgtgggatctatttgctacacaaactagcatga

SEQ ID NO: 1885321 - DNA, 4001 bp, Homo sapiens
tcaggcctaactctaaattcaggaagctccctacagacaacacaggttcctgaatgttgtcgtctaatctagcttcaaaatcttttcacttacatatggggtgcacattctttacttggaaaatgatttcacaggagaatgcctgactgaaatttactcatgagtaaacctttgcactctttcctctgaaaaataataacatgaggcccattatcagttagtgataatctaagaaaagtgatgaagacagaggcctagatctgttctgagttggggttgcccaaacctgcagggtgagtagcctctgatttgtaccttctggtgggtgaggtaaatgtgctcctgcaggtcttatactcattgcattatctccatgtagcatcacatatgactttaaagcactgtgcttggccgggcgtggtggctcacacctgtaatcccagcactttgggaggccgaggtgggcggatcacgaggttgggagatcgagaccatcctggctaacacggtgaaaccccgtctctactaaaaaatacaaaaaattagccgggcgtggtggcaggcgcctgtagaggcaggagaatggcgtgaacccgggaggcggagcttgcagagagccgagattgtgccaccgcactccagcctgggtgacacagcaagactccgtctccaaaaaaaaaaaaaaaaattctgagtacattttaaaacataaggcatccaatggaatttttaaaacccttatatggataattttaaacatttgtgtaaataaacaatgaatttaacaaactcctatatgtctataacccttcagaacaaccggaaacacatggccaattctgttctgtctatattcccaaataaaattcatacattgtgattagctgatgtgttttttagtctatataatttatacatttcccctatatctcctatatatcattttcttgtaatttatttcttgaagaagctgtgttgattttcctgattcatcttcagagtttaaaatagaatttcacaaaaagaaaaaaataaaagcagactgaaggaataaaaatgtcagaaaagaaatcaatgggatttaaatggtacagctgctttggaaaacagtctggcagttcctcaaaaagtaagacatagaattactctttgacccatcaattctactgaagtcttcatactgaagaggattaaaaacatgtccacacaaaaactgggacacagatgtccatagcagcattatccataatagccaaaaggtagaaacaaccgaaatgtccaccaactgatgagcggataaataatatgaagtatattcatacaatggactattactcagcctcaaaaaggaatggttgccagaggttggaggaggaaaaaatggaaaatacagtatttctttcttgggtgctgaaaatatgttagaattaaatagtggtgaagtttgtgatacttccagaaagtgctaaattgtacacttcaaatgaataaaatgtagtatgtgaattatacctcaacttaaaaatcaagaacattttccagaaataaagtttaagaattttcagatttaaaagatctattgagttcccttcaaaatgaatttcaaagttcttctacactaaagcacattattgtgaaatttgataacatcagagaaaaagatctgaaaagcttccagagaagtgaaagaaaaagatcacctgcaaagaatcaagaaccaaaatggcactgaagtttttcattgaaattttagatataataagaaaatgaaatttggccttcacattctgagagaaatacatatattttaaaccctactaagccgccaacccagtgtgagaatagtgctcaggcattttgggacatgcacagcatcaaagctttaccttcgattaggaagctacagtaaagtggcaacctaagaaatgggagaatgaattccaggagcaggtgatccatgcaggagagaggagcagcattgccgagagccaggggtgaagcaattcaagctggagacactgagacaaacacaggggcgcctggcattctctcagaggcagtacagtggttctcacaactcagtaaatgtggtaattatctcttatctggttacaatgcatcttcccaggcctgccagcagggattctaaatcctgatgcaaatgatgtggcagcacttgtggttatagacatgagtgtttgaatcacagatccaggtccaaacccaaatcccctcagtaattaactgtatgctgtcattcaattacttaatctctccagcacgccacttcctcaggccaattcatatgggaatataaattcataggagtgttataaagggtagtttgtacaatgagctcgtgactatgaaatgcttagcatggcatccaaaaagtcctcagtaagtggtgcaacaatacctttttattacagaaaacacactcaacctagaaaacagtgttcataggggattcagagaagtaagtacagttgggtgagcagagcaagccagcgtggagagggtctttcctaggtgaggcctctaccacatttgaaagtgggatgcagggcaagagctcaacatcaaccaggacgggcaggaatgaagtaaatagctcacacctgttccttcatgggtcagttcctttcattttcacttttgactctgatgcaaaattagaactctgctcaaatgtcactattcttaataaagtaaagtaaataagtaggatccaaaaacttcaattgcataaaatacgtgctcttatgacaaggcaaatgggaaatattttgcagttggtcattgccatcacaataacacaaattctaaaacttatactgtttacaactgaaccacaccctcaaataatcaaaaaatggtccctccctaaactctctccccaggaagagaaagtctttggctgccccaacctgagcaggaaagcaggtggagagggggagcccacagctacagtggcaagaagtctgagggctgagggctttgaccaaataatagggaattgggttgagttgtttgaatcattttccaataactgacgtataaaatagattcattgaaggagctggggaatgggagcccacccctcagtctccagcctcccctcagtctccagcccccccaaactacatgtttctccagagtaaccttgagcctctcccagcatggattaaaacccatggctcttccagatctaaaatctgaggctctacaatttaagtcatagttaggcacttccatacctgtgatggtaacattcttacatactcagtctatcattgtttaatattgaatgaaagacacacattttgtttacttattatgcagcagctagtctgtgttcacctgcgttgtctcagggtcagctctttatttccaagaatcctgtcccatttcctggagcctattgaccgggggaaagatgtggtcaaaagttaaaggtatgttgggcaaagccttagaaacagcttttctgacaagcaatggggaaaagaccccgttcaataaatggtgctgggagctgggcccctttcttacaccatacacaaaaatgaactcaggatggattaaagacttaagtgtaaaacccaaaaatataaaaaccctggaagacaacctaggcaataccatcctggacataagaacaggcaaagatttcgtgacaaagacaccaaaagcaatatcaacaaaagcaaaaattgacgagtgggatctaattaaactaaagagcttctacacagcaaaagaaactatcaacaaagtaaacaggcaacttacagattggaagaaagtatttacaaactatgcatctgacaaaggtctaatatccagcatctataaggaacttaaacaaatttacaagagaaagacaaccccattaaaaagtgggccaaggacatgaagagacacttctccaaagaagacaaacatgtgggccgggtgtggtggcttacgcctgtaattcctgcactttgggaggctga

SEQ ID NO: 1885322 - DNA, 4001 bp, Homo sapiens
ataacctcttacaatttgttttattttcattctttctcaactttctatatttatttagttttatctacacttttttaattccttcaatttaaaacaatcctttagaacctctaaactaggcaaaattacttgcccttaaacgaaaaccatattcctgtcttcttgtgtgtttaccaaaaacacatcctatttttcgtatacattctgcaaatagaattgtttctcttgtatctagtagtttcaattacttatataagttacaatattaactcttagtaatccttattttagggattttagggaagaacctaggaagtaagaaatcttgaattgtctgcaatatatcagtattttaagataaaatattataagtatttcatgtattttaaaaccatgttttaatctttagaaacatttccttatacatttcttaattggaagtgacccagctgctcagtaagtaaagtatgatagtaagtatcataactttaagattttgaaaaacataagaatttcatttacacacatttgtcccatttacatttatctaatttatttgtttttaacagtttatctagattagttatgagaatagagatattagacaaagctagtcaccattttaagttatttccttgttaaccattttacagcttgtgaatatcaggtgttcacctaagcaagaactttaaagtgaaatacacagatattttgctgataaatcagaggatttcattgttttcattaaaccaacaatattaaattagtcttatttatcaaaagaatcacataaacaaagattattctgttttggccgggtttgtaatttcataactttttgccaaacctggacatcttaaaataactatcagatgcacatatcagctgaccagtaaacacaggcaaaaatacatgctgacaatcctgaagacatatctatttttattttatcaataatttttttttaattttccaaagattattaaagtcaaatgaacttgaaagcatttggacttatttatttaatttatcagtactcttttatttataagctaatttggtaccatatagacacaacatataacataatgcatgtatatgcataaacaagacagttggatcaaacttattttcctgataaaactggaatctgttcacatggctaaattttatttgccctgatgagcaaagcagtttccagggcactttgattttaaaagacctctttccttttttttctttagccagtaacctgaaactagtaataccatgaacagtaagttttatttcaacaccagcagaaaagtcagcagattcagagtagtcaggaaggaaaaataggcaaagaacttagaagactacatggtaactctttaaggacagaagaagaaagagggattgactgaaaatgttttacatgtgccatttttcttcaggttttctagtttatggagttgctttgttctaattgagtgtgcaggagtctggagatctcataaggcttctgctgtagccatcacagtctttgacctctgttaagccaaatattgctacacagaccaaaaatacagacagaccaacaaaaatcagaaccagactagattatcttagtggctgtagctttttagtattgccttaattctttgggacttaaacatacaccagatttgggactctgaactgaccagaatcccccttgggtaggactcaaatccacaatcctagacaaggttgggactctcatccataatcctaaaccacagggtgggacttgaacccacagtcgttatgatgagttcaaagacaattaaaagtacaggggcatattaacaaggtactcaccagaaagatgtctaatccagaagcaatttattttcccaaaagagaagtgccaagggagcctgaagtgccatggtggagaagaaggaaccctatagtcgagcctctggacaccctggtctaggtggccactcaggatcagtgcagggggcctgcacaccactaggggcaacagtaccttggacaggctgttcgtctcacctggggttctagtttgttaacaagcaaaaggggctcactgcccaatgtgctagaagccaacactgacaccaaatttttgaaaaaaagaaaagctttatattaaaagtcacctctgaaggagacaggagtcaagctcaaatttgtctctttctgctggcattaaggcagtacttttattagaaaaggttcagggggtggattctgagattagtaggtgatttgtgcaaggaaaagggaggtctggaaagtccttgggcatgcatagttatttcttcatgttaactcctgagttgcatggcaaattcagggagagttagtatgaaacgtggtggaaattcaggctatgacatcagcaagcttattctgtgcaagctccagttagccatcttggttccaaccagtttcagccaggtttttcttgatctcacaagtggagggagtttcagcggcttaagtttcttttcttatctgctatcttgaaactcaaaaattaagtaactggtttcttactctttgggactttccagacctcccatttccatccaccaatcacctactaatctcagaatccaccccctgaatcttttctaataaaaatactaccttaatgtcagcacagagagacagatttgagcttgactcttgtctccttgggagttgactttcaatatacaagtttttcttttttaaagaacttagtgttttagtattggcttctattgcattgggtagtgagccgcttcagctctgtaacactaactctggtagatagcatcaggatgaaattgaattgtagggcacacagttggtgtcagagaattaaggaattgagtagtgtcagaaaacacctcagactacactttctcccttggtatgggaagagttcagtttgtgtttctttcttcttgagtgacccaactccaagaagatgccacttctggagagagaatagggatctcaacttagcctggcagtgagaatacgaatggcagctggaatgacccaacagggggctaatgtttgggctattgtgtgtgtcacactgaccctgaccagccaagtagtcacagcacccacaagctcttcctgcctgtcagatgcctcattcccacctgtgatgctcagagagaaaccatgagccctgaaaaacaccatattgttttgtgatgtcacctctggaatgttctgagtgttttggtgaccaacttctgcataggacctatacctggcaactcacattggtatggctttttacttgagatagaaataatcatcttagacagggaagcaggtacagctatctccacttcaaaaactttcaaaagccttttacatcaactataatatctagcttaatatctgttcagagattgataaaccatcatgccagatatcatctacacgttctttcagactcagactttcataattgtacataattgacaagagagaaataaatgagtagaaagttctgtgttttttaggcgagcaattgaggcccagaggatgagctgggaagcagtaatcttcttcttttctcgtttccacagcactcaaggccaaattatacaagaaaaagagataccagatctgaaagcctagaaattccaatcagtgtggttctacctcaggtagggataatcacagaaggatgtaacctatcagtgttagccagaataaccccccatctcctccttcaaaactctagcaagatgttgtagaataagcagagatagtcagggcttcagattatagtttgggttgggtgccagcaggcggtgtgctggggaaggccacatagcccctctgggccttgggttctttttcccatgaatgaggtggctgggtcagatgatctggtaagaacttccagtcctaacattccaagtttctatgatacactgaagtaacccagccttctcaaaacgagatcttttggtgcttagtgttgtgcaatcact

SEQ ID NO: 1885323 - DNA, 4001 bp, Homo sapiens
gtgtggatgttaagcggtagtaaaaatagcaactgaagcaaaaaaaaacatccttagtgggatctcaaaaccgtttaaaaagaaactatcggaggggcctaacagtatcaggtgtttcatagttgctggggagaagcagcaaagggacacacattcacgctagactaagaatgtcccatcatcattactcctgcacacccacatccttaggctccaggttaggccccttataaaatattgtgtgggccaggaatcccacgaattcccagaagaatgggaatttggggaattgtttttaatcccgttggatagtccagtaactctgcacatggataccagtcttgggcacagggaatttccctaaagagccacaaggagacttgggttaaccagagacaacagctcctcaagtacccactgtggaggaagtagaggaattcagaaactcgggctaatgaaccgcctcagtaacgtcctgaggggtaaagctctgctgtgtccatggtgaaatgtgagtgtgagagaactgtgggaacatacatatccacctgctgcaagcctacctgcccatcttcgaaacgcggtgccccttcactctgccccaaagctgaacccttttgtattacgcctcccaaatacgaagttgtcccatagcatgagttttggagtccaaggtttgagtcctcggtcggctgcaaagagctgtgtggtcatggccaagtcacttagcccatccaggtctcagtctcccgtgtgtaaaatgggagtaaggagggctcaattgttctaaggattaaatgcaaccaagttggcaaagttttagcacagtgcccacgtgttagctgtttatggtgtgcctgttgtatgccaggcctgcgctggagacgcaggcattatgctccctgcacatggcccatacccacatctcctctacacgcgccctcgctgaggcgcgggtcctactgaagatccggatagtgatcatcctttctggcagcataagtcccgccccctttccttccctgggcttctgttgtccaggctaccttggcgttatcaaagctacttgatctttacagccacttccctctgcacaggcatccaaataggaaattccgctctcaaggaaccttctacccatccacctgccaccagcacgaacctgctgtcttgttctctggcctctctccctcagtccccttttgcgccctcattttcctgtctaaaatgaaacggaccgctgccctttttatctgtactaagtttcaggagcagaatcttcgttaaactgagcagagcaagagcgcgctgcccacagggctggggcgggcgcacgggcccttatgtaaggccgggccttcccggggaagagcgaaggctccgggaagggaagcacgggcggcggggcccggcctcgaggaccgcccccagggcggggagtggtgtgagccgcggcgccgccagcaaactttcctcctccgaattcttgaccgagagccttggaaccacattctgcccaaatctgtacacgccggagccagggagccgcccgccgcccggggagcggagtggggaaagagggggtggagaagggaccggggaggaggtgggggagggcggaggaggtggtaaggagaggagcgggggggaggaggaggaaggggaggagggagaggtggggcggggaggagggagaggtggggcggggaggagggagaggtgggtcgggaaggagggggaagtgggagaccggggatgtgggaggggagagaaggaggaggtgggagaggggaaagcggggaaaggggaaggtggggcgggcggaggtgggggtagaaagtggggaagagcggggatggcaagttccgcgggtggcgagcggccccagggagcggcgggggggcgaagcaagttccttagtttctcccaagccagcccgggagctgttggacgagtgggagcgcctggctacctgcaagtcttcgggtttcgcgagcgccgcagagcttttctgcagccgctaaataaataaataactacggacgcccgccccgccccgccccgccccgcccctcccagcccagcccagcccagcccagcccagcccagccccgcccagcgcagctccctggccgcggcggcggtggtggcagcggtggtggcggctgcggcgcaggcagggctgggcgcttggggagctccgcgcgcggggcacttccccgtgaccggcggccgcgcagctcagggaactccgctccgtgaggcttccgggagagggaaagctgttctcctttgatgctctttggttttacagtggaaaactacaattaaaaaaacatagccgtgaaaataaatgagattagaacctgctggcttcacttcctggaggctttttgttgtgtcttgaaactaggatctttgcgggtcatccctgtaagtgcctttttaatccattcacaaggatgcttgtgagtctctgctgcgtttaacatcggtcagcgggtgacattgcattaatttgctctggtgatgatttctgctttgctaggttagcattgcctcgcttggtgacacgtaataaatgcacacacgttgcaaaaattaggacacagagggagaggcacctttttaactctgtcaaaaaatagataagaaaatctcttctaaagcggtgccaatatcgggaaaatggtttattatttagactgtggagatattaaaaaccacaacaaaacctaattaattattccatagccattctacataaagtaacatgataaaatcattaaataatagcaatgacaaaactcagtttgttgttctaaacttactgctttagaatgttgtttatcatgtcatgtatagtaaatcacatatctagtttttgtgcatgtgtgtcagagacagacagacatggataacttctgctctgaaacacagcaggtttaaggcttctatacagagaagttccatctggaaaatctccaaatacaattacaataaagcagatacaatatggagtgttattaaactggaggttcttcccccggagagtttactctattttcctttaaaataaactagggccgggtgtggtggctcaacgcctgtaatcccagcactttgggaggctgaggcaggaggatcatttgagtccaggagttcaagagcagcctgggcaacatagtgaaactccatctctaaaaaaatacagtattagctgggtgtggtggtgcacacctgtagttccagctattagggaggctgagacaggaggatggcatgagcctgggaagtgaaggttgtagtgagccaagatagcaccactgcactacagccagaccttgtctcaaaaaaataaaataaactgaaaggccggggaatcatatatttaaaattggccagtgctcattaaagatcactcaaaaaccagaatgaggcatccttacggtgggaaggtagggtaatagaaagatgcaattccagttcacaaaaatttggccttcaggccacatctgatacacttgcataaaattgaaagacgatgcaatgcatgttttcctaaattaaaccagaaatagtggtagggatataccttcatgccagcagatgcacagacaggttctgatggaaaccgttttcactaaaccatgtcccagttactttatgtagcttaacgccctgggatttgtatgttcccaaccagagggtgcatgctggagctccatgggcctgaacttgtcttccagacctgtttggcctgcggggtgtagtttaaacttttgaattagttatggatattttgaaattgttaagtttcacatggaaagctggactttgggcttctctgaaacatgagaagcccgggccaccctgggtgggactgttggctggagccaacagcagtgttaggtgtgagggtgacagtctgtacctctccagctgtcttcccccacctctgccttcactctgttaagggacttgtccactctgcacatgtg

SEQ ID NO: 1885324 - DNA, 4001 bp, Homo sapiens
gtaattgccttaaagatataaaagagcctgattgtaataactcccctagtgtaactattcttcatttctattccacaagagaagatagcaggaagtaatatcactctaagggtatgagtacggagagaaggagctaatccttaaatatgtgtgccctgcatctcaaataagccctgaacaacagtgtgaaaggattacgggtaatcttatatatatcccttaacctattaactggaataattgttgcactaagataagacgcccctaagtattccaggctaggtggccctaggtcagaaagcatttattatttatttcctaaagtcctgttctccagtgatagggacggaaatttggcagactgggtctccccttgtcaagcaagtgaaatggttgtttcatttttaatctggatcctttgccctgacagataaatctgaagagtgctgttaagaatgtgatgaattgggcttctggtgatgtctgtgggaaagggagcaagatacagcagcctggaactactttcattgcacacaattgcaggtcttttaaaatggtagagccaaccattgccgagaagacttaagcaaggagaaaagtttgtctcaaacatgccttgaattctgtcagtgcacttcatctctcatttcagggaatgtgttgagggtctttggattgagctggaatgatggagaacacttgagtactattgtgtctgagttagttttgcccctgggtaccatgacactttgtgagcagagaaatgggtgcttctgtgttacagttcaacagctctagctggaggtgagctgtgtaacacagagagggtaaggcatgtctgagtcactcttggtaccacgtggctaggtaccatgctgccaagcataaagataagcagcagtttaatccttatttgagtaatctgacctgaggagatagccaaactgtgtgattaccattcccaactagacttttgagatgggcagatcacctgaggtcacgagttcgaggccagcctgcctaacatggtgaaaccccgtctctactaaaaatacgaaaattagctgggcatggtggtgggctcctgtaatcccagttacttaggaggctgaggcaggagaatcgcttgaacccaggaggcggaggttgcagtgagccgagatcacaccattgcactccagcctgggcaacagagtgagaccttgtaaaaaagaaaaaaaaagaaagaaaataaagaaagaacaaaagtggtaaagcagtcagggtttggtcaggagacagaaatcacaatagtatagtcatgagccgcataatgacatttctgtccaacacagactgcctatatgatggtggtcccatagattacaacactgtttttactgtaccttttctatgtttaggtatgtttgtatatacaaataccattgtgttacaattacctaccacattcagtacagtaacattctgtacaggtttgtagcctagaagcaatagactatgccatatggcctagggttgtaataggctatactatcatctaggtttgtgtaagtacatgccatgatgttcacacaatgatgaaattgcctaacaacacatttctcagaacatatccccatcattaagtgagacatgactaatagtttggacagggaaaacttaataccacataaaaataaggaactaattaaagggtattatctactaagaagtataaagggaattctcaagaaaactggggtaagacgcagggagcagtcactaggcatagggctgaaagacagtattcaaagaaagtataaccttgaaggaagtccttccagttcagtttcaaggctgtgattcatttaatgtggtctagtagatgtcagagaagtccactgaagtgatgcaggatgggctgccgagcaggaagccacctgttgtggtgagggtgaaactctttggagggtttgtgtcatcaggtcttctgcatgcccctaccaagggagctgctggttggcaaggagacagctcattgttttctaagaacagagctggaaccagaagagaagccccttccttgtgcagtgtccctctagcgccctctactgacaaggtctaacattgtgcccgctaacgaaagaaattaggtccagctccagttatcataatgtagggcagaaaagggcatatgtggggttcagagacagtaaattggaacaggcataggtggggaagtaaaggttgtcttagagaggggagaggaggttggagtgggtggagctgcggataaattaggatgagactaagcgatgcacagaccatggtcctgaagtgtggctgaaagagtggggatggaaaggagggggaattagaagaatactcaggggatgtaataaataggtctctgtggcggatgagccagagacgggccagagggaagtggcaggcatgctccctatgtttggtggctttcctatctgagaaaaatggcaggtttgggcttcaaggaagataatgaattgtttggacttctcaatttatggtacctgtagactatcctaaaattcagaatttcctggaaaaagcacaacagattcaaatattcaaatacccaaatatgtagtggagctatagagttccacaactgatacaaaactcacatgcaaagaaaaggaatgaaaaacaaatttccaccttaagaagaaattcaacaaaatttattttcagaaataaacttccttcaaatttataaaaatctaatgaatttccattcaagcttggagctgcagtacttttttataatatgggaagttgtaatttaattttttaaaagattgagaggtgggatttcactatgttgcccaggctggacttgaactcctgggctcaagggatgctcccatcaacttctggagtagctgggattacaggtgtgcacagaaactgtaatttgaataaagatcaccattaaagttcagtgtatttgtgcgtgtgtttctgtgtttggagttttgttgttgttttgtacagaaagaaacttaaaaatctgtatataatttccaactgaatgaactttctatattaaacagagtagaaaatataatatttttacaggctgttacattttattgcaggccaaaagctgtctcactctttctgtatatatacacatatacccaaaggaaggaggtggagctaatgggctgagaagtcaaaaaacaaaacaaaacaagtgtaatttttccttagcgctcatttctcgaaccacacattgtagcacttggttgtattttgtatttttctattttgtgtccagttgctttctgtatataagtcctgcttcctctttcatacttattcctagagggcaggacagataccacatgctatttattcttcacaatttaataagaacttatcaataaagaattcatttttattgttcaacacaggcttactaagcatcattctgagccaacacatgcctaggtgatccttggaacaagcatgaaaaacacacagttcctgtccttgaggaactcatgatttaaatgaagaaaaatgtaaatgagaccattttgataaaatatagttggatgcttaaagtgataatccattctttggtcagactcttgaattttgaatggatctttgaaataaggatccaggaagtaccatccattctttccaccaaagtttgtgagtttactgggtatcagacacagtgtgggataatcagaactccagtagtatttatatgtaaaaatcaaatgaatgttcccatattatatggaattgtactggagaggacatcagaacagtctaaagctttataaacttgacaagaacgctgggaagaataacgagttaatcttccacaaaatgctttgaacacagaaagtaccaacataagtgctaattattattattagccccaagacctttttccctgtactgttagatccatcataaaattgcttaacttcaagggaaagtattgttctttacatgagcac

SEQ ID NO: 1885325 - DNA, 4001 bp, Homo sapiens
ctgacttggctcctcatcactattcaattgctagttccatgttcttgtgcatccaggctacatgccctgcccttgggtttcacgagtcagatacccctataaccttccaatagcttgcttatgtttccaatatgtgcaaaagcttctcagcctttgcacggaggatctctacgtaacattctgggtgagcatgggcctttgatcttgctgctgcacctctccatatggagactgtttctcataatggctgtagagagtcactccctcctagttttcctcatctcttcctttgccccactttctctattgttcttcaacataattacggaattttgagaaatattacattgtttctgggaaacaaagaccaaagggaaatataacttgacaagacttgccaaaaggccatcagagaagataagccaaaaccagaaataatcataacacatggtagaaaacaaagcattttacaaaagaagatccaatagacaggtatggaagttcagaggagagagacactcactcagatctcctcctgcttcactaatctggaagtcatgttactgccagcgtcaaggacccattagtatatgtctggcataaataatatagactgtaaacagacactgtggaatttactgactattgggcatcctaaatccaaatgactgtgcagacattataagatcaataaattgattgtattggttcaagtggtaaaattatcggaagggacagtgggctatttttgaggggataacttcttaatttcttctgagccttctactggcaagccaggtggtatctgtttgatgatcttggaaaagaaaaaaaaatccttatctaaaggacttcaaatataagagtacagatagtcttgtatttgattcatttatattgaaggtggctaatggggcatctagccaacagcagatctaatgggatgtatactgtgagtcactaaggattccaatacagcacccttctttcccacctgagatatgcataaataattaaacaaagcagtggcacatagacaaccaaaatattaactttgctactgataaaagtagattggaaaaaataggttaactagatgaactccagaattgggcccccttgtaccctacccaggaagtggtggactgtgagccacttccctgggtgggggtacagcagagccgaccctgaagaacagagcatagcagcaactcctgtgaactgtgagctccccaaaggaagaagaagttgagcagagcatattcaggtatttacatctcaaatttacccatcaaataaatgactcccctggggaagaactaataaagaggtggaggaaagtcaggagttagactatcacattccctccacatggaaggaaacatcaaaagtaagaggcgaactttttccctccccacttcccaacagtgtactaaatctaaaaaataaaaattaaaattaacctctagttcacagacaggtaagatattagcattatgaaaaatgagaaacattttgctagaattcgaagacccagagatttgacaatgcatatgaatggctaaagttaacatactcatattacaagtaggtttttttcaattctcttccagatttttcttttccagagacagtgtctctgtcacccaggctggagtgcagtggcatgatcagcactcactacagccttgaactcttggtcttctgccaagagttcaaggtgaactcccgccttggcctctcaaagccctgggatcacagatgtgagcactgcaccagacctcttccagattttttaatatttgagctttactcctgacttcaggcaatgatacaagaaaatggtgagagggaggaggggagaaggaagaaaggccaagaaggcagtaggaacaaaagaagaaaagagttaacacctactgctagcaaataggtgtaagtagtcccagactttttctatgcatctcaactgcattctgcggagttaagagaaggtcgaattcagaatctggaacctgaacaagcaagaggtgtgtctctctgtaggacttctttacattttttttttaatttttaagtttaggggtacatgtgcaggatgtgcagctttgttacataggtaaacgtgtcataggggtttgttgtacagattatttcatcacccatgtattaagcctagtatccactagttatttttcctggtcctctccctcctcctaccctccaccctctcttcggccactgtgtgttgttccctctatatgttcatgtgttctcataatttagttcccacttataaatgagaacatgtggtatgtggttttctgttcctgtgttaagtttgctaagaattatggcctccagctccatctatgtccctacaaaggacatgatcctgttcttttttatggctgcatagtattccatggtgtatatatgtaccacattttcattatgcagcttacctttaatgttcagaatttaggttgattccatgtctttgctattgtgaatagtgctgcaatgaacatacatgtgcatgtgtctttataatagagtgatgtggggtatatactcagtaacggattgctaagtcaaatggtatttctgtttctagacaattctttgaggaatcgtcaggctgtcttccacaatagttgaactaatctacactcccaccaacagtgtaaaagcattcctttttctccacaacctcaccaacatctgtttttttttttaattttatagtcaaaataatagccattctgactggtgtgagatggtatctcattgtggttttgatttgcatttctctaataatcagtaatgttgagcttttcttcatatgattgttggccacatgtatgattgctggcagcatgagaagtgcctgttcatgtcctttgcccactttttaattgggttgtttttggcttgtaaatttaagttccttatagatgctgcatagtttgcaaagttttcttccattctgtaggttgtccatttactctgctgatagtttatttggctgtgtagaagctctttagtttaattagataccatctgtcaatttttgcttctgttgcaattgcttttggcatcttgcaattgtttttggcatcttcgttatgaaatctttccctgtgcctatgtcctgaacagtattaactaggttttcttttagggtttttatagtttttagttttacagttaggtctttaatccatcttgagttgattttgttatatggtggaagaacgaggtcctgtttcaattttctgcatatggttagacagttatctcagcaccatttattaaatatagggaaccctttccccattgtctgtttttgtcaggtttctcaaagatcagatagttgtaggtgtttaatcttatttccgagttctctattctgttccattggtctatgtgtctgttcttgtaccagtaccatgctgttttggttactgtagccctaaagcatagtttgaagtcaggtagcatgatgcctccagcttcgttctttttgcttaggattgctttggctattcaggctttttttggtcccatataaattttaaaaagttttttctagttctatgaagaatgtcagtggtagtttaatgggaatagcattgaatctataaattgctttgggcagtatggccattttcacaatattgattcttcctatccatggcatggaatgtttttccatttgtttgtgtcatctctgatttctttgagcagtggtttgtagttcaccttgtagaggtccttcacttcccttgttaactgacttcctaggtattttctttctgtgggaatgatgaatgggagctcattcatgatttggctctcggcttaactgttgttggtgtatagaaatgctagtgatttttgcacattgattttgtatcctgagactttgctaaagttgtttatcagcttaagaagcttttgggctgacaccatggggttttctagatataagatcatgt

SEQ ID NO: 1885326 - DNA, 4001 bp, Homo sapiens
acataaagtctattttatggtttataaactaatgggagacatagtgacttctttcattgctaggaagattttaaatgttctttttgggaggcatagggattaattttttttttcctgcttgagaaatgttaccttctgagaaaaaagcaaggcactttttctactgttgtgattccttaaaatagttttcttcccttttgttttgtttataatacccttcccaactcccttggtcatctgagcatggctgatcacttcacgtctctttttttgattcatgaatacagaattctaactttatattaaaatgaagaacatatttagttctcaagaataagctcatcctgggaatatattgcatgttggcagatgtattaaaccagaaaaagaacataggagggatgtggccctccttgtgagcaacactctcatggttgagtccttaccgagggttaggaaaacatcctggtatatacatttgaagcttattggtttcctgagctaagattagggattaggacaagaggtgtggctggaatctcttcctgaagattgtgattctgggactcggaggagtcaagaccaaggttcccacagcagagccagaaaaataaataaataattaggcctacacctctgacatttgaccacccccttgggtattgtgtcttggtcctaatatattttgttttcctagtttaggctggaactgtgtagagcattgagcaaatactttgttcttaccaaatacatatatatttttggactgtacaaatactaaataagaataaccatatactttttttttgagatggaatttcactcttgttgcccaggctggagtgcaatggtacaatctcggctcatcgcaacctccacctcccgagttcaagcaattctcctgcctcagcctcccgagtaagtgggattacaggcatgcgccactatgcctagctaattttgtatttttagcagagacagagtttctccgtgttggtcaggctggtctcaaactcccgacctcagggcatccacctgcctcggcttcccaaggtgctgggattacaggagtgagccaccgcgcctggcatgtagtccaccaaggaggtgttgagcctctctcttgctagacaacctatcaggcaatattttcttataaattacttcaataatgattactcttgaatcattaactttgtacattttttccagatgaggatttgtgctaaagcttcatttaactattttggggagcttgttaccacaaaagagtcaggacaggctcaaaatcagccagaagtttacctattcaattcaacaaaacaaaacaggtacctatgatatgctaggctggatagcagctgctggaaggtttagaaatgtattgccgtctcttatttctttctgtcttggatttcgacttatttcaaaaataaaaatagccacactgttgaagacaatatgacggagactttggaatcagacagatctgtcccaagtctgtgactaccagtcatgcaacctcagaccatcatccagtcagagcctgggctcctgtaaatgagtgtggtcaccactcactcacatgctgcagggttggacacatgccaacatacagtaggggacatgggctaaacatccgaaaaatggaaaatgctcttattctcaaggccaggccaatgtctacattccaaaatagtagcattttaacctatctatacattttgaattgtgaaagaattcattgcttcttaaaaatatagttgacattctaagcagagctgagtgttgactaaaataaactgggctagtagttatcatagaaatgttgataagattacctggtattcattatacttaaaagcaagactggtcctaggtagaagtgacaagctacttcagtctgtttttcccaccttcgtacctcccattcatcttcctttcataattcacacactaactgcccagaagcttctttctctgccttgacattgttaggtggcctatttcagtaaaaagcagtctctctgaagtgttggctggtactatttaaaactctgttagctcacttgatgctctgcattttaataggggtctcttgaacacacaggagttttatgtatttttgtttttttctggtttttttttgttttgtttttttgttttttttgtttttttttgagacggagtctcactctgtcacccaggctggagtgcagtggtgcagtctcggctcactgcgacctctgcctcctgggttcaagcgattctcctgccttagcctcccaagtagctgggattacaggcatctgccaccatgcctggctaattttgtatttcgggtagagacggggtttcaccatgttggccaggctggtcttgaactcctgaactcaggtgatctgcccaccttggccccccaaagtgctgggattacaagcgtgagccaacacacccaggcacacaggagttttaaacccaggagaattgtgctgtcatgttaggcagactgtcttctctgtagctactctctctctctcagaaagctcatcgattcttatgacattaactttcatttttatttttattatccttaaaaatataggtcaaagctatctgtctctttctcccaagttttggtactgcaatttcttaatggacatttcagttcaacagatatttgtgaggcatctcttattacatgtgagacgaggatcaatactttacatgtatttaaaatagacaccaagtttatgtacctgtgaagaaatatttttgttctcttttccataatcaatttgtactatgatttgtcaccaagtcctatcaattcttcttttaaagaattgccatcaccttacacttagaagatacattaactagttatcttaaaaacaaggattataagtcattctactataaagacacatgcacacacacatctttattgcagcactattcactatagcaaagacatggaaccaacccaaatgctcatcaatgatagactggataaacaaaatgtggcacatatacaccatggaatactatgcagccataaaaaagaatgacttcatgtcttttgcagggacgtggatgaagctggaaaccatcactctcagcaaactaacacaggagcagaaaaccaaacaccacatgttctcactcataagtggtagttgaacaataagaacccttggacgcagggacgggaacatcacacactggggcctgtagggagtggggagcaaggggagggagagtattaggacaaatacctaatgcatgagcggcttaaaacctagatgatgggttgataggtgcagcaaaccaccatggcacatgtgtcccagaacttaaagtataataaataaaaacaaacaaaaatacaagaatcttccagctcccatgtgatccctatggcaagtgcaaactgattcccttcccttcacctcctcacttcacctcagtagcactgagctctgccactatatagctctgtgactttgaacaatgcatcggtttatttatccacaaaatataacgaacaatacctgccctgcctttcttgcaggattattgtaatgatcagtcaaaatggtgcgttggaaatcattttacatagtaaatatttatatcacactgttaggaatagtattcttgttttctacctcatcttgacgtgaatgagacatagttcaaatcttgaatcctccacgtattagtcatgtgaacattaggttacttatttagactctcagaaccactacattctcatttgtgaaatggagacatgaacctccatgcagcctgatgtaaggactagatggagaaaacgttgatagaagtaccaaagactgtgcctactgccaacttgcatgccataatgttagttttttctttgtgttctaattggttcaatgttttttgtctttaccagtctttcttaatcttacctgtaggattttatttctatttttttggacaaactttgtattttc

SEQ ID NO: 1885327 - DNA, 4001 bp, Homo sapiens
cagacagcaatgccacccagtcaccagctccaggcagcaatgccaccctagtcaccagctccaggcagcaatgccacccagtcaccagctccaggcagcaatgccacccagtcatcagctccagacagcaatgccacccagtcaccagctccagacagcaatgccacccagtcaccagctccaggcagcaatgccacccagtcatcagctctgaagcagcccccccagctacaaactgtgtcgttaaactctaactcgtcagttctctgatgtgacctgggtgcctggaactgtagtattcatggtactatttaccatatgatactggcagaggggttgatggacaagacagatggagcaatggctgggacggatcgtggatctatcacagtctccaacagggacacagtctcccggagcagccatggggcggctgggtctgggctgccctccctgcttcttgccagtgtgcccaggtcccgcacacctggctgacaggagccatcctgctggcggaacatggtggccggggagctgccccagcctctggcagtatgggaagcagtggggggctggcctgtgctatagtctgaatgtaggtgcctctcaaatacgtacagtgaaacctaagccccgtgtgatgttaacaggtggggccttctgagaggaggctgagtgatgcgggctcctccctcgtgaacaggatccgtgccttataatggaggctgaagggcatgcccagccccttttcttctcccaccccctccctacgtgaggatgcagcccagaggtgccatcttggaagcagaggctgggtcctcacccaccggctgggaaccagctggtgtcttcatcgtggactttccggcctccagaacgataagaaataaatttctattgtttataaattactaattcaaaggcattttgtgatagaaacatgaatagactgggacatctgggcttcctttgtcacacctggtcaaagctgcctggtcaagctatgaatgctgtctccagctctcccttgaatctggagactggcctgttttatgttttcatcagcctctgcccgaatccctcatgagacctccatccagaacctgtacggagaaagaatgaggatgctttaaggatcctgtgtgacttctggtaaaacaagtgtactagttcacagtagggctaacaggtcacttgatgcttggacctgtgtggattcctgctgaagcaagtgtataggtcacatcagagctaacaggccacttgcatgcttggatgtcttcctcagaacatccttgaatgctctttcaaaagcatctccccctacccctttgtctttctctctgtctctgactttgcacgtgagtgtccaagctctctcggtgagtaacaatgcctggagatatttgagatcaaccattcgtgccttgaccatgcctgtagtcaaggcggtggggctgtgtggggctgtgtgtggctgcatgacatgagggagttggggctggggctggggctggggctgagggcatcgggctgctgggatcttgcctctagatcctgagcatgccaatgtccattcttattcagctcgtgttagtcaggtgaggactgggtagcatcaagaaagtgtagcctggagtttgaaacagaacatgatgaaactcttctccctgttaggattttattttattttattttattttattgtactcgaagatctcaagccaggcagtcacacagtacgttgttcggtttattgacgtttccttcatcagcaccctgacaggaaaaagatgacttgatttccatttgttttccttgccaaaataatgaagactgtgatgagtgtttgtttaatatgcaccccccactttttttggaagagaagagcaaagaaagatcaagagaggaggagcacccattaccttcatggaacaggaggggcgcgggcataatagatgcggcagccgtgggaacaggaaccagggcaccagggaaccaggggaccagggaaccagggaaccaggaaaccagggaaccaggaaacagtgaaacaggaaaccagggaaccagagaactaggggaaccaggaaaccagggcaacagggaaccagggcaccagagaacaagggcaccagggtatcagggaaccagagaaccaggggaaccaggaaaccagggaaccagggaaccagggaaccagggaaccagggaaacagggaaccaggggaaccaggaaaccagggaaccagggaaccaggaaacagtgaaacaggaaaccagggaaccagagaactaggggaaccaggaaaccagggcaacagggaaccagggcaccagagaaccagggcaccagggtatcagggaaccagagaaccaggggaaccaggaaaccagggcaccagggaaccagggaaccagggcaccagggaaccaggggaaccagggaaccaggaaaccagggaaccaggaaacagtgaaacaggaaaccagggaaccagagaactaggggaaccagggaaccaggaaaccagggaaccaggaaacagtgaaacaggaaaccagggaaccagggaaccaggggaaccagggaaccaggaaaccagggaaccaggaaacagtgaaacaggaaaccagggaaccagagaactaggggaaccaggaaaccagggcaacagggaaccagggcaccagagaaccagggcaccagggtatcagggaaccagagaaccaggggaaccaggaaaccagggcaccagggaaccaggggaaccaggggaaccaggaaaccaggggaaccaggaaaccaggggacccagggaaccagggaaccaggaaaccagggaaccaggaaaacagggaaccaggaaaacagggacccaggaaaccagggaaccaggggaccagggaaccaggggaccagggaaccgggaaacagggtgctgaggaggcaggagcagggaggagggagggagggagggagagagggcgtaagggagggaggaggaaggaatgaagagagagaggaaggcagggaagagagggagagagggagagagggagacaaggaaggaagaaagaaaggagggaagaaaagtaaagaaagaaggaaggaaggtagggaaagagggagggagggaggaaagagggaaagaaggaagggatggagggagggagggaggaaggaaaaaaggaaggaagggaggaagggaggtgagggaggaggaaggaataaagagaaaggaagccagggaatgaggggagagggagggagggagaaaggaaagaaggaaggaagaaaggaaggaaaaaagaagcaaaggaaagagggagggagagaggaaggaaggaagaaaggaagggagggagggaagggaggagagaggaggaagaaatgaagagagagaggaaggcagggaaggaggggagagagggagggagggagaaaggaagaaagaaggaagggaaagagggagggagagaggaaggaaggaagggaagaagggaaggaaggaaggaaggaagaggggaaggaggggggaggaggaaggaatgaagagagaaaggaaggcagggaaggaggggagagagggaggaagggggaaaggaaagaaggaaggaagaaggaaagaagaaaggaaggaaaaaaggaagggaaagaggaagggaaagaggaaggaaggaaggaaggaagggcaattggtactaaattcttgtagtgcccaggcactcttcccctagtgggcagggcagagagactgtgaaaggtggagatgaaggagagccatcatttcactcttgagaaaggacggagcaggctgtgtggaagagatgagatctgggataaattggaaaaggtatcaaaaaattaggagggaagaaatattttcagcaagtctgctaccacactcctcaaattcaactaagagtggtgatttaatgtaagatttatatttttattaactggtgctttgttttcatgttgatattaaaagtgcctg

SEQ ID NO: 1885328 - DNA, 4001 bp, Homo sapiens
ttcctcggtgacttcacttctttcatccctgacaataaaatgccttctttttctctatctgttccccaactccaatttaaagtccctgcacaatattttcccaggtcaccgtggctgaactcgattctttgtcctctgtaccctgtggaacttagtctgtgtccctcccgccacgtcgcctgatgctgtatgtgggagccgtcttcctggtggacagtgagctccctgggcaggcactgagtgtccctatggtatcccttgtagggtacaccttgaggatacacctcacccactgtaggtatccaagtaacatttgatccagtgaataagtatgaatgaatgaaggatattgttaagtatgaatgaacgaaggatattgttttccccgtttctggagaaaaaaatccacaaaagcctgtttgtcttggtgttgctttttttgtaccctttaacccattccacagattagcaacaacatgtatttcattggtggttcttaataaacattaaattaggccaggtgcagtggctcacacctgtattcccagcactttgggaggcagaggagggaggatcacttgagcccaggagttcaagaccagcaagggcaacatagtgagacccctgtctctaaaaaatatttttaaaaatttgctgggcacggtggcacacacttgtagtcccagttactcaggacattgaggcctgaagatcgcttaagcccaggagttggaggtcacagcagtgagttatgatcaagccactgtactccagcctgggtgagtaagaccgtctcagtcaaccaatatcaaattaatcttggtgactttaacaaagggagggaaatagaatggcagtaccttcctttaggctttaaaaatgttttaaagggcatgatagtaaagtgtagaaatatttcatataatatttaatataatcaaaactcctcagaggaagtgtgtaaaacacttccgatataccagaggaaaggtggaagataaaaatgcttttgtttacgtacaaataatatggatatatagaggactagatggggggaatactgatatgcttagggggtcaaatttcagatatatttgctgtattaaaatatttcctctttatggttaccattttatattctttactgcttttacaaaataatatgactccaggccaggcacagtggctcacgtctgtaatcccagcattttaggaagctgaggtgggcagatcatttgaggtcaggagtttgggaccagcctggccaacatggtgaaacactgtctatactaaaaatacaaaaattagccaggtgcggtggtgagtgcctgtaataccagctacttgggaggctgaggcacaagaatcactttaacccgggggcagaggttgctgagagccgagattgcaccactgcactccaacctgtgcgataaagtacaaataatgataataagactccaaatattaaataacctaaagcaggatcttttactgataagaatctgaattttccagaaagctgtgatttagaaatccaaactccaaaaagtaattaaggagtttctgctatctctgacacaaaactctttaacatcttttttgcctcgtgtctctaacttcctgcatttcactagaatgtgttcccgtctgcctttcctgatgcagtgccagtctgtggctgcagctctttttgggtgttaactgaacgcttgcccacgtgatgttctcattagattcaataggacggagaagcttctggtgcgcaccatcagacttggggagagaaggggaaagaagaatgagaatttaaacaacaatctctcatttcagaaggtttcctttttcccagaaaagtctttgagtaaaactcacttagatgttgagagcttctagaatgtaccacagagctgggctttcagtgataaaatcaaccccttctctcttggtgagtgctcctccatgtcactagccagcaacgttcctcaaacaggagaatctgtcagacactgccaaagagaaaaatcctctccctccttcacacgctgaggattaaaggagttgtaactgatgctgacaagtatacacaggcattccatgtggggacctgaggctgctagacttcctcacccacttaagtcaaaacgctgccttcttaccaaaaggagcaagttcaggtagatccagatgggctcaggagacaacaaatactacttctgttatagaattttttcccttcaagtgcaggatcaataccatgattgcagagtgcatttggtgtaaagggagtgcagcccctttgctctctggctctctggaggcactcccgtgcccttctgcctcccgttgccggatgagccatctccagatgccgaccccttgatattggatttcccagcctccagaagtgtgagcaatacatttattttctttataagctagccagtctgtggtattctattatagcagcacaaaacagaatgaaacactgcccaacccccagtacattcccacaagcacccatttggacactttgtcctcttgggtaaaaagtctttgctgataagatctgtcaccccagtgagactgagtgccttgaaaatgtcccgagacactgagtgcttcctccagcctccagtacgggaaagatcctcagagaaagcatttaatgcagtccctattaatccaaatcacacagcacagcatggaaatgcaatttggagagcaactaatctgcagtaacgacagatatggaagcaggaatatggggcaggtgttcaaaggatggtgggcagcctcagcttcaccctggttcctgtggctgtacgacaaaccgtcactcgcctttgaagacctcatccccgcgctctgtagtgctggccccaagctcctctctaccaagctgagaggtgctctcctcatcctgttgtgtcctctgcccactgtttgctcaccttggatgccatgagatcacaggccctttcttccttcctgtctctcctattatattgtgggagatactttaaggaaatattatttgtctctgtttaccctgtgcctcacagggctgacatgtagtaggtcctcaaatcctctctgaatgaaatctgacacctcctttcagcaagtcaatgaatgtcatattgaaaactactctttgatgctcaagtatttttctctggtataaataatgcttgaaataatggaggcaaggtagtggccatttactacataaggcaaagttagagaggaataaattaaattaaataataaatagaatgaaattcccaaaatacctttttcaagctaatgcttactttacagatgataatactgcaagtatcaggcatgaattaatgttctttgtagctgagacctgtatttccaatgcactgattttattaaattcaactttccttactgtggtaaaacaaacataaaattcaacattttaaccatttttaagtgtacagctcagtgatattaagtatattcacattgtcgtgcaaccatcaccactatccatctgcagatttttttatcttcccaaactgaaattctgcacccattcaacagtcattccgcatcttccgctctccagctcctgcaaccaccgctgtggtttctgcctctatgaatttacctaccctagtacctcttttttttttctttttttgccacagagtctcactctgtcacccaggctggagtgcagtggcaggatctcagctcactgcaacctctgcctcccgggtttgagcaattctcctgacttagccttctgagttgctaggactacatgcgcccaccaccacgcctgcctcatttttgtacttttagtagagatgaggtttcaccctgttggccaggctgatctggaactcctgacctcaagtgatcctcccgcctcagcctcccaaagtgctgggcttacaggtgtaagccaccatgccccgcccctagtacctcttataagtgaaatcatacaatatttatccttt

SEQ ID NO: 1885329 - DNA, 4001 bp, Homo sapiens
aacttcagagatttgtctctgtatattttattttacttcaccatacgttatgatacaaaagaaattataacatatgagtataaagtgaattttgattgtttacatcccttattggtatgaatagcaaaaacataagttgctgtctcattacaatttgagacccttaattctacatatagaataaagactttggtggttcattgagtaaaacattcataggtgttttatatgtatatgagaatatacttgggaacttttcttgttgcttcaaaattttactagaacttcaaaacggaggataaagcacactactgcgatcaggttttaagtaatggtgctaaacaaaatttggtgagtcaaaaaatgtaaaagattgccattgccattcctctattagctctatcacacatctactgttcaaataagggtagattagatttctgaggagattctttaaggaaattatagatgcaaagagatctggcattttattaggaaaagactggatatttctgcccattcttttccccaatctaaggtgggcattcctgggaagcctcccatagacattggggttgtcatataagaggacattttatctcacactcttcccatatatgtgcaacactgttgatacctatatacacattcattgggtgaggaggcaagatctggtatttatttctcaaatgggaaagtctgaagacagtaggtgactcgatgataacaaggcactatgagaggggagccattagccaagctgcgtttttactatttactaacgtcgagggtacattttattttattgaggaaaagacggacagaggaagatgaggaaactgaagttgtgatgaaagaaatctacctaagttggcagccagctagagtgaggaaatttctaccaaaagaagctatgattgaagtcctagaagcaggaattgagcaaagggtttaagagactgtatctcctatcacatcagccaagtaaaaggaaaattgcacttttacttatgccccttctgtcttctttaaacctggagtaaccacaaatgtccactgtgggggagagagagaacaaaatttgaaagaatccacatttctgcaactccccacatccacctctgcaactgctagtctctaggccactggtcaggcctctactgagagaatgaaaggaaactcaaagtgaacatgagttttaagttttgatgtagtctgttcttaaataagtctattctaacttgggaggccaaggcaggtggatcacttggggccaggagtttgagaccagcctggccaacatggtgaaacctcatctctactgcaaatacaaaaatcagtgaggtgtggtggcagatgtctgtaatcccaggtactccggaagctgaggcaagagaatcacttgaacccgggaagtggaggttgcagtgagctaagatcacaccaacttattccagcctgggggacagagcgagacacaggaaagggaagggaagggaacggaagggaagaggagaggaggggaggggaggggaggggaagggaagggaaaaagaaaggaaaaataaagaaaagaaagaatctattctgatagctatatgttaataagaacctttaagatttgcttgagatgggctgggcacggtggcttaccactgtaatcccagtgagaggtgacaatgtgttagcagccctggctccctctcagtgcctccttggcctcagcgtcctctctggccctgctcaaatagctcttctgcccgccacagcgctgtggggcccctctctggggccggccgaggccggaaccagctccctctgctggctgtgaggtgtggacagggaggcacgggcgctcctgggccggcgagggttcctggtgggcacggacttgccaagcccctggcggtgggactgccctggctaggtgcaaagtccaggggcaaatgccaatgggaggtgaagctggctggacttctgggaggggtggagtggggacttgcataacttttgtgtctagttaaaggattgtaaatgcaccaatcagcagtctgtgtctagctaaatgtttgtaaatgcaccaatcagctctctgtcaaaacggaccaatctgctctctccaaaatggaccaatcagctctctgtaaaatggaccaatcagcaggatgtgggtggggccagataagggaataaaagcaggccaccggagccaggagccgcaaccaattcaggtctgccttgggggtgttcagtgttttttattttgctcatcacagtgaattttaagactgctcagtgtttgggtctgcactgcgtttatgagctataacacttactgcaaaggtctgcagttttactgctgaagccagtgagaccaggaacccaccttaaggaagaaactccagacccatctgaacatctgaaagaacaaattctggacacaccatctttaagaactgtaatcctaactgcaaaggtgcgtggcttcattcttgaagtcagtgaaaccaagaacccaccaattccggacacaccagcacattgggagaccgaggcaggcagaacacctgagatcgggagttttgagaccaacctgatcaacatggagaaaccccgtctctactaaaaatacaaaattagctgagtgtggtggcacatgcctgtaatccagctactctggaggctgatggaggagaatcgcttgaacctaggaggcagaggtggcagtgagccgagatcgtgccattgcactccagcctgggaaatgagagaaactccgtctcaaaaaaataaataaattgattgtgatgtcatgaaggtgcaaagacagttaaagattactgatattgttacaacactgtgttgattgtagtagtgggagaaaatactgttttctgattagtttatcagatatagctcattatatatgtggtgagaggtatgagtgtcttcattttcaaatcataaaaaactgtagggggtttaccaagacttaaaacttgtttgttaagtctttaaagcctttgctatattttactaggcattctatggttcctttaagaattttatagctcatcattttaattttatttagtttttaccatatcaagtgcaagctcagataagttttccagatctttcattagtgtcaagtcgtgttagctaaaatgcacttcaaagtagtttctaacgtttatatatacttttcagcaaggccagacttctgactaccccatgatataccttccgtattcctgtttttaagtttgcctgggctggttctttctttaatagcaatttgtcacttcttgtctgcctattttgaaggtatacaattttaagattcagctcaagctgggtttcccaatacaaaagagcttaacatgacttgttcttttccacgtaatgtagctatagtattaacaagctaggctttgaaagaaaagtaaaagaaaattttaaacattgttgaaacatgaccacaccattacactcatttgaaacaatttatttaccagtgagacataaattgtttttgttgattgctattttgtagtataagtttggattggctaagtattgcaagaaagagaaagctgatctgggaaagacatcaaaataaagaggagttgtatgctttaaatataaaaatataaagcattaactatattagaatatattttacaagttcttaacaatcatagaattctagaaatggaaattggaagataaatatattattagtggttagaggaaaatgaaaaatctgcctaatttccagatggcagttttaattttatttccctgtatctataaaataaaggtattattagattacacacgtatttatatgtacatagctgtactatagtgacataaatatatttataatatatattactatcacttaggtataatgattaatgactactaattaagaactgatccgtgtagatcatttacatgaaaaacaaagaaatatatgctaaaattacatcatg

SEQ ID NO: 1885330 - DNA, 4001 bp, Homo sapiens
tattttcatgttaaagatatatttatttgttttttttttttttttttttttttttttggagacggagtttcactctcgttgcccaggctggagtgcaatggtgcgatctcggctcaccacaacctccgcctcccaggttcaagcaattctcctacctcagcctcctgagtagctgggattacaggcatacaccaccacgcccagctaattttgtatttttagtagagatggggtttctccatgttgaggctggtctcgaactcctgacctcaggtgatctgcccacctcggcctcccaaagtgctgggattacaggcgtgagccaccgtgcccagccatatatttatttgttaaacagatttgtttggggtccacttgcgggacaatttaggactataaagtaaagaagtcacagttcctaactttttatgtgtcaggaggtgagggtaacaagatgtggtacttaaagaaaggcagactaaggaggtagatggagatcatacagcagatgcaatgggggttgaccatggatgtgcagctgaccataaacctccaagtcacaggcaggcaaaactgtgccaccagtggtagggcagaggcctcagaggaaagtgtgggagtcagaaaagcgtgacagaggtggggtcagtgatgactcagaggcacaatatcatctggatcaagagcaagagttttagactcaagcagacccaattggtttgaaatgtctgccaagtcaggttatctctctaagctttagtgtcctatcttttttttttttttttaaaaaggacattgataggaattcctcatagatttattgcaaagaaaaatgatataatgcatgtacagcacttggcacaaggcctggcactgagcaaatcttcaaagacaattggctgcttttaaaaaactattttagtatagaaagaggaggagggaaaaaaaggcagaggaggaagtgaaggaaggagagcagaggagcggaggaatgggaggagatccaggaaggctgttggttgtcgtccaggagatatgcccctgaatagctcagggttcctgagcaaagctcagcacattagcaaagagtaaaccggggagtaaacagaatgtgccaagcctcatacagagacttgagctgatactgagagggaaagcaaggacaacacatccatttaaagctctgaaataaatcatgctgcaaaatgcctgggaaacctccaatacaccctggagcctgaagcacaagttaggcagccatcaaggggaattcagataataactcatgaaccctggggtacttcccagagcaccatacccttcatccaggggagggacaatccggggaactgtgggatattgtcctcagtttgttctgggaatctgaatgagacccactttgcagaggagtaatcactgagaaaagggaagtaacagctctgggaaaattagataacatcttgaggaggtccaatagaatgggaaaaagacaaacacataaacaaaaactgtatgcagtggtgcaagatataagagaaatatataccagatatatagggagcctagagaggaccatgataagttctgcttgggcggagacaggataggcttgggagactctccaactctgaagccagactttagagcataagttcaccaggatgagagtagaaggcaggtacattctacgtctgttttgtgaagtgtccttatgtgccatatgtattgctaaatcagtttttaaaaatatcttgttcactgtgtaatgggtcacaataattacatgatcttacatataatatatttatgcaagtatcaacttactgtatacggaatactcccatgtcttctttaattcttatgataggacaggaagataggtctggttgtccctaatttcgcaaaatgaggacagagtctcagaggatgttgagctgcatgcccagcgttgctgcagtttgactgagaccagctgccttggtattcattcatattcagcaaacatgcactgagtccctactctactgccaggcgctctgctagatgctgggaatacaaagacaatgctcaaatgaattcacagaaaggagggggaaacaaatatataaacagaattaaaatacaatgaagtaaaacctattatatggatgtgcatgtgattgctactgagaatatgcacagatgagcataggaagagctacacagaacaggtgccactgaacgacatctagaaggatgagtaggtgtttagggggtagaaaagagaaaggctgttccaggcatgaacactgcacgtgcaaagccggagaaacacaagagagcattacgcggggccaaactgtgagaagttcaggaaggattgtcctgggttgctgatgaaagacctagcagccagatcaaaaacagtctttgtggctgtgctctggagtttgaattttcatgctgtaagtggctgggatccactggaggattttaattgtgtgagtgacaagatcagatttgttattcagaaagcacactctggcacagttcagtgggtggaatggaaagtggttaccctggagacaggcagacccattaggaagctatgacaataatccaggagagagaaaatgaggatagtggttggaagaacgggcagattcaatgactttctggaagtagaactgatggtcaggagagattcattgggtataaatgctgaacaagaggaagaatcaacagcgatggcaggtttctggctgggatttctaggtggataagtaaatcattaaccaagatgtagaataccaaagagttagcaggttggagtagaatattataaatacatatgggagaagttgaattttaggtgtctctggaacctctaggtgaggatattatgcacagttaatatatttagaattcagaagaaagattgactaaaggtatagatttaagagtaatcatcaaatagtttgttgttgaggttttggcaatctccaaaactacaggatctgggtaccactgcttctactcaattcatttgaaccatctctgaagtaagtactagctcaagctttgttccaaagtacaaattagcatagcagctcagtaaacaatgtctctgagcttctggaaagaaagatgttcagtcaccataaggcccagaattaatgaaaagtcaaagaaataatagctctattctctagttgcttttgaacctcaaatcactctttggcaacaaggtaagaatttacagaaactgctgaaaagaccttctggtaaataggacagcaaaaagagtttgtttttaatatttgttctaaaccatgtatgtggtcatgttttgaaactgctagttcacatacttgacctgaattcctttcctaactggaaagtcaattttgattttgattataggatataattccttgacaaaaaatctttttttttaaaaaatttggcccttctccttatgctttttttttttaaaaaaagatcaaattgcaggaatcagatgatatatgcttatataatgaatgtggtttgcctatattttaatcagaagacatttgttagaggaaagatatttttgcttactcatggacaaacatcaacaacacaaatttaaaaacacatacgtggaaatgatttttttctttcagattaagtggagatgaccatgatgttacagcagagcattgccagggcatcactgtcattaatgctcggcaaaaacactaaagatcgattatttatctccaaattgtgatatataggaaacaatcactatcattatattttctcttcccattcttatgcatcctaatttgagtcattgtggaaagagtaggggtcccatttgccatggcatatgcttgcgacatgtgggtcccctactctttccacagtgactcaaattaggtaagtttgatgttcatgccatgttcactagcatgaatatcaaacttaccggtagtatgtaagaggaaggaagattataacaggtgctttacata

SEQ ID NO: 1885331 - DNA, 4001 bp, Homo sapiens
ccgggaacagaaagaaagcaggtcatttgcagtctaccggagcctaagggcagaaggcaggtgagggaattcttaggggctgtggggttttgtagactctgcatcccaaactttgcagtattagccaagcctttgtatgaggtcacaaagggggcaggtgagggaattcttaggggctgtgcagttttgtagactgtgcatcccaaactttgcagtagtagccaagcctttgtatgaggtcacaaagggggcgggcaccgggaacctttggaatggggatcccaagaacagcaagtctttcatgacttaaaggaaaaacttctggcagccccagccctggggctacccgatctgacaaagcctttgccattgtatgcgttagagagagaaaagatggcagctggacttttaacccaaactgtggggccctggctgaggccggtggcctacgtctctgaacaactagacagggtttctaaaggatggcctccctgtttgagggccttggcagcaactgccctgctagtacaagaagcaaataagctgactcttgggcaaaacctgaacataaaggccccccattttgaggtggctgagagccagccccttttccccccgtggctcttgggacccccatcgcaggggggggtggcaccccctgcgaggcggggactgaaagccagcccctcttccgccacaggctcttaggaaccccatcgcagggagggaggcaccccccgtgtggcggggactgagagccagcccctcacccccaccggctctcaggacccccatcgcagggcggggaggcaccccccacgaggcagggaccgagagccagcccctcttccccctctggctcttaggaccaccatcgcaggagggggaggcaccccccaccccccacgaggcagggactgagagccagccccacttcccccctggctcttagggcccccatcgcaggggggggaggcacccccggcgaggcggggactgagagccagcccctcatcccccccggcttaggacccccatcgcagatcctaagaaccttaggacccacctgggggactgtgggtattaggtgtccaagaagaaagctcaaatctgccgagggcaggtaccttacttgggatttactatccgacaggggtccaaacgcagcccgggaacagaaagaaagcaggtcatttgcagtctaccggagcctaagggcagaaggcaggtgagggaattcttaggggctgtggggttttgtagactctgcatcccaaattttgcattattagccaagcctttgtatgaggtcacaaagggggcaggtgagggaattcttaggggctgtggggttttgtagactgtgcatcccaaactttgcagtattagccaagcctttgtatgaggtcacaaagggggcggggaccgggaacctttgaaatggggatcccaacaacagcaagtctttcatgagttaaaggaaaaacttctggcagccccagccctggggctacccgatctgaccaagccttttccattgaatgcgtcagatagagaaaagatggcagctggacttttaaccgaaactctgggaccctggctgtggccggtggcctacgtgtctaaacaactagagagggtttctaaaggatggcccctcatgtttgagggctgtggtatcaactgccctgatagtacgagaagcaaataagctgactcttgggcaaaacctgaacataaaggccgcccattttgggttgggtgacagccatcccctcttccccccctgccttaggacccccatcgcggatcctaagatctttaggactcacctggaggactgtgggtattaggtgtccaagaagaaagctcaaatctgccgatggcaggtaccttacttgagatttactctctgacaggggtccgacgccacctgggaacagaaagaaagcaggttatttgcaatctcccggagcctaagggccgaaggcaggcgagagaattctcaggggctgtggggttttgtagattgtgcatcccaaactttgcagtattagccaagcctttgtatgaggtcacaaagggggcggggaccgggaacctttggaatggggatcccaagaacagcaagtctttcatgacttaaaggaaaaacttctggcagccccagccctggggctacccgatctgacaaagcctttgccattgtatgcgttagagagagaaaagatggcagctggacttttaacccaaactgtggggccctggctgaggccggtggcctacgtctctgaacaactagatagggtttctaaaggatggcccccctgtttgagggccttggcagcaactgccctgctagtacaagaagcaaataagctgactcttgggcaaaacctgaacataaaggccccccattttgtggtggctgagagccagccccttttccccccgtggctcttgggacccccatcgcagggggggtggcaccccctgcgaggcggggactgagagccagcccctcatccgccacaggctcttaggaaccccatcgcagggggggaggcaaccccccacgaggcagggactgagagccagcccctcttccccctctggctcttagggcccccatcccaggagggggaggcaccccccacgaggcagggacgcagaggcagcccctattctgcccccggctcttaggacccccatcgcagggggggagacaccccccacgaggcggggactgagagccagcccctcttctccccctggctcttaggacaccaatcgcaggggtgggaggcacccccaacgaggcagggactgagagccagcccctcgtcccccccggcataggacccccatcgcggatcctaagaaccttaggacccacttggaggactgtgggtattaggtgtccaagaagaaagctcaaatctgccgatggcaggtaccttacttaggatttactatctgacaggagtccgaacgcagcccgggaacagaaagaaagcaggttatttgcaatctcccggagcctaagtgcctaaggcaggcgagagaattctcaggggatgtggggttttgtagactgtggatcccaaactttgcagtattagccaagcctttgtatgaggtcacaaagggggcggggaccggaacctttggaatggggatccaagaacagcaagtctttcatgacttaaaggaaaaacttctggcagccccagccctggggctacccgatctgacaaagccttttccattgtatgcgttagagagagaaaagatggcagctggacttttaacccaaactgtggggccctggctgaggccggtggcctacgtctctgaacaactagacagggtttctgaaggatggctcccctgtttgaggccttggcagcaactgccctgctagtacaagaagcaaataagctgactcttgggcaaaacctgaacataaaggccccccattttgtggtggctgagagccatccccttttccccccctggatcttgggacccccattgccggggaggcaccacccgtgagagtgctgggattacagacgtaagccaccgcgcctggccaataaatgttagctttttaataatgtatctctggtagttgcctgcttcactagccctacacacacacacacacacgtgcacctgtgcaattttccctggtcagcattgatgacagtgaataagaagaatagatatacattgtttcatgaacctttgcagtgtttgaggttttataaaggcacaggtccagttatacagacttgtgccatcaaacttgtgcagctttaaatgagtatttttttttttggctgggagtggtggctcatgcctgtaatcccagaactttgggaagctaaggcaggaagattgcttgagcccaggagtttgagaccagcctgagcaatgcagtgagatcccatccctaaaaaataataatttttaaaataagaacaattaatttaaaa

SEQ ID NO: 1885332 - DNA, 4001 bp, Homo sapiens
ggaaactcagaaaaggctgtccaaattattctggcagagaggagtggaagaaacaaatgccatttaggttgggtgcagtggctcacacctgtaatcccagcactttgggaaggcaaggtggatcacggggtcaggagatggagaccaccctggccaatatggtgaaaccccatctctactaaaaatacaaaaattagctgggcggggtggtgcgtgcctgtaaccccagctactggagaggctgaggcaggagaattgcttgaaccagggagtcagaggttgcagtgagccaagatggcgccactgcactccagcttggtgacagagtgagattctgtttcaaaaacaaaagaaaaagaaaaaaagacacaaatgctgttaaaaaaaatttaaaagacaaaaacaaaaaactgtggggcccggcgtggtggctcacgcgtgtaatctcggcactgggggagaccaaggcaggcggatcacctgagttcaggagttcgagaacagcctagcctggccaacatggtgaaaccccatctctactaaacatacaaaaattagctgggcgtggtggctggcacctgtaatcccagttacttgggaggctgaggcacaagaatcgcttgaacctggaaggcggaggttgcagtgagctgagatcctgccactgcactccagcctaggcaacagcgagactctgttgcatttaaaaaaaaattgtggtaaaatatacataatagaaaacttaccgtctaaccatttttaagtgtacacttctgtgacattagcatatttgcattgttgtgcagtcatcaccattcatcccaactttttcaccaacccatactgaaaccgtatgccattaaacagtaaatccccatccctccttctgcagactctctctacaaccactgctctactttctgtctctatgaatatgacagcaccatagtattggcggtaaatcagagttggcaaatgcaatctgaagcagaggagaggagagagtcatatccctcaagttttacagtcccattaaaagtattagtactttgagaaaaggaccgtcacgatcatggggagaatgaaggaaaaactccatttctttccagtttgcaactggaattgtcactttcgtctttcggcacgacagcgcccaggccacaaaagcccacagggcagggcctccattttgtggcctgcgtggagggcggggcggtctctctccgccacgccccagcaccgggtagacaccgcagccacgtaaccaaggaaccccgaatgaggcgttggccaggtgaggccggatccggaagtagggggaccacttcgccccgcgtacgagccccgcccccggcccctcccaccagacccaggccgacctagatgacgtgtccgagtaggagttggcgaggtgcggccgggcggccggccctgcgcatgcgtgatacttgcaccggtcgagatggtagcatgagtctggaggtcattttctttgagaaaggctccgcttctccgggtttttgctgatgccgatcccgggggattgaggaaacattgagctctggagtggaaaaggttgcagacttttagactcccaagtcgttgtagtctcaatctctagtggctgcgttactgcaggaagtcacggaagcctctcccctttcttaggcgcatccttggctgtaaaaggaggttaaaagcccctggaaaacctcaggtttatttcagctctgaaagtccggttccaaatttagatccagcactcttgtggcctggccagtgatggtcgtggagtgctttccccgcgcctgcggtctctaggctctgtggatgtagaggtgtgggatgtaggagcaggcccttacccgtggaattcacatataaatgggggaatgagacagcaaacaaacaaacgtgatccttcctgatagtggtaaatgtgggatgccgaggtttaagcagacgagtggtattaagggatttcaaggttttataaaattgattttgccaagagtggaagctgagaggctactgcagtaagaagtccaggggaactaagaatttggcttggaccagagtggtagctgtgggcatggaaagtactgaaaggatttagcccatagtttagcagcccaaccaacgggacctgctgaaggactggaggtaggtagtgaggaaatgagaaatttaggttcttctccagggttggggcctgaaaagagatgggcagcgatgccgtttcctggaaaactgggagaggaaatgtttgggatgagggcagtgagatataatgaaggtcaagttttttttttgtttttttttttttttttttgagacggagtcgtgctcagtcgcccaggctggagtgcagtggcgcgatctcggcttaccgcaagctccgcctcccgggttcacgccattctcctgcctcagcctcccaagtagctgggactacaggagcccgccaccacgctcggctaatttttttgtatttttagtagagacggggtttcaccgtgttagccaggatggtctcgatcttctgacctcgtgatccgcccatctcggcctcccaaagtgctgggattacaggcgtgagccaccgcgccggccgaaggtcaagtttcagtggtgctaggaaaagaagatagtgagcaaaaatgttaatttttgtttcctcctcttaatatttggagaaaacgtctgcttccttttgttatattggaaatctccatgacttccaaatacagaatattttacaatttttccctatcccaaagttcagcgaatatgttgatttatttgagggagaggacatgaaagggaagccacctaggcacaattttctgctcaggccctaccagattagtttttgttatcaaaaaaaaaaaaaaaagtgccattccttgggccaagctatgtgctcagcactttccctccatttttgatttaatcttcacaacaaccttaagatgaacgttcttttctacttcccagttctcttgattaacttggctaccccactatatggatcaatttgcagggtcctaggtccctttgaaaatctgatgaaagttataaaccttacctgggaaaaaagtacaaacacccgcaagaacttgaaataggagttcactggccctcaactttctgagcttactatttcacaaacctgcctattcttgaattctgagctggaggtcatgattctctcttatgtactttaagatgatgcactcttccgaagtttttgattgaactctagtggctaactgaattgactttttcagatcactaaaaagcttctccttgaaaaatactcagaagatgcaacacacacacacacacacgtgtgtgcacttacacacgcggacaccgtctcacatcatcagtgggaaaagtgatagaatcttgctaaaggctgatcataccatattaatccgattcgccagaactactttcttcactgagctctcaggtatgctcgggtcttcctttaaagaaaataaatgtcaacgctacactctatcctactcccattttcctcctcaccccatttccactctcccttaaagagatgtgtgcacacaatcactgcccaatgcaagaatgcaccactgcatccaatgcttggaaattgtccgtgaagatgcctttgagtagctgtctatttgaggatttgtggctaattcctccccatttgtttccttagcctgctcccaaccaggtgtctccagaactttttctctccgccaccaactccgcctccagacagaccgcaggtgctttctgtcatagggactggcgtgccgcggacagtgtgacaaagaaactgtatgatggatatgagaacttcgtaagacccagcagcaaacggggagcggctggcgagcgctccacagcccccaagcgtgggagctctagatcggaatttgtaatttggaattggaacgtgagcgccggaacagctctcccagcaaccacctctcccagcaaccacc

SEQ ID NO: 1885333 - DNA, 4001 bp, Homo sapiens
tttgaccaagagcaggcttaattttaaaacagggaggtgatccagtttataccaaaatatcaatatattcaaataataaactaaattagcccttctgtttaaaaaaaagatcttatcaaaatgctaaccactgtggcatatctgcaaagagaaccttgcctaagttcaaaattgtccaattccatagagaaagctgttatctagttttttaaacacctgtagcttccctacctccacagtttatcccatctataattttcaaatccccacctattcattttccactatctcgtttccacttgaaaactgaataattaggaaagtagatagatacatacatacatgatatctagatagacagatatccatagataaaataataaaaatcccaatctctagctagataaagagtattgttcccagtacacatttcagttatcttaaatgtttgttttttttgtgggtttattctttgggtgggaatgtattggttttggtttttatttttaacaaagacaaaagagaaagaggagagaaaagacaattgcacatttctaagtgttttatcagagcctcagtgtagaggttgtgttatgatcccgagtggaaatttgttttcatcacaaaccacctcacagtatgataccatttatcatgattgtcatcctaggctcaagggagagcagaaatagaattctagcagctctgtgcataaggacctatgtactcaagcgcatgggtaatcctcagtaaaatcgttgccatcattgggtgccagccactggctactgacagtagttggccccagctgcccaacttttaagtagttggtttgaattcacatcaattgataaatatttaggtcaaaaatcactcaagcgcataaacataccaccccaaactcaacaacacaatactgcatgcatttccaattctttatatagacagggcattttacagttagttctccctttttcttctttttttttaactgcattttaatgccccaggtttgtttaaacttctgtcagaatgttgacttggactgagattttatttttaattcagaaaagaagaggatataatgtctttaaaagaagaaggaaattcggagagttttctgcaattagcaccatagaagtcagttaagatgccttctggaaatttccaatagatagggggtaagttagaatggcagcaggcagcaaatgaaaacagcacttggcaatttgggaatcctttttttgtgacaaactatctggtaggcaacaattttggctttctctaaacttgtataactcgctgttattttggctgattttgatcattagcacaattgcacatagagaaccgtcagtcaaattaacttaaggctgaattcacgcctactttcccacctcattctacttaagtactttcagaaatcccatctttacttctagaaacattgaagcaaaaagagctagaaaggaaggtagccagactgctacacctcccctccttcccatcattatagatcaagcacttaaagtgaagtttagacctcaagtctctctctccaattcatgctttactatagactggattttttacttcaagtttatctggctaaaatataagtacatattcacatcactaaacagaaagacaatggtccacaaacatgctccactttctatgtttactaccttaaaaaattgtatcattatccagttgctcaattcatagcctaggtccttttcttccttctctttttctatggtaacacttaactaatcacctttttttttttcaaattttctttcttccatatatcttgtatctgtccatctttttcatgtgccaacaccatccaattcagacctcagtcattcctcacctgtttattgcaatagctgtgaagaaacttgcttccttgggccaccctttcacattaattctacgatgcagttagtcatctttccaacatgaaaatctcttcacgtcacttttacaaagactctgcataaaatccaaatgacatggaataatgaacaaacccttcatggcttgtcctagcaaacctctccagcctcatttgtcacttccttagctaaccttgagccccagtattcggctactcacaggtccctgcaccagccatgatttctttaccctcttgtcattttccctatgcctggagcttcgactccttcccctgcttcagttctttctcagtttcttgtagaagtcagttcttgcagaaaacctgtgaccgtagaaaacttgtgactgtatctccagcagggcactgtgaatcctgtgtgctccttaaagaatttattgcaaagggggcttacttttatataccatctccctctatcttaaaagctccttaagagcgggaattctgtctttttaatcatcatttattactgaatcctgagtatataatgtaacaccagggccatagaaatttcatgctttataaatattgctcaaagaatgaacgaagagatggcaaaggaagatgtcttagatatcaatattacagttgtgttgccgttgctccagtgaggtcttggggaaattattcaccccgattggatagctttagctctttcatctttggagtgaatatttagtgaggacaacccactccttaactgaacgatattgaggtggtaacaagaattccatccacatttttactttccagtgtttggggcaaattcagtcattttgtaatcataagtagaaattcaataacttgttttctaatcaaaactagaaatccatataaacgcaaacagtgaatcctttaccaaaattacatacaagtcagcattgaaaataagaagtggttttttagaccctatgcccttagaaaaagatggctcttattttttaaatggattatgttctgcaataaagcctatgttgtatattttcctaggctacaaacatatgtcataatgtacactgtctatttgtactataagtcgtttgctttaaaaaaataaaaaggttgatttttaagctttctatctaaatctctatttggttctcgggctttttgctttacttctgtgaagagatagttcatgccactttggtactttctaattttcttcctgtgcttctgaaagacaactatctgtctccttttgtaaagctattcatcatgaaattataacatggtataggttgagacgtgccaggatatttcactgactatggggacactcagtaacagacctctttattatcccagaagtcaaagcccggttttaaaatgtcaagtgtctctgcaatgcctacttccaatttactggggaagcggaaagaaagattagaaagagattaaatgcatgggtatttagtaccataaaaaaggaattagaaaaattgaatttattagaattaaaattattataagaaagaaccaaaccatggtagtccttggaatgccaccttctcattttgaatttcttgagatggaacatgaattagcgactatctaagaaattagaaattagacatcctgggccttagaaacttttggtttttatatctataaaaaaaaggccacatcccaagttgtacttacattcttacttaatcaaatatgttttttaagatatgcaaacacaattagaaggtgagtaggtaatttggatgcctagtaatcaacatttagttataatttatgatatcttaattagtttccttataatttaattgatgaaaattatttacatgtacaaatagccactgactgtgaaagctagtggagccaagatccaacttatattattttcccaaccaataaacaaacaaacaaacaaaaacgcttttagcaaccaaattatttttgtagtctattgtttaggacatccgttctgtttactattacagtgtaagaatgctgtactagggaactgaaaaactgttattttgaagaacggagtttctccccctcagtactactgacatacgggatgagaaggttctttgtcctg

SEQ ID NO: 1885334 - DNA, 4001 bp, Homo sapiens
taatttttttttttttttggatttttagtagagacagggtttcaccatgttgtccaggatgatctcaaactcctgaccttgtgatccacccgcctctgcctcccaaagtgggagagtgtccttttaaaaatgatatgtatattgtaccatttaggggtgaaatctcctatctttaaaactctccaccaggctcagcactttgggaggccaaggcaggaggactgcttgaggtcagagtttgagaccatcctggacaacatagtgagacccctctctctacaaaaaatacagaaattagctgggtgtggtgtcacttgcctgtagtcgcagctacttgggagtctgaggcaagaggatcgcttgagcccaggagttcaaggtcacggggagctatgatggcgcaactgcactccagcctaggcaacagagctgtctcttaaaaaacttaaaaaacaaacaagaacggctgggggcggtggctcacgcctgtaatcaaagcactttgggaggacgaggcaggcggatcacgaggtcaggacatcgagaccatcctggctaacacggtgaaacctcgtctctactaaaaaaatacaaaaaaattagccaggcgtggtgacgggcgcctgtagtcccagctactcgagaggctgaggcaggagaatggcgtggacccgggaggcggagcttgcagtgagccgagattgcaccactgcactccagcctgggcgacagagcgagactcctcaaaaacaaacaaacaaacaagaactttgggaggccgaggtgggtggatcacctgaggtcagttcgagaccagcctggccaatatggtgaaaccccgtctctactaaaaatataaaaactagctgggcatggtggtgggcgcctgtaatcccagctgctcgagaggctaaggcaagagaattgcttgaacccaggagacggaggttgcagtgagccgacacggtgctactgcactccagcctcggcaacagtgagactccatctcaaaacaaaacaaaacaaaacaaaacaaaacaaaacaaaaacaaacagaaagtaaatacaatttaaaaaattaaaaaataaaaccctccagcagaaaaggtgatacataaggcaaaaggcaaacagttgttaaatacagacgctaggttttagatagtattctactagtctctgctctgtatctgacgtttttcttcataaaaacaaccagaaaaataagaacaagagtttgctttcgtttcagcagagtaagaaccggtctttgtcttccgccaaagatgaagccatcaacctgtggcctggatagtgcctcaggagcgtggagtgagggaccagggagctcagacagatgagtaggctcctttgtggagacctgatttgagcactggtgtgaaaaagacccgcgcaagccgacccgtgtgcctcccgccccgcccccaaccccccggccctgcacacctacccagggccgcggcggataccgcataacctgccacctcgctgtcccctgagtgtcctcaaaccacgaagggtgggaattttgacgctcaccgcgagggcgatcatcaaacggcctaaactgggctgagcgggcgggaagtggggaatgcaaggaaccctccagcttgctcgaaccctcagccgcgagccggggtggaggggcagggaccctccttccaccgcacccacctggaagccgggcggagcggggccgaactccgccggggggaagcggcagcacgtgccaaggccacgaccctcctctgccgccgggagggcccggccgccgcagggggcggggagcgtgggaggggacggcgctcacctggcggctgggccggatcgcggcgggagagcgggtagcgggctcagctggccggggctcaggtgagggcggcgggccgcgctccccagcgggggaggtttcttggccgggaaaggtacaattgtgtgcagctatttctggtatgtcaagcgggccgggcggccgcgagccgggaggggcgccgctctcaggggcccgggagagggcaggggccaggcgggcgggtgcgggaaggatgcgggcgcgggggcgcatcctctcggggcggagccgcgggctgtgcgggaaccccagcggggcccgggccgcggcccctggcggactgtggcatctcccgggccagacagtctgaccacagaggcggccgcggccgggagcccggggagccaagggaggggcagacggaagcggcgactcggcgggccccgggagggcggtggggtgggccggggcggggccaccgcggggaggacggcggcggcgctgcgacttttgaagtccaaactgtcgtcggggctggtgccgcgcgctgccgctgggcacccgcttcgcttcccgcgtcctgcctgactgcccgggtccccgcgggccttgggtcgctttcaggagtttagagaaagccaggtcttcacgttcgtgtaggttcgagaccttaacgaactgcagagcgcaacaaagggaactagagccccggcgccttcgcagccggagcggaagccggagttgtgggaggcccgcgtgccctccccgcccgtggggcccagacgcgcggggacaacccctcccctccacgcatcccgagtctctctctccctcccttgtcctagccatggaagggctggaggaggcagaggccaactgctccgtggcgttcgctgaggctcagagatgggtggaggtgagtgcctttcactgctttcccttccgcaggtgttgactgcctcggggcggtcgtcgcgaggtgactgcagccccagtcactctgcactttagcctccttcggcgacccagccgacgtgaacaagctggtttgcttgtgcacttttggggactctgcgggttctgccgctcctgcatcttatgtcccgcttagattggcgctgccctaacccccgccccccgacggtgtcactggcttcctagggcagaggtgggcgttcgcctgccggcatcgcgcgtcccggaggagcagcgcagtccgccctggctcgcccggggcgtctctgcggggcacagcccagagcgcgcggtgcagagctgggccagggctctcgggtgcattccctcggggtgcctagaagtggggatgctcaccttatacctgagaagccagtgtattcagtgtggagggggggagcggaaaagaagggtgggtgggagggcaggtggaggaggtaacacaccgaaggcccacctggaaggatgatttctctggggccgcatccaagcccagggggtaggggccggggcatgtgctttttcattttcggctttgatgagactgagatcctaggatcattcgctgaagagctgttaccctcccagctgtgcctcacagacaagatcttccattcccttctttcaccctgaaaaagagcgggtctcttcattaacgccttggggctacatttatctgtagaaggttaacatcaggacttctagccgttattccactggacgcaaaagatgacttttaaaacgaggcaaaagtcttccaagcagatgtgaatcaggaacaactgctgaaaattgaggcgtgcacaagccctgcagtcatttaggagttattgatgccacgtgctggtttagttaacatatttaaaacttcgaattaggcttaaagattattccacggaaaaaactacatgtttaagaattccaaagcgaacgatacttgaaaataatgtatttttccttaaagaaatacatgtatgtgtgtggaaagaaagaataaattacatttcttacgctaaataaaggaatgtgaaatgtgagtagcattaaccacgggacagtagggaggtctaaggaatgagcttttagtgtctttttagattgaaactttgagctggtctgaaggtgacttagaaagatgtgaagggaggggcatgggaagttgagagaagaataaacgctgtattttgaattgaaatgagagtggaaaaat

SEQ ID NO: 1885335 - DNA, 4001 bp, Homo sapiens
cacagcccacctcttctttgtttgctagcaatcagagaaatagcacagcacatgtttggactaatcaaatctaataatgaattggcacttactgtctacatgggttgtttgtaatgatcatttgttctgatttctggccattgtgagtgataggcttgctattctgcagcaactataacagatgcaaagaaacaagggacaggataaagaagagtaccagcctttgtgcactctcaaggccacaagcagttctcacagtgaccatgtagcagtggacttgggaagaccacagaagcctagtgatcctcagctgggaacttacctttgtttgacatcaacacgttctctcactgagtcattttagttcaaagtgatacatgttttctgttgtttgttgtttgttttggtttggtttagttttagagactggtgaccaaactagtaacttttgctcacagtagctgaggcacgcagttctttaagaaatctagataaaatcagaatttccactaagacttttgcaccttcttgagctactttgcattttcctagagtttctgtaaggacttgactctgaagcatttcatgaaatttagtagaatttacttcttcaagatgtttgtggttacagggagattcacactgtggaacaagaagacttccacccagccacccagttccactctcatgactttccccattattattcctgtactttctcctagcccccagttctgcaacctcaaggcaaagcagtgccaaagtctggatataaggtgggatacaggagtgattaaaggcatgagctttagctggggtcacactgcctggatttaaatcccaccttgatcagcactgtgactttgaataagactcttggccattagctatctcatttgtcaattgggaatgataataatggtgttttctccactgagtttttgggagaattatatgagaccatgtattaaagcacaaagcatagaatttggaacattataggttcccacaatatcccccaggaggcacttaatatttgatgattgactgagctgtgaaatgatgcacctgatcggcttcctgcctcattaattaggattagaaatggaatccagctcagtattttattattaatacccaactaaatacttggagaaatcaaataccagtgatttcaagaaattcacatctagttaggaatatactgtaaacacatgaaacaagagatctgagaggcaaaatacaaggtgattaaattaataaaatagaaaataaaagttaagcaaagtcatgttcagagtttggtagtgatattcaatgaaagtattttgaaggatacattttgaatttgatgttaaaaatgctaagcaactgaacgtggcaagtatgacagaatagttcaaatggtggctactgttaagaaacatacattgactgacgtgattggaaatagcaggtcaatgcaaaaccttagctaaggtgagatggggaggggcaaatggcaaacagtagaggccggatgggagagtttgtgttgattcctacggtcattggtagctgtaagctgcagagagagaaaataggagaggtactggtggagaacagcctcctggaagaacaaaggagtgtggaatgtgggccccagagctctgtgggatgaatggagacagtacaagttaatcaaatactattccagaaataatgttctgacaatatttaacatagttataatttctatcatttcatgaaatcagaatcactcaaacacagagcaaaatgttttcatggcattatccttcatgactgtagtgatggagtggaccatatgcacacatccagtgggctgtgagagaggggaactatgggaatcagcaaaaaataaaagcagagtctggcttagaagcaatcagatctgcattacctcctagctttgccagttgctagctgggtaaccttaggcaggctacataacctctgtgagcttcaggatccttctgggtaaaacgtggataatgcccgccttgcacagttttcctggggattaaaggtaacatgttccatacagtgtcttccacacagtaaacactcaaaaaatgctagacattcttgtggcatgcaatgcatgtaattgaacctaaacaacaagaagggctagagttgagagtactcaaaggccctatcagaaaccccaagttttattttacttatttttgttttttaatttttaagtttatattaaaacttttcgttatttaccctcgtgtgagctacagaagcacccaagagttgtatttgccttccccctagtggtgagacaagcccacttcaggcatgcgtccgaacatcgcattttattgaccagaaacccaagggctgaagaggtaaagtgacttccccaagataacggtgttttaaaaggcggtactggaatccaggtcttagcactcctcttcatgttattttctaaccacagcagggcttcagagatccgaggtaagtttaggctgggtgtttaatggatacaaagtactgatctccctcccatcacctctcttatgcaataaggctctttttccttttgtaatgaaagagtttaaacagccagccctcctgccacctggagccaggcataaatgaaatggttgttgaaaaataaagggaagcttgcggtgcttatgatcagagagggctgggctcccatggagcaaaagaagccaagttgatgcatatttttaaaatcctgatttaggggtcaccaagcacacactttaccaggaaagtggctgaggttggatacaagaggtaaaggttctcaccctggggtgtggtgggctgggaatggtttgcagccagatgaactggtttgaatcccgggtacgtctcttaagtggtctttggtttttgactgattttcacagactagattttgtcatctttagtttgagaaccaataattagctttttaaaaaaaaaaaaggaaaaaaaagaactatatctgagttccaaatggcaagattttcaaaaggaaaggttgttttatacataacagagctttatataaatgcaagatgttaccattttcacattgcaatatacagtggatataaaaatctacaactttgggtaaaaaaatgtctgtaactcatttcagttctgttatgaacaaggcttttaatgtctgtgagcctcactttagtcatcttaaaatataaatactcactttacaggttaataatgagagttcatggcatggcgtctagatgttcaataaatgttagttgaatctaaaatgaaagcaaccaaccctcaatttccttcctttattgtcttccccaaaaccatacaaataagcaaggcagaaactagagatgaaactcaagtcaatcaatttgaaattttggtcagaggtttggttggtagacaagattaaagacaacctcaaacacagctctacagatttataggtgggtaaattgcccttagtaaacctagcctcattaacatgacaggatggcctggctatatttagacgaatacctgccttttcttttgaaatttaggaaagagaatttgccaagttttagggttttttgaactgtgttctatgaaacaataaggtgtcggagggttctcaggactctgcaagagagggttggtgatactagggtgggcttctgggggcccctgattctctggttcaacctaagcatccacactttttatgtttttatttggggaaaaaaattctgctttaagacaatttttaaaactatgaccatggcccttatgaggtctggtgacacatcccatcctgattagttgggcctttttacatgttccagaagtggcaccacgaattccagctaattctcttaccagcacagactgaggatcgcagaggggaaaggctgagaagaaacacagcgagatcattaaagtaactgactggtgggtccagggaggctgggggagggataatggggaaaggaaacatgttgatc

SEQ ID NO: 1885336 - DNA, 4001 bp, Homo sapiens
tactttagcactttctggagcagcctcatgtacagatgtgaatgcactgtattgttgattcattaacattgaactcatggccaacagcactataactcatgcccgaacaaagcttatctaacacatgtattttctctgttaagacacatcacagccttcttgcgcttagggacattagacagcatttcagcactacgtttgggggccatttgaaacagaaatcaccatcggaaagcatagaaatttgaaaaatgtgacactaagtagagtgagaagaggacatatgtttacagaatgagaactaaaaaaaaaaggcagagcatggccttattcaagcacagctgggaacgtgtacataaggtgatccaaatttttcactgttctgcttgtgtccatatatgactgagagtgcttcaagtattgatttttgggttacacataatttttagccaagtagctgagttcataaatacagactctttgaatgatgattgactgtatttgtagaggttacttgccaaaaaagagtgtgtttcaagcataaaaatagactatatgaggatacaactttttgggtgaagtggaatgaattaaaggagaaagaattaatgtctgacttgttcagaaactttttagatggagaaatgggtattatgtttctattacacttagattctattggatatattttttataaaggatgcaatggtttaatttaaaaatgtcatcagaatgtcagaaattacatcctttacaactatttaaaactatgaagaaaaaaattaggtattacctagatatgtgataatttttgaaaattattttaaagagcaaaacggattaggaagcagctttgcttttgccattccactgaaaaaatgtacagtttcgatggaaacatgtcagcacttgcttgaaggaatttttcaactatagaaagaaaaaagcttcatttcatcccttttggcattgctgaacacttggttttgatgtataattttaaaacacctgagcaccataaaatgaaaccacagtattcctgagtagcctggtgaaatgtcgtgattttctcctacagtacagaaggacaaaaatgcctttaatgtcctcaaatgctagagttctagatgacgcattagtttaaatgtcaacgcttaatgtcttcacatgtaatttggaacataagttttcttacagttaaaataatccttagagcaaaaaacaaaataaagtttttcgtatgcctcaggcttcttaaaattttctagtaattggtactgtttctggtttccttagtttcttgccgtgggtaaggtccaaacaccttacatgtgttgctggtggccctcacaattctaccttggactaaagcactagggagtctgtaggcgccttcctgcgctcctccactgcggtggatccacaatttcttctcagctgacttactggttttcatgttaactatttcggttaatcattcatgaagcgcgtggcttatatttgggaaaacattgcaccttaatcccaacatgcataatttatgttgcttaattattttaagtcattgcattagaatagtaactgcgctctccatgagcctaggctagaaagaagggaaaaaatcccaggttctctcccaacgatcaggggttactcaagccgcccgagttctctggggcccctctgggccaggctgcgtccacttgggagaggccgaggacctggcgccaagaggcggcggtgtctgcgctaggggccgagcgggtgcgctgtgtctgcggggccaggccaaggacctggagcagggaggaggccgagcgcggagccgggccttgtcggctgcgtccgcggggctagggtagagaccgaagactggacaggaggaggcggcggtggccgcgcgcggggccaaccggtgggctccctctaccggaccgaggcccagcactgggccagaggaggtggcagctcgccggcaaagcagggtgggctgcgtccgcgggggcgaacacccgacgctatccgaagacgtcccgcgcgggccggcgggggcgcggtctgaggacgtcacttccggcgccggggctcacttcctggtgcgggaaggggcagagattggtgcagccccggaggaagaaaaaagggtgaggagaagcagcggctgagcgggttggcatctggggcagcgggctcgctccaggccgtcgggggccgctcgccagcgtcgcccgctgtgttgggagcgcgggccgtgggcgtcgctcggccttgtccgcggcgtccccgctgccggccacggcgctcagcgcttgtgctctgtattgcaggtctaccccgagccccggagcgagagcgagtgcctgagcaacatccgcgagttcctgcgcggctgcggggcttccctgcggctggaggtgagcgcgggcggccacgggccgagggaggggccgggaagacggggttgggcccggggtgggtgcttcgctccagccggacctcctgcctcctccgcgcccggatccgaccctccccggctgctcgagagtccgggatgtgtggaacggggcgttgcgggtttgggtaatggccgggaggtggcggcgcgcgggccacccccagggcagggtggagtctgcgtgtggaaccccagacattgctctcgttccagtgaggaagagtggttctggtcgctggtggtgcaggtgacacacattttcaacaaccgtttatcaggggtgtgaaccgatttcttggcacctgcctcagcatgaactctgcttttagagattgtcatctaagggctggcatctaggtctgggtcaggccttagaatcctcagcaggtgatcaggcaaagtcgtgcagaaataaaatgggccagccctccgcctgcttctcccagccgcactcctttctctgctttttcttcctgagaccagaaattcggtggtttttccgtaccctcaacacttaatgtccagagaattcacattaaccagtatgtgacgtttataaaacatgctgtcggggaacatactgggcggggtctcgattccctgttgtaaaatgttgtgtcactttactaaacattgtcttttcagtctttcagtggcagtttctgggaatttaactctttcattttattttgctattgcgattcttcctacacttggggtagcactttaaatacagaaatctagctttgcttttcttgggatctgcttaagtggttgcagtcagtcctgtacttaagtcctgccgtttatgttgccactttgtcactcttaaccttagttttcttatctgtaaactgagatgggcaatatcaagctcccagataagagtacagtcggccctccgtatccaaggttacccacccgtgtattcagccaaccttggattggaaatactggaggagggggaaaccaattaaaaaaaaacaataaaaaacaacacagtataatgattatttacatatcatttataatgtactaggtagtgtatgaaacctagagatgatttaatgtttacgggactatgccattttatataaaagacttgagcatctgagggttttggtatccaccgggatcctggaaccaattccctgctgataaaaagggacaactgtatatgaaagcatctttgtagaacctgttatgtaggataacccaacagaggtttcccttcccgaagaatattttgctataggtttctcggaaaacctagaacatcaaatctgtgagggcaggttacatggaaagtttatttaattgaattagacatgtaggaattcatagattaaagtattactggcgttgtttatgattgtaaacacaaagaaatttattgttggtagtatttcatgttggcaaggaaattattacacgtaagtgaaagtgctaggggagattccaagaaacttagggccttttcaaaggggaaaaagacagtgtttcagtagtctttccctgataccctttgtcgtatcagctttgtcat

SEQ ID NO: 1885337 - DNA, 4001 bp, Homo sapiens
gggcatcatatttatctctgttaaatttcattttgttgattttggcctattgttttaggcttttagggggatgtttagtgttgattctgtcccaacaatatttgtaatattccctaggtttgtgtcacctacaaatttaataagcacacttttttcccactaattaaaaaataaaaaataataaaccagagacaagcatagatccctgtagtaacctgctggagattgacactggctacttctttacatgagggtgttaaaccaggtctcaatttccctttctctgttattatccaatttacgttccacaagattacaaccaacccatcatgaatacagttataatgcttttctgaaacaggaatataccatggttacagtatccccagtaatttcccccaaaagaattgtgtagctccttcctctgtgcatttattgcatgttttatgtacctacaatatattacctactagaattatgttagagtcatttgtttccacagcaggtcaagcaatggtactcaatatttattagttgaacgagtaaatgagtggtaggttagcttatgctaacttctcagtcaaggaccctaacagaaaatgacacaaagctgttgtcctgtaaatgctgaatgacttctggcaacacctaaggtcttagctaacaagattcagtatattaagatcattgcatggctataagttgtacagatgacaggaattgctacttgcatttagagctggagaaactagagtaactaaaaattatgactgctccagggtctatgacaaagcaacttaaaataggactcacacgtcctactttacagaaatgttccactcaaatcagggacaaatctgtcaaatcagagaagctgcttgggggtatatcatgttttgccaatgcaaattaatgtagcagtttagaattaatgttttcttttattacatgatttcttttgtttgttaatgttttataacagtgtaagcaactatttttattattaagtatttaccatgcatcagctatgtagtatctattctgctatgtatttgtagcactgtggagactctaggaaatatactaaatataggatatttaatttgctatacataatgcatatatgtatagaaaagttctcctcactcgtggtgactcaccatctatttgaggaaggcacatgcatgagaaaattaaatagctaaatatgcatgattaagttcaaccagtagtttgataatgtaacaataatggtaatttggattttatttaattaatgatacaacacacatttaatgaatggtaactatgtatttgctacgaaatttccccactgggaaaaacagttatggatcctacactttattaacctatagtttaatattagaaacattgcagaagtttagagaagagagatttagttaggctatttggtcagtagaagattcatgaggacattgtaccttgaatgctgttatcttgacagctgaatagtcacagaatagagcaaagctgaattccaggctagagaataattgactttgcctatgaaaaagaacggtaatgacaaaaatagatgctacttcttaagagatgctgttttttttttctttctcttcttttgttcaatccttcatatatatcaaacacagaaagataacgatacagatttcaactggaagagaccaaggcttgcactggggaaagatgagcacaaaactgtaacctgattaaatgagttttagcatcctttgaaaaagtaaaatatttactgctctattacacaaagaatttattttaagttcaaaacctaaatatctcatttatactctctgaatctaaatgtcaaactggtgtgaagactaaaataaaacacgacttaaagagagagaactctcataccacaagcttccaacttacctagaaaaggccactgcagtgcattttcaatgctgcctgtcattcaatttgcaaattacaggtctgctaccgaacattgatgatccatcactgccatgacaacaaaagcgctgccttggcgacactcactgctggtgagaggctgacacactgcttataaatactgtagttgggagattagagtaaatttcacagaaaacaacataatgaatcatggtatggaaatgcaattgaagtatgtcaatttatttgtatgcaaatgcattccaaaattttgtgtagtcaaatgtacctacttaattacaagttcaaaacaaatgctcaaatgtacatatataaactttaaatttatacttgataacttaattgatggtataccacttctcatttttgatcagaattcagaaaaataaatatgaaatataaaaacctgtcaaattaaacataccttgggcaactttttaataaatgccagttttactatataaaaaaatcagaaacattgctcaacaattattattttgtcatattcacagacatgaattagaatttcatgtgacattatttacatttatatattttaaattatattccattctgtatgagaaaataagagagttttgcaactacatgttagaaaaaagaaaaattaatatgtgcttgtttggaaaatataaaataagactaaaacacatttatcttattttagttttgggttacataagaaaaaagtaacatatgaatagaatattaagtacgcaacacccagtttgttaaattatctgaaaatttccaattgtcaacatgttgaacatcttaaaatttctgtggagtgagtactcattggatgagtattggaaatgctgaccctgcaatgactcagcttaggaacaataatggttttgaggtatcactctgggagtgggcggttttattttttatactgctcattgagattctattcttacaatattacatattattacacatttactatgtctctctttatttctccaatcaacttgaggacagtctttttctttgtttattgtattcctctatggtgtttagggtattgatgagcacatcataggcactgaatgcatattagctaaattcaatggaaactagcttaaaatagttctgactagttcatgattcatgagaaatagagctttgaaaatagtgcatttggtctgagttcaaagctctttgtttcacaagaatcactggattggaagacatcttagctctttgggtccaaactcccattcagtttgcctgccataaattcctgggacaattgcattcgggacttcatacaaactctttaggttgtccattcttcactaaagatcgtatttttggaaacaccttataatatttacctgtttaccagaagcttttatcatttggttctaaatttattctttcagtctcaagaattcatcaaatatagatatttttcaatggcaacagaattttctatggatcaggaaccatgctaataaatgggcagggactcagagatgatttaaaaagttacttgaactctggaaagagtttataataagtaaagggacaatgacatacacatacacatacacacatgtatgtatcagtacatatatgttatttgtatatctataatatctatatatatattgcatacacatacatttatatacagagatgtacattttttcaggttataaaatagttatatgtcgactgtaaaaataggaaaacattcataatctgattgaaatgcttatataactacgtattaccttgtctattttttacatcttctaaagctttttgttttgaagtaaaaagtaattttacattcaaaggaagttgcaaaaataataaagaagtctaatgtacttaaaggtaacactttaaacagctacagtaccacatcaaataaggaaatgaacactggtaaaaatccataaacttcattcagattttactcgtttttcatacactaacttgtgtgtgtaatgatctatgacatcttctcacatgtgtaaatatgtataactactgccacagcaaagatgtagaacagttca

SEQ ID NO: 1885338 - DNA, 4001 bp, Homo sapiens
agcactcttccccccgcagtgtgtgtgtgtgtgtttaaagaatatatataaaaagttccccggctcatttgcatagcttcatctttaccttttcccattcagcccttgcaaaagcatatctattcaaagcccttgcaaaaagcatatctattcaaagggcatttagtccatttctttcttggccggtaaacctattcatcaattgttctgccttgtagatcgcattctaatgctaatctagcgtgttaaatatctttttgttcccctttcaccgttttgtcattcagtttatccagttttggtcacccattttatttatttatgcgcctgctcctattcaggggctcatgtattttttattatgttgtttcactgtcacgcagtgtcaacttagtctattcaatgggggctacttgaaggccggagggacaaagcgtgtacacattgcaccgctattcattccggccagctggatcggctgaaaaaaaaaccttgtgaaaagaaacgcctcacaatggacacagaagaagtgcacaatgctaacagttttccaaataccactgattggtttcttcacaatgaggagaaagccgccgctttttcttagctccacttcaacaaacaacactctcacaaaacctcccaaccctgcgttttgttctcggacaaaacctcctcgactgtctaaacgctcccactgaaggacaaaaaaaaaaaaaaggataaaaaaagctcttttcaccatttccctttttttcccccctgcaagagagaaaaaagaaaagggggggaggaattgtcagtgcattaataatatcagtcttttaaaagaagagggctgacctttgagatgcactgggctgagggagaaagaaaggaggagagattaataaagtttggacggctccctcggcctccgctgggccgcgggcgcaagaaagacgcggaccctcgaggcggacgagttgcgggaacttcgcttgcctggaggacacggcggcccaggcggccgggagcgccggcgccgagccgcgctctgattggctggcgcgaccgtccctatctgctccggggagagtggaatcttctctccatcttctgcgccccgagcctggggtgagagggagatccgcggtgctttctcctatcttcttgggggagggggaggaggaaattgtcaagggaagtaacaatcgcggccagcaaccctgctctcccaaagccaccccctcgcgcgacagcgtccccagcaccagttcttactgcttacacagcgcaattccacctgtttgcacaaagcccgaagcaacatgcctggccccttggatacgaggcttgcttcaagttttgggacaacggtgaataccaaagaaattgcatcatggctttaaaaaaaaccttgaaaagaaacgaaaatagaagaataaaaggaagggaaagaagaaagatggaaggaaggaaggagagagaaggaaagaaagaaaaatggagaaacagggagagagacggagatagataaagagatggagatagagatcgcgagccagcagcagctctctgcccaatcacagcgctgcatttgtgggccactttcagacgcttacaccacccacccccgggcctttctctacgccctcttgccccggagccgctccccccgctccaaccccttacttctgcacagtctaacttggcaggaggctctctgcaggcgcaaaacccgccaacttgttagcaagaccattggagtcagaatgggtgataaacgagtctgtggggcctgtggaggtcctcaaacagccgcacaatctgttggcgatatgacctcggtgctccccctcggcatcctcacccctcctcttacccatctttccagtcctcttctcattcatcaacaactccggagcgtttctcccagaaaacgctgatctttgggaaaaggggagggggcgggaggaggcggggagtcttcaggccgaggaggcggccgagctggaaggctcagggtggtaactaagatttagggctggggtgatttccagcgagccgcaggaagttccgtgttgagaagggatgggctgctacaaaagggaaagacgaagccttgaaaggatttaattaaccgtgtcagggataattacccctggacagtccaaattagttttgcataatcgctcagaaccatatgaattaacttataatattgcaaagagctcagggaataacaggagagggatcattttaattagtgaatcagggtcaaaccagcagagcctatttctcacatttccaaaacttttcatggtttttaaaatattattccgttgggggaaaacaatgactttaaagacttgggtcgtttataaagacgtgcagctccagagatggtctcaatggggaaactggtttaagacttgtatatagtatcttgagaatttccattttggttgcgggggggcgagatcttcctatttttttttttctgacagtcttctatttcttgtctaaaattaaaatcctttatgatttttcaaactttagtagcaatttgtctagccctagaaatccaaccctctccatttgaatgttatacttctactttaatgcgattagcataacaaaattaagtcctaaagaggccaaaatttgtactttgtcgttagtagtgattatccttccaaataaaaccttaaggtgtcaacaaggaataccccaaagataggagaacaaattacactgatttaagtggtggggctcttcaactaacaagataaagtggtcaagcaactttcccctcttaaaatgttactagaaactggtgaaatgctttgaaaggtctggatgttttcaatgggctctgttctactggttcatgaatgccttttttttgttgttgttaaagctaatacaacgacttgggctttttaaaaatcttctttcctattcacgattaaaaatgtgataaatcaggtttttggctctgaataacaatggcttgatttagatttcctagtaaatctattcaaaagtgaaacaaagggtgcctttggaggataccttacacttcacctggaccaggcacgtaagggcaattcagataaaaatcttgttaggaactcaacaagaaatagaagatttttcttttccctggttcaggctttatttaaactctttgttcaaaaaaaatgaacagagtgatagtcggattctaatttacagatataccttagacgtctaatattaaattagaaggtcacactagaaaatcatttacacataaaggttaaaaccatatttaaaattttaaaaactttatattacataaagccaaaatgaaactaaatacatgttagccaacttcattcacaaacattagtcaaaatatatacatttaaaaagaaacaaagctaataattgaaggttccttttttctaaaatgtgttttattgcaatttgcaaatgaattgcaggtgatctaaaaaataagccaattgaggagggaaatccaaaacacattaaaccagctcaacttgggagagaaatgctagctgaaaatgagagacatctgttgaaacaattctgtgctttttttcttcagttttgctaaataataaatatataattaccagacaaaaaagtctgatttaatcttcgataaaattgcgattctgaaatagtttcgcaatttttaaaagttaactttgatattcgctcaaaatgtttttgagtctaaagtcgactcaaacttagggcaacgaaaataacacattttccaagcctcaatgttttcactgacatatacacatttacaatcttaaggtgaactcagccataagggaaaataggagcagtgcctttttccttttttgtaaactgtgtcagaaatccaagcgagtggactcagggagacttctagtagtttgttgttgttgtttgtttaggaagaaaatccaattgacaactttcatctcacaaatatttcttgtttgcgtttcttgccc

SEQ ID NO: 1885339 - DNA, 4001 bp, Homo sapiens
aaagaaggcaaagaaaaggaatagtcagctggcacttcgctgctcaatatggtatcaagagtctgtaaataaaggagttggggtgggggcagttatattggttaaaaaaaagtgtctgtctctaccctaaaacttagaaaaacaacccagaaacaaactcaaaaacaacccagaagtgtctgagataaaagcagctataaccttgatagaatgagatcttgaaatccgaattaagttattttaaagaaaaacaaagttacatacagctgctatgattagataatatctctgaagggttattccctggcacatagcaagtgccaatacatgttagctgttgtggtaaatatgatgtaatagtagtggtgctgaagatattaattattattacaactggcatgagataaattaaggtttccctattcatccaacaaacacttattgagctttttcttcatacaagaacctttacaattcaaatcttaggaagcaaagagtttagtgggtgattcatattattaggggaaaaaacatttattttggatgcagtattaagaggaaaagataagtgcttttggaaaacattcctaatgattcagaatgcaattcattctccttaagaacatacctatggagatggaaaacactgtggtctcaattaaaattttttttgtggtgaaaagcacatataactcaattgaaggtcaggagtgctggctcatgcctgtaatcctagcacattgggaggctgaggcaggaggatcacttgaactcaggagttttgagaccagcatggacaacatagtgcgacctcatctctactgaaattaaaaaaaaaaaaaatagctgggcatgatggtgcatgcctgtagtcccagctactcaggaagctgaggcaggaggaacacttcagcctgggaggtcaaggctgcagtgagctgtgttcacaccattgcactccagtctaggtgacagagtgagaccctgtctcaaaaaacaaacaaacaaaaaaaaattaaaaatattcaattgaccatcttagccattttaaagtgtacagtatagtaataaaaagatatttttgttgcagtaacattttcagtaaaaataacagtaaatatttgattggaataaggaaatatataatatagacctgaagaaagagggaatatcaaacctgtctgttttgggctgttttatgattttctttaacttggtttgacttttcgagtcagcaaaagattaaagttgatacagaaacacacacacatccccccggacacacacacattcctctgttggaatgtcttggttatggagatgtgtctgctctttgtaatagaaaaggacacaggtttactgctaagcccaggcaggtttgctgggccagctctaagagctcagaatgaaaacacagaagaaaaaatcaaaacaggtaacatgccccaaaagtgcacagaacttttctgagtgtaagagaagggaacagggagaagagaatgggatggaactgtgaggggtggaatgccagggaggattaacaggatggatttcaggagggaacatgagagaaaacaaaactcaaatgatggtttggcatgatccaaaaacaacagatagaaggtaaataaatgtttccttagaagagagaaccttgaagtttccccaaaaaaggaagaaaaaatgaagggaaagaaagagaagcaaaggagatggggagaaaggggaaggaagggagacatcaataaaggcaaaagccagagaaaacaagaagcaagtctaacagttagaattcgagtcccagaagaagaagaatgcaagaaatagcacaattccaggcaaggagaagagatacaacactcaggttacttttaagaagaggaaagtaccttttggcctcaactcccagcttccagtaatttgataaaatgacgaacacagaggaaagaagagaggcaactgctgaggtcccctaggcctttgagaaaacggagttgtacctttggcaacataagtgcatatctacaagaaaggcgataatgtagacaccaagggaatgggtactgtccaaaaagaaatgcctcacaaatgtcaccatggcaaaactaaaagagtctacaaagttacctagcatgctgttggcatcattgtaaacaaacaagttaagggcaagattcttgccaagagaattaatatgcatattgggcatattaagcactctaagagccaagatgatttcctgaaagtgtgtgaaggaaaataaccagcataaagagggaagctaaagagaaacctgaagctgcagcctgttccacccagagaagcacactttgtaagaaccaatgaaaaggagcctgagctgctggagtctattaactgaattcatggtataacaggtgaaaaaaaagaagaagaagaagacttctggattgtaaaggaagaaagaggaagagaaggaggaagggaaagagcaggcaaaaataaatttgaaagctctttgaaaccacaaaatatggtaaaatgaataattttaagaagagagtacactgtaaatcacatcttaatattaatattatgtaaaaattatgtataaaagctagagataagtctgtagaactcaaagagaaacaatgtaaacattagtacaaaaaaatgaatgcaatgtagttattcaaatgtagttcaaaatatgtaagataaggtagagaagatattaaatcattaataagaattggggaagaaaaaagaatcagatttcaaattaagcattatattaactaggataattcaggtatccactaggacctgataattcaggtctccatctatgacaaacccacagccaatatcatactgaacaggcaaaagctggaagcattctccctgagaactgaaacaagagaaggatccccactctcatgactcctattcaatataatactggaagtcgtagccaaagcaatcaggcaagaggaagaaataaaaggaatccaaataggaaaagagtgagttgaatgatctctcttcatagacaatatgattctatacctagaaatccccacagcttctgcccaaagcctcctagaattgataaacaacttcagtaaaatttcaggatacaaaatcaacgcacaataatcagtagtatttctatacatcaaaaacatccaagctgagggccaaatcaaaaatgcaattctatgctgcagaaggatagtgtataataataataaaagaatacaattctattcacaacagccacaaaaagaataaaatacctaggaatacagccaatcacagaggtgaacaatctctccaacaagagttacaaaacactgctgaaagaaatcagagacaacaaaaacaaatggaaaaacattccatgctcatgagtaagaagaatcaatgttgctaaaatggccatactgcccaaagcaatttacagattcagtgctattcctatcaaattaccaacatcgtttttcacagaattagaaaaaactcttcttaaattcacatgggttgagagggacctcgcgccgcccccttgcctccggcgcgcagggcctctaaggggccgctcccgccctgcgcgggcctggcctggaccggaagctgcgctgcgtgcctgctcctggctctgggggcgggcaccggggccagctggacaggggcaagaagcacaaggagcgcaagtcagacaaacacttctatgaggggtatgtagagaagcccttgaggctggtcctcaaagtaggagggaacgaagtcaccgaattctccacgggcagctcagggcacgactccagcctcttcgaaggcgaataagatcatgacaaatacaaggacagaaagcagaaaaagagaaagaaaggagagaagcaggatccaggggaagaaaaagagagaaaacggaggagagttagggaggataaaaagaagcgagatcgagaccttgtggagaatgaggcagaaaaagacctccagtgtcatgcccgtgt

SEQ ID NO: 1885340 - DNA, 4001 bp, Homo sapiens
cctcctgagagcccagagcactgtggcggcgttggctccccagactgggggcctcaggagagctcgcgacaggctccccagcaagctaagctcccactcccgggagtacaaccgccctcgcgcaggtgtacgcccagacacagccatagccagcggcctccaggtctggggctgtccagagaggcctgggggccacaccccagccctctgcctccccacccccgctccaggacggaccctgtctcaccacagggccacagaaccctcttcagtcccaccagagaacaaacactccagacactgattcgatctgtactgaaaccactggttagaaaatccacaaggcaaccaccgccttcgcacattccctacctgcaagtattgaccccgatcagccaggcctggccgccagaaccaaggtagaaactcaggacccggtcctcagaagctcacagccccagggagtctaagagactgacctcaaggatccccaggagccactgtttcttctggaagccctctggaggagcgtttttccccacggcctttcctcgcctcacagttgttcacactctcctgctcctgggggaacccaggccggctcatcaatgacccctcgcctccccgccctcctccatttcctgagctgggatagccccagaagttgagcgtttcctatgctggaaggacttccagcttggagcggaaatcggggccggggcaaggacgcaggggcgtgtcgcccacgtttctggcccggctagccgcaactccttggatgtaaacgagatttggccggcgctgcggcgtgtggggaaagatgattacactcgaaaggaatcacgactccttgcggagccattactcgtgccgctccgcacgcgcaggttctggcccggctttcagcaactccccgctcctcgctaaccactcgctcgtaatttgtgggccgcagtggagctgcgcccggggctgcagccccccaattaaagcacttttgcagctcggacacccagagagctgcctccgcgcacgccaggccggcacctcctgctcccactcccctctccgcccagccgtgggcagctgaaatggatgtgatttcacgcacttcctgcgcgcgcacacacacatgcacacatggacatacacttgcacacacgcacaacgcgcattccccctccaatgccgcccgcacacgtgcgcgagcctggacgttccccttttgtgctcgttttgcaggcccagagctcctgctgctggttttctcctttctctccttcatcgcctcttccttcgccactttccttctggaccctccgggctggctcctgcccctctgccccggtggcgctctcgcctattcctcccgggaggagccggggccgcagaggtgcgccctgcacgcccagcgagggccgagttctgggacggctgggaccaaagggctggcctccggcctgcgccctgtttgttttcctttcgccccctgaatactagattgagacgtaaagattacccgggccgaataatgccgggagtcaacactcgagcaaacaaaagtgcttgcacaactagtcaaccccgctgggacccgggccgcgggctgggggagagaacgcgctcctcgctgctaattacaaataaatgatgatgtgctcactaagtaattgatttaatgaagttcctatgaaactattaaacccgggtggaggtcaggctggaggcgccccagagcgcccattgtgggctgtttaactccaccaggctcctcggaaagacatcggggctaataggtgaagtcacagctgctcgcgctgacttctcggagcgcccggctggccgcgggcaccctcgcgccctcttcttgtagcgcccttgtgccccgccgcccgcgccccgcgccggccagcttacccacgccactcccagccctgtcgccagctcccgagggcctctccaaagggatcccgggtctcgttaagagcgggaagttgagcactgaacttgtgctcaccgccagcagtcggcggcgtgcaccgccgcccacccctccctcctcactccacccccgccacttcgtgcaggaactccaaccagtgtgccacgcagggtgctcgcgagctcttggcaaggtgcctggatcccgagcgtgtgcccagtgcactggctggggctgggctgggggggttgaattgcgcgtgagcgtgtgtgtggggggggtggtagggaggtgggtgtatgcgtacgagagagagtgcgttccgggccaaaaggccatctttctgcatccgttatcctggcctgggccctgttcatgcaaaaaagtagaggaggtagggacagcagagaagaggaatgaggaaagatgtgcaaaacagatcactcaggtaggcggttgggcctgggaactccagtcctaggctgtgcgggagtgggctgctctggcgcggccctctctcgctgccccaccgcccacctctgcccgcgtcctgacccggccaggcgttccttggccccagagcgacgcctccagctgccaatggggcgtagggccccaggcccgcatctcagggctgtctgaatgcgagctctccggccacccattgcgctcagattccagtctctgcaggaagggtagggactagttctcctgcaacatggctcttggtggaaacatgacccgccccttatccaaaaggccagagggagccctgaatggacacattttaagatggagaatcagacattgcaaatggatcaaaagctaagggtgctaaccacacacacacacacacacacacacacacacacacacacacacacgggggtgggggtggggagggcattttactgcatctccccccacctacaaggggtcgtgtggtaaaagagaaggcccacatccaggtgaaacgccacatagggagacgggggcgcctgttgggcttctggctgcagaaatcaatctgccgggatgccctgccccctctgcccagccaaatcttgtctctcttcatcaagaactgatagttaacagagtttctcagagcatgcatttcatttatgccacagtcagttggcagtaagcttcattcctttttttatgttaggaattttcaactgctgaaaccaatttccatttgactttgaatcaaacacttgcaatggggggcaggggaaagggacattttggcgtggttgttggcgactttaaagagaactccactcccgcctggatctttggtctcaaagagggtctcaacctctgacttcggggaatattgacaaaaatcaatttgagtcttgcttgaggtctcagtttcgccatctgtaaaattggatctggagatccttggctgaggtcctttgggctttatttgtttgtgatctgtgaaggggaccgtagggagaggtggaagtcagtcaagacgcctgtttgcaccaagcttttgtctttctttgtagaagcgagtccctttgtaaaataacgccccgccagcctgcctaatggatttgtgcagagctagagttttcattttccccacgcaggaacgacgaaagagagggggtcttccaacccagcgagtcccgcttggccccggtttgccagcggcgctctccaaaatgtgccaaaagctgtgcttggggcactctctcgaccccgccccgggcagctgttcccattttgttcccgccttccctcccctcaccgcagtccctcgtattcctttaacgcctgctgctgactgcatccctgctgcccttaatgtaggatgggcacttctcttcagcctccaaatgagaagtgacatttgcactcggctcagccaacgcgtgagcagagcgcgggggcacaggcccattgaccgagcgcggccgaggggccggccggctgggcagcatccgaagctgccttaattaataccatcttaaatagtccagcagccaccgaagacaaagttgaagaaagactttaaggctgagtgcccctcgacaag

SEQ ID NO: 1885341 - DNA, 4001 bp, Homo sapiens
gtccccaaagcccacagaaaagtctcaactcctggacctcgtgagtcccatcccactgggggagctccctctctcttctctgctctcctctcaggagggaaagttaagagcctgcttggccaccctctagggagatgccatgatagggtgctgcatcctggtgatgagctgggggtaagccagcacgtctcctccaggccttttctcagaactgaatatacactgttaagatgatctttagaaatggaagaatcaaactgggaagaattacacgcctgtagtcccagcctacaaggaagcctgaggcataaggatcacttgagcccaggggttttgagtccagcctggtcaacatggtgagaaccagtgtccaaaaaataaataaataagcaataaataaataagaatcaggtgactgttccagactcctccaaaatgggcattgtgtccctactctgctcttcccaggacagggctgtgccttcccctttcctggtggccataaacccagtccctctcactaaaggagagagaaaagaaaaagtgttcaaagcactttgagttatgcgaggtgtgcagaatgtatcaggcccagagagacaggaatatgggacttcagtcacacacctcatacccatgccccagcagctgtgtaaaggcattttgttcctgactagctttatcttcctgttactagaatttgtgatacaaaagacaatatagagccaataaatagcttatgttattttaatatacattcctctggccaggccagccaaggtgggaggctcccttccggccaggagttcaagaccaggctgggcaacacagcaagactctgtctctatttgtaaaattcttggtaaacaatttagaaactgccccttcttttcctttaaaaacccatttgtaactgctgctaattagagtgtatattaaggcaacttgcatctccaaggttgcagttcgcaaacttggcccaaataaactgtatttttttttagttttttattttttgtgagacggaatctccctctgtcacccaggctggagtgcagtggcacaatctcggctcactgcaacctccacctcccggattcaagcgattcttgtgcctcagcctcccgagtagctgggattacaggcacccatcaccatgtccggctaattttattcattttttattttttgtagaaacgggggcaggacgggtctcaccacgttgcccaggctggttgcaaactcctgacctcaagcaatcctccggcggaggcctcccaaagcactggaattacaggcctgaggcactgcgcccagcccaacctctccacctatattaattttacctctgcttcttcttttcttttcttttctttttttttttaagacggagtctcgcccaggctgcagtgcgatctcggctaactgcaacctctgcctcccgggttcaagcaattccccagcctcagcctcccgagtagctgggattacaggcacgcccaccatacccggatagtttttgtatttttagtagagacgggatttcaccatgttggccaggttggtctccaactcctgacttcaggtgatctgcccgcctctgcctccgaagtgatgggattacagacgtgagccacagaaacccactcactttttcctttcagatcacaaaagtgatcgaatcccgccacttcccgggtgctgggtgggaaggtggggtgattgctgtgctgctgtgacttgggtagatgccgtgaaggcctctcaaaggcggccatgtttgcaaagatctgaataaggcacctccagaggaaccggtctggggcaactggggaggaggcagcggcacaagttcgtggtcaagccactgcaaggctgggagcttacttacaaagcaatgttcctccacctataaagacgcagtagctgctccatccccggtcagaggacccccggaaacgtctcagcccacgcactgccctctgaccccactgccttcccgccagtcctgcatccagtcagagggccctctctgagcctgctgccttcccgccaatcctgcatccaatcagagggcgtccccactacgtggtttgcacaacggccaatcaaaactaggatccgagccttggcccgcctcccaggacgtccggaccaatggtggcctggcaccagcaggccaatcccagacagcgcacggcgggaggctgtcgttgggcgtgcgcagctgcagcggcggttgaggtcaagtagtagcgttgggctgcggcagcggaggagctcaacatggtaaggccaggtcactcccaccccgcagacgcccaggctggagggtggacgaagttggcctcctgaggtggctggatggagggatgctgttgcgggccagggtgcagaaaggaggtcagagaaggatgcggggcccagggcgggacacgaggacacggcatcgtctgctgggtctgcgggctccagggcagggatggcagcttttgttttagacgaagctgccggccttgagtcagtggacggggagcattgaccgtgtcctgtcccccagagagcaaacagtggtgccgcctcctgaagacagaagggcgctgctcccgctttccggtctccaaatgtctctgtcctattggaaaccactgaggagccccaggagccttgttgatggaggcaagggctgtggacattggtcagatcaggaattaaagctcagacgggagttggaggcggggaatcccctgaggtcaggggctcctcactagcctggccaatatggcgaaatcccttctctactaaaaatagaaaaattcccggggtggaggcgtggatctgtggttccagctactcgggaggctgaggtgggagggtcagctgagcccaggacttcgaggccgcagtgagtcatgatggtgccactgcactccagcttgtgcgacagagagagaccctgcctcaaaaaaaaaaaaaagcaaccaacgcattcacataaagaatagatttctaagtcccaagtctgaatagcagtggccgtggtttgtcaagtatctttttttttttttttttgaaacggctcaacaacagctctgttgcccaggctggagcacagttgcacgatcacggctccctgcagccttgaacccctgggctccagcaatcctcctgcctcagcctcctgagtagctgggactacaggtgtgtgctgccacagctggctaatgtttaaatttttcggccgggcgctgtggctcacgcctgtaatcccagcactttgggaggccaaggcgggcatatcaaaaggtcaggagatcgagaccatcctggctaacacggtgaaaccccatctctactaaaaatacaaaaaattagttgggcatagtggcctgtagtcccagctacgtgggagactgaggcaggagaattgcttgaacccgggaggcagaggctgcagtgagctgagattgtgccactgcattccagcctgggtgacagagcaagactctgtttaaaaaaaaaaaattttttttcatagttgcccaggctggtctcaaactggtcccaagcgatctcagctcagcctcccaaagtgctggaattacaggcatgagccaccacatccggcttgtcagggcttaaagaaaccaccaaggacagtgcagtgtcccagcactgatgacatctgggagccattacactcctaggcttcaaggggtagaggggagggagtgcttacgaaaaattgagagggtaactttatgaagagggccacctgccaaaagtgtggccttgatggagggatttgtatcgcccatgaaaggtgagcaggaaggggccaaggggagagtaccctgacgccactctcctccagcctcctggtctcctgcggctgcctgtcattgaacaaaccagcacgaagccagagagcaaggaaggcctctgatgctgtcctcatgggtcagcctcggagagcacagggcgggtggtgaatgatggag

SEQ ID NO: 1885342 - DNA, 4001 bp, Homo sapiens
gcatttgtattcactggagaatctcttctcttcattgcaatgtttaacatgatgtgagttaaacactgatgtaacatttggtgtaatatggttatgtttgactctaccgtttgagaacagtagttgcctcttattggaagtgttcatttctgtagtttcagttccctgcagtcgaccatgatctgaaaataggtgcatacagtacaataagatattttgagagagagaaatcacacacacatcacttttattattgtatattgttatattagttactgttgctaatttcttactgttcccaacttataaattaagcttcattataggtgtgtgtgtatacagaaaaaatatcatatatctagggcttggtactatccactgggggtcttggaacgtcttcgccacaggtaaggggaaccactgcatttgtttcctattcattctttctgggttttgttgttgttattcctttcttacgtgctttctttgggttgtttaaactcttctcatgggaacttcagcgaggctttaagtcatctggatagcccagaaaataaaataatcttggattgctaactccatttggtgcctggaaaaaggaagagaaaattatctctggaggaagataacattatataaggcctcaaagtatttctgcaaatacatatatggcatacacacacacagatatatatatatatatatatatatgaaaaatatatgctaatcaacatcagataacagcagtgaaaataatattcatgacacgagcagaatgggcacctcatcccccaccttccttctcgcttaactggatttcaaagtcagagcctcctcaggaccccagattagtgtcacctaaaccacctcaggtacatcagctgcaagaagacttggaggacagagtttaggtttcacgtccctgagcttctgaacggttcctgaaaaggagttggtgtggacacagcacagcctcctgttgcccccagcacatccctcgtctcctagcagatgaggcctccagataaccccactccgctccctgtaatgatggaatggtccagggtgtatactttaaaacacacctggaccagatcaacacttcctcatagcaggaaaataaggacgcgaatgcaatcctgtgaccagaaagagtgcactctatctgggaaagacgctaagtttaaaaaagctccagtttacacaaaagatctgattgttatgataagcatatgatgaaaagtggctcaccctaatggaaagtggctcagtttgaattaactcgtacagccaggtcccatgtcccgatggagagttcgctgcagatggaagctagaagtcaacattttccatgcacggaagtctcttgggcaccaaaggtctagaacccctccccgctgcttctagtgcccacagggctccctaccatcattgtgaaatcaggaagttgattgtgagtgtgcctgcaggtcctttcttgtccggtgcagggatactttttctcgtgatgacagagagcaagcgcctgcagctgcgtgtccaccacacgcctggcctgtctcagaggcgtgggctgcaggcacttcacaggcattgcttgtgtcatggcagcaacttcagatcaggcttttgaacaggagtctgtcattctggtgggccatggagtgagtcagtagctgttactcattaaacaaaaggaatcttctgtgagctgacggcttcttcagagtcggatggaggggctgctgtggagatcaggcgcatcctgacaggctggttctggtaggcacgaaaggttcagaagaaagaatttcaaaagataaaaatgcccccagcagaaacaatgaatagcaagcacacgcgtgccaccccacacgcggaagtcacacaaagctgatcgggtttcgtgtgctcctcgtgttccacggagcacctcatctggagtgggcaggtggctccctcgggtctctctccttctgatgataaaccccccagagcgggggtacagctctttaccgcttcctttgcaagtctacgtggcatttacgagtcaacccagtcataaagcaagtaagtctccaacctccggtgtctagtcacagttaaccgtttcagcctctctaggctgtggccatagccatgggctcactgatggtggttaatattaacaacccgtatttccatagaggtttgcggtaggtaaagtttcatcctcatctccatggtaggttattattgtcaatacagggaaacaggccctgagagattcagtcaactgcccaagtcagtggtctgaatgagtggtaactggtttctgtctctctcagttcagagctctcagcggtgccccaccgggtcccctctgtcctgagcagaggccacacatcccacgtctgtggccgtgtcattcttggggtggaaattttggaacttgtaacactacatggtcacttggctatatttactgaaattgattgttgttaagtctacttcagtccagatcataactcagatatatcagaggtatcattcagatattatccaaattataataattataccaaattataattttaataaagtggtaaaatctttactaataaaacataaagtccagtgcaggagacattgctgtgtcatggtccctaaatatcagaaatttggatttttttttaaagtcctatttttatacaaaaattacccagacgtggtggcaggcaactgtaatcccagctacaccctggaggcggaggttacagtgagctgagatcacaccattgcactccagcctgggcaacaagagcaaaacctcgaaaaaaaaatcctatttttacttaagagtgcatgtgttttatatgtgtgtatgtattcatcttgttctcgatgagaaaacatattggaacttatatcagttcatgttttccctgctgaaatatagttgaagttagtttattctctactgaaaaggaaaataatgcttaacataaaagcatagatcaatttaagtatcagtgcatcacaaccaagaccacactgaaagaaaatatctgaatacacatattttttattattaaggtattttatgtttatttaatacattttcaaatgattaaagtatacgaagtagaaaactcatatgctttaatgacttagtcaagttccccacatacatccttcgctggctgcctggggtcaaacccttcctctacaaattgtgatctttgtgacctctggcaagttacggaacttctgtgcccctcctgtacaatggggagaaaaatggaatctggctgttgccaggagatgaggatggaagcatctcttttgccccatacacagattatctcctcatcccacctcgaattccgcctgcagagctgagacgatggccatgaatgctgccacaatcccacctcacgtgtgcacctcgtagtcactacttttcctccagacattttctcaagccagaagaatgagcacagcccacatctgaagcagcctgagaggctgggcctgcaggggagataccggccctatggaaggcagttggtgggcaaaagtccggtttctacgctttgaggggacacctgtggggcaccctgaggcccagccctgctgggtgagtatggcctggctgtgtgtcttcacagctcctatcacgacttcaaattatcttccacatttgtctccaggtgactaattactgaggtgaggcctgcagtagtcagaagaatttcctcctaattttgttatgaatgtgtgtgcgtattatatagcaaatatctttgttttcttccctctcttatcctgttatgtaacataagatgtatttaggttataagattgtattcaagaattgtgaattttacatcatagaatctaagttgaaaatatcagaagaagagtaaacctcactcaaggcctttatttccttttctggggaagagattgtgtgttttcagttgtatgtgggattagctgtatcacgttaggtggaatgg

SEQ ID NO: 1885343 - DNA, 4001 bp, Homo sapiens
gccagttaagtttcctttagctttgttagtccagccactagtgtgagctttgatttttgagaatggctaatttctggatagctgtaaggacttaaacaggggggctgggcgcggtggctcacgcttgtaatcccagcactttgggaggccgaggcgggtggattacctgaggtcaggattttgagaccagcctggccaacgtggcgaaaccccatctcaactaaaagtaaaaaaaaaaaaaaaaaaattagccggtcatggtggtgggtgtctgtaatcctagctactcaggaggctgaggcaggagaatcgcttgaacccgggaggcggaggttgcagtgagccaagaccgcgccactgcaactccagcctgggtgacaagagcgagactccatctcaaaaaaaaaaaaaaaagacttaaataagttagtgagttgggttctgagtggtactcctcagttgtcataaacctctttctttccatagcataccaaaataacgtgcaattccaaaagtaaactggctgtctctataaatgttagttcccttatcttgtgctaacatgcaagtttgggtgagtgcttaagaattcaatgatttgggccatgttaacttaagtggagatttcaacttaataggctgttgaaaatctgcaatagtgtatcctgcttaaaattccccatttgtactcctgaggtaagaaccatctacaaaggtgatatcaaggtctctgagaggagttctggtgatgtcagagtgaggaaatgtgaatgactgtgtgacggtgattcagtcacaaggttgtccttcagagggaatgggaagaagagtggcttgattgttttgactacggtggacagtgatgagagaggaagacagtggcagggtttcacaggaggtgagtccgaagcggaaacgtgttaggtgttctcagtgacttctaatgtctgaactgcacggggtaagtaaaggttgagtgaatgactagaaataaagtcagctctgatggagaggcaacttcatacaagcaaggggagaaatgcttgagccactgggtctaaaaggatgctaaattaccaaccaggcctctggcttccattgtgttttggggtgaggaccccctaaagcatgtctcttcttttgtgtaaaaaagggaaaggggtactgaatattggagagaccaagtgggagaagtggctacagaggacttcaggttttgaaatgcagatatggaaggaaagtctcaaagtcaggtgactggaggtggtctccttttagtcatggcaaataaggacaggcaattgtgaaaaagccagggatctaattccagcgatagccaaccaatcctacaaaccctgagttatcttttggtaccagggagaggcatagtgagtaaaaaaaaaaaaaaaaaaaaaatcacttctaatggatacatacactaatacaagatgttaataataagggaactgtgaagtggggagagatatatggaagttccctgtccctgctgctcaatttttccgtaaacctaaaaataaaatctaatttacacacacacacacacacgcccctaaaaagggatctctgctggaacttgcaaggttttctgttttggggggttttttgttttcctacaggctcataatttcaaattagtggtgcttcctttttttttttttaataaaggctggaagaaaacttatcgaacctttataattctaagaactgagtaattattctacaaaccaacaaatatttattaacagcgtcctataaccaactcatgtaatcttcacacaatcctatgaaatactactgttcacgtcttacaaaagaagaaacagttcaaagagacaagtcaaacaatacatactagaacgaggcgactactctggattccaaaaccacagttccaaaccacaaaatcgaatctaggaaaattggcgctctcgagtgtcgtcagctaaaacaaggaacaccagagaaggatcgcgatattacacaaactactactcccgacatgcaaagcggattctttccctcggtctcggcccgggagtccgagagtcccagcagccctcggggcgcgaaaggcaacctgggagcggtagttctcctgggcgcctagcattgtcgcccacgctgcagtagcggcttctgcggctccaagccagcgggtcctgtgaaggcgagcagacgcggagaaaggacgcgggagtgagagagggtgagtcagccactgtctaaacgataacgggaggcggttctgcggggtagggttgaattcagtaaatgggctcgtgctgctgtctcttcggagacgctgctatcttagcgtcagcgagggaaggttgaggaggagccagagccgggtcctgcagcgtttctcgccatcagcgcccgtcgccatctccaccatgcagtcccgggaagacgccccgcgctctcgccgcctagccagtccccgtggtgggaagcggcccaagaagattcacaaacccacagtttcggcctttttcacgggtccagaggaattaaaggacacggcccattctgcagccctgctggcacagctcaagtccttctacgatgcgcggctgctgtgtgatgtgaccatcgaggtggtgacgcctggcagcgggcctggcacgggtcgcctgttcccctgcaaccgcaatgtgctggccgcggcatgtccctacttcaagagcatgttcacaggtggcatgtacgagagccagcaggccagcgtgaccatgcacgatgtggacgccgagtccttcgaggtgttggtcgactactgctacacgggtcgtgtgtctctcagtgaggccaacgtggagcgcctgtacgcggcctccgacatgctacagctggaatatgtgcgggaagcctgtgcctccttcttagcccgacgtcttgacctgaccaactgcaccgccatcctcaagtttgcagatgcctttggccatcgcaagctgcgatcccaggcccagtcctatatagctcagaacttcaagcaactcagccacatgggttcaattcgggaggagactctagcagatctgaccctggcccagctgctggctgtcctgcgcttggatagtctggacgtggagagtgagcagacagtgtgccatgtggcagtgcagtggctggaggctgctcccaaagagcggggtcccagtgctgcagaagtcttcaagtgcgtgcgctggatgcacttcactgaagaagatcaggactacttagaagggctgctgaccaagcccatcgtgaagaagtactgcctggacgttattgaaggggccctgcagatgcgctatggtgacctgttgtacaagtctctggtgccagtgccaaacagcagcagcagcagtagcagcagcaactctcttgtatctgcagcagaaaatccaccccagagactgggtatgtgtgccaaggagatggtgatcttctttggacaccccagagatccctttctctgctgtgatccatactcgggggacctttacaaagtgccgtcacctttgacctgtctggctcacactaggactgtcaccactttagctgtctgtatctctcctgaccatgacatctatctagctgctcagcccaggacagacctctgggtgtataaaccagctcagaatagttggcagcaacttgcagatcgcttgctgtgtcgtgagggcatggatgtggcatatctcaatggctatatctacattttgggggggcgagaccctattactggagttaagttgaaggaagtggaatgctacaatgttaagagaaaccagtgggcattggtggctccactgccccattcttttttatcctttgacctaatggtaattcgagactatctctatgctctcaacagtaagcgcatgttctgttatgatcctagccacaatatgtggctgaagtgcgtttctctgaagcgcaatgactttcaggaagcctgcgtcttcaatgaggagatctattgtatc

SEQ ID NO: 1885344 - DNA, 4001 bp, Homo sapiens
agaaaagaaaaattaaaaaaagataagaggttatgaagaccaaggttttctctttttttgagatggagtcttgctttgtcaccctggctggaatatagtggcccaatctcagtccactgcaacctccgcctcccaggttcaagaaattctcttgcctcagtctcccgagtagctgggctgcttgagtgtcagtatggtggtcagaagaagcactcctccagaatgagtgaggagacatggacaaacacatcgacaaacctttcccctttgcttgaacccactgaacacatgctccaacatggccctccaacttccagtttttttgtctcatgataatgtaaaccaaaaataaaattctatgcacctcaacttactgatgcctgccccctgcctcagccaaaggcattccaaagtaaacctgaaaatctagttcaggtcgtgattggaagggggttgtctgagatccctcattttactttcctccctttgaaattcaggcacagctaggcagttttaacattacagcagaaatcttaagactgaagaaacagactttttgtagcaataagacaccaaattccagcctgactttggtataacatcacatgacagagagcaggccctgaaagaaataaaaatattttactccaaaatgtatttctttgacatattttgaaatgaccctgcaaagctgcctcttgtggggaaaatctacattttgtaaaaaaaaaaaaaaaaaaaaaaaaaagtccctttagctttccaagtctttttcctgatctaggagagaattcacttaagagtcgggcaccttttcaggtctgataagaactctgaaacttgctacagggaggcttaatctgcaccataaaaccttggtccttggtctaggactggatggggtggctcatgcctgtaatcccagcactttgggaggctgaggtgggatcatttgaggtcaggagttcaagaccagcctagccaaaatggtgaaaccccatctctaataaaaatacaaaacttagctgggtgtgttggtgcgtgcctgtaatcccatgtacttaggtggctgagacgtgagaatctcttgaacccaggaggcagaggttgtagtgagctaagatcatgccactgcatttcagcctaggcaaccaaagcaagattctgtttcaaaaaaaaattctcattttaaccataccctttgatagaggcaggaagcagagaaattctaggcggacaggtgggtccctggcaaaaccctacctttgagcccaaaagcctgaaacctgcatccaaagtgagaacgtctatccccgtttgctggctctcttccgatcggttctttctgaataatgtctttttactgattgaatgttgccttttctgaaactacctatggcccaccccatgcccctatcctgtgcctataaagaccccagactcagtcagtagagggagagaagtggcttgactggagggaggtgacttgccttcagagagacagatgggcttcagaggagagatggcttaatttcagagagaaggcttgactacaaggaagagccggctggagacagccggatttcatgggaagattacttgcctgtcctgtcccctctccggctcccctctttgctgagaggcatttcccattgcctaacacaattctccaccttcaccatccttcaagtgtctgggctatctcattcatcttagatgccacacaagagcttgggatccactgaatgtgggtacccaaaaaaggctgtcacagtggccctttgcgctcactggcagagggcagccaccccacacgatgaggcaaggggctcactgagctgataacacaccactgtccacagacggcagagctaaaagaacactgtaacatgccctctggagcttcaggggttgcaggcaccccaacctgggcactgctgccaggcctgcacgcagcctgctcctggaagcacccaaagcagccatccagatcccgcacttgctcactcatgtgctccctgctgcaaggggttgagcgtggcaggctgagtaaatggggtacccccgtcacaagtctgacaaaggggttgagaaaaatcctgcatcaccttggcaactggataagtcagttcacttagtttacaatctccacatactcatttgtgatgcaataagggctgattgtaacataacccagttttaaaatctcaagtttaatgagtaaaacaaaatgcacaactggtaaagccagttgtatattttttttaaacataggaatacttatgagaagtttgagctaggggtggtggctcatgcctgtaattccagcgctttgggaggccgaggtaggtggatcatttgaggtcaggagttcaagactagcatggccagtgtggtgaaactccatctctatatttttatatttcataaaatataaaagttagctgggcatggtggcacatgtctgtagtcccagctgcttgggaggctgaggcagaagaatcacttgaacctgggagatggaggttgcagtgagctgagatagcgccactgcactccagcctgagcgacaaagtgagactccatctcaaaaaaataataataataataagaagaagaagtttgaaatgtgtgattagaaccttgctattcaaagtgtggtgcctgtggccgagcatggtggctcacatctgtaatctgagaactttgggaggctgatgtgggaggatcacttgaggccaggggttcaacactagccttggcaacatggctagagcctgtctctacaaaaaaataaaaaattagccgggcatagtagcacatgcctgtggtcccagcttcttgagcagctgaggtgggaggatccttgagcccaggaagtcaaggctgtagtgagccatgaaggcaccactgcaccccagcctggacaatagagcaagaccctgtctcaaaacaaaaaaaaaccaaaaagtgtagtcccaggactaacaatattaagttatctcagcgctttattagaaatgtagaatttagaggcccatctctgacctactgaagcagaagctgcattttttttttttttttttgagatggagtctcgatctgtagcccaggctggagtgcggtggcacaatctcggctcaccgcaagctccgcctcccaggttcacgccattctcctggctcagcctcccgagtagctgggactacaggtgcccgccaccacacctggctaattttttgtatttttagtagagacggggtttcactgtgttagccaggatggttttgatctcctgacctcgtgatccacccgccgtggcctcccaaagtgctgggattacaggcgtgagccgctgcgcccggccagaatctgcattttaaaaatatccccaggtgattgctgtgcatgtgaaagtctgagaagcctagtttagaattctggctcccccaatttcctgtgaaactataggtgcatcattcatcgttgtgactgcagatttcccatctgtaaaatgggaaagagtgatgcttcactcatgtacacattcgataattactgattgaatattcattgctctggggatagaacagcgaacaagacaaatagtttttcagtcctcttctagctctaaagtttcacagctctttaatctgattccttgatataattatttttccctaggctttcactccctgccccacctcccgatctcatgagagtacttacagcatcacgcaattttgcataagaagacaggtgccagagaaaatgggagaaaacaactccctcaagatgggaaacccacttaaaattggagtaagagaatgaacacatacattaaacgcccactgctgctgccagcttgctacaaattccctccataaggagtctaagattccctgacttgactttcaaaattgctccacaaatcatgggagatttcacagtattttacaaacagcatgattctgacagcatgtcaggcatctactgttgtg

SEQ ID NO: 1885345 - DNA, 4001 bp, Homo sapiens
cagcttccatatatactgtattccatacctcttagtcatcttcaatcttggcattgcccaagggcataaacatttcaaaaccatcaaacaaaaaaaacttgaaattatgtacagttactgagagactggataagtattggataataaatccttttcaaaatcagaatggcttatggggttttgcttttaataaaatttcagaagactaatggaattatcagttcatgattataaaccagttttggtgacagattactatatgattcttgagatacaactagacaaaaattgagggacacttttaacaaaacttttcattcctatgtacttatttctcagcacttacagccttaagaaaatggaagagaatcagtgttaaacttcattgtagcaagaagttagcattcatctatggatacaggaactaacggtgcatgggaagcccatccaggtcttaaagagatgaattttcaatacaattttattttttatatttaataattatcagtattgtgatacattttattgtgatcaattgtgtagtactagtaattttaacaatttaatccagaaaaactaaaattctatgagcaggaaatataaatttccatttctgtacttctttcagcagtatgataggatgatcaataagactttcaagtatgaaaaagataacgggtaaaattctatcaggaaagtagaatgaagatatgatttaatgaagcatgtctaagaattctagggaagaaatttgggtgtggtcactgacacgtgtaattaaacaaaaacaagtagatcatatacctactaatattttgagggaatttcactgccaaagaaactaacattggatattccaactgctaaacaacttttggactcctgctacgggctgcattcacccccgccgcggccacccccaattcacacactgaaatctaacaccaataactaataatgagactatattcggagacagagactttaaagatgcaattagatcaaaatgaggcctttagttcagccctaatccaacttgactagagtgcttacaagaagaagaaattttttgtggcagggacggggagggggcggcggagagatgattttaagaaggaagagtaatgatgtaaacttaggatttttaagagttttttgtgggttttttttgtgtgtgtgtgtgaggtggacgatggagggtaccatattactgtagtgtttcgattcagttggatatatttaacttgcgtcactatttacaattgctgaaaattacatttttttcaactacttaaacattttagacagcagcttgatgtgcaaatccagaatggggcagggtgggatgagcactgggcgtgagtgcagacgcttgggcagcgccggtttcgttagaaagtcccttggcaggccgccgctgtggcccaaagagtaggaagccgttccagtctcacgtccaccttttggcaatatttgagaccttgtacaagaaacactcttcctgtatcagtttagctcatttgtaaaactgggagactactgccttgacgggttgtaaagaaaagagagaacgtttgcgaagcgtctggtgcaccttaagcaagagcggggagcgctactgtagactgcaaagcaaaggaatcccgacccaaggcaacgggacggttgcggggtgactctgccgggtctccaaactccctggcgcctgaccctgcctcgaggtggactggtccccaggccattccagacccgcgccccgcccgcgtttccttgcgcggctccgccccggccgcagggaggcgcagcggccccgggaacccggatccttccgggacgcttcgttggccccgcggagccggcggagcaggtacgcttgcaggggccgcccttagttcttgcccggagccgccacagggcttcgggagctcggcagggtgggggaaagggatggagtttcggcctggggcggcgggggcggcccagaaaaggcctagcgtcctgggctgtgtgggtgtagcgtccagggcgcgtcggtctctatggcaacgctccacacgcggaggtcgggtacgggtaagcgtcttgccactcacccgcggccgcttccaggggcggccctaggggagaaggaattttcctaatttgggggcttccaccctttggtgccacttgggcgggagggtcgcgggccctcagttcccggcgagtcacccccggccccaagtccgtatgcgtctctctcagaacccgatcctccggtgtctgcagcctctcctggctgcggagctggttcccagccccctgcaacccagtaccgacttcccaccctgacgtaaaattattcgaaaacaagccccctgctcaccccattaacaacaacaacaaaactgtattatgccctaactgtagcataaagaggaaatagaaggaaagcaataagtaagaaagtacatatttcaatctgaaaatgcttggcactactacccttggaaaatgtagagaagtagccagtagccgcgcctggggagtcgcctgaacgtgacggcagcaaatgcagattgttgggtctccgggaccaggagcagcgtggccagtgaagcgcgtggttttcccaaatggtgaacaattcttggtaaacctccaaaccgaagtgcaatcaagccttgatttacatgtagttgcattcctcgaaaaaaaaaagaagtgttcattaaaactgcaaaaatacttagcatttcgatgtaaaatagagtttggttctagccacaaacggatttttccacgcacaggaatgtataggaagactctccaagattgtagggccgcggggtaatcctttattgtgcgggactgtctctcgaatcgcagaatcctaccatctcaggccccaaccacctgtaaacctcatgcctctgaatcttggggaaacagcttccccacccccatatatttccagaattccccctagggggcagtacgtccccactaagaaaggctgaactataaaagtgcacaagcctaaggacattcctgctttataaaggtgcgaaacaccggatatagtatctttcattctcagaacaaacttgcaaaacaggtattgttattccattttagaaattaggaaagtgaggttttgccaggttaagtgacttacccgagaatacagggcaaaagtgtatcaaagctgagctatgacccgtgtctgaccaagaaactctgtctcatttcagttatctgtggccacaaagaaagttatttgtctctgtcttggcaaggctgggaggaaagttttagctaagtgagttcttttacactttagtcatcagttttctgactttgttagtctttatgagacgtgtgtgataaatttacattactctaattccaggaaactcagcccattggagaccatggataagtacgatgtgattaaggccatcgggcaaggtgccttcgggaaagcatacttagctaaagggaaatcagatagcaagcactgtgtcataaaagagatcaattttgaaaaggtaaagttaagttcaaatttctgttaattttcagtgggatattcagctggcttttaatccaatataaaaaggaaatttttattttttataatttcgaattttaagccataattgatttttgttaattcaacctcctaagtccattgtccaaacagcaaccaatgatctcatttttaaaaagaggctggacgcactggctcacccctgtaatcccagcactttggatggccaaggtgggaggattgtgtgaagccaggagttcgagatagcctgggcaacatagcaagaccctgtccctgctaaaaaaaaatttttttaatgaaaatagaaaagaaataagatcacatccctgtggctcctatggccctccttagggtgccctgcaaggccctgtgagatgccagcctcctctgttgccctgacttttctctgtggtgcacttcctctctccttattcaggtcctctacgag

SEQ ID NO: 1885346 - DNA, 4001 bp, Homo sapiens
aatcctaatatctatcaatagaaaattggtaaataaaatgcagccatccaaaagaataaaaaacaattattttacaaatatggaacaacttcaagtgacaaaagcaatgtgtaggagttgtataatattatatagtatctatcgtttatattttttaaaaggtaaaaaatatactttatagacttagaaataaaattaacaatagaagtataaatcgaactcataaaatataagtgaatagtaaagggttgactcagcagcaatgggattgcatgcctcaaagaaaagactgactcttgaccaactattagctcttgaaatatcctgcctgataagagtgtctttgtatacctcgggccttgggcaatgccagagtttgtgctaataatgtaatttatggtgaacacctgtttttgcttgcctggagccctgggtcgtattgtatgagtttgacttcatagggaggaatgggttggacactgcgtatttagggtcaatagttggggggcttcatgcctaggcagctgaccttggacacaaaagtttgtgtgagcatccctggttgacaattctttgtccatattgtcacacgtcattgctgggagaattaagttctgttcatataactccacagggagaagacaactggaagctgctcctggttctgcctggactctgccctaagtgcctttttccttccgaatgtattctatagcctttcatcgtaataaaccataacggtgaatagaacagcttgtctaagttctgtgagtccttctagctccttattgaatacggtggcggcattgggtccctcaacacactagataaagtaattagagaagcatttatttttttcagatgctggcattgaaaaggaataaagactacttattgagttaagtattcaatttaagatgttagataaagggcaacaaaataaagaaagtagaaggggctgtctactgtttaccatcacactttgctgcctctcttggacaatctatagacaaagttaataaaagagtgcaacaagttttccgaatgcagaattgatatacaaaaaaggattgcatttctatataccagcaacaacaactcagaaaacataattttaaaagcaacactactaaaaataacaacataatcattatggaatcatgaagatgtcaattctcccaaaattaatccataaacttgatgcaattccaatacaaactcaagaggatttttttacaatactgaactagctaatgtcacaattcatgaggaagagcctatgtttaaaaataaagcaccaaagtgggagacttgttctcccagatttaaataattattaaaaagttaagttaaacagtgtagtattggtgcagagatagatgtataagctaatgaaatgaaagagggcctagaaagagcccaaatcacatatggaaatataaatgacagacatggcatcagaactcagtggtaaaagatgagagtattcatctcccatctttttcaaaagatgttgaaattcaaaaggtgttgaaatttttggctgttgatattataataaaaaataacatttggtccttgtccttagttcctgacacacagctcctgaagtccttggaatctccagagtgatgactgagttaatcaccaatggtgaatggcaatgattatctgtgaggaccaaagctgagtcttcgtgcttagggcaggagcgcagacaaggagaggggctcttccttctgagacttgtcatctagaactcattgtcactggaagccagagcctaaatgggcctatcagttgccttgggttataagaacaagtttgagtatttattcatttatttatcttgagttcggggcccctgtgtatctgctcactgcctgcccgcagttcagcttgtgcttggctcactcaccattcagcgaaatgaaggaaccagcggaatgaaggaaccagcggagggacctccgggaggaggcgctgcccagcgagcctggcgccggggggcggggcctgacgggagctctgctcaggcttcaacatggcgggccgtttcggttgacttcgcctgtggaaaccgaattccccctccatggtttccccaggatatgagttgggggcctcacctcgcctataagggtcaggcgagctttctggatgctcgagggacctttcggcctgcgcagccggagcagcttgtcccaatgccctgccatttctgtgagggcccacgaggcctggaggagcctcggagcccccgcaggccctcgcgtcactgcctcaagagggtgctcggagccctgctcgggagctggtccccaacgaggtgtggaaccccttcttgctggaactccacggagagactggtaataagatagtaataagaccgactactgtttattgaacctccgctagtcactggctgtcacgggttgggcgaggggtggaatataaggcccagagttcctctattatagccatggagagccattaatacctgcttaatagagttgtggtgagacatggaatgggcaagaaaggcactcgatttatttgatttttagaatcatgattattattattattttgagacggagtcttgttctgtcgcccaggctggagtgcagtggtgcgatctcggctcactacaagctctgcctcccgggttcaagcgattctcctgcgtcaccctcccgggtagctgggatgacaggcgcgcgccaccatgcctggctaatttttgcatttttggtagagacggggtttcatcatgttggccaggctggtctcgaactcctgatctccactaatccacccgccttggcctcccaaagtgttgggattataggtgtgagccacctcaccagaaagtgccaagaaaggcactttagacagtgccagagttgaggatttggcctctgacttgctgcagttgccacactgcagttgccacactgtggccttagaacagtcttatccagtcctgaaaaccccagtgccttggaaacatcaggattggtcagaaggacagtaagtccttaaggcgccagcccctgctcctccccccagattgaggggtaagtattccaagctctatgcaggaccctaatcctggatgtggacacccacagtcctgctaggacctgcttccagaagagttgatcccagccgtgaaagtgcatgatgccttcagcgaagcaggcaggaaaggctcaagtgatcctcctgtatcaccctggtgagtagccagtagctgggaccacaggcgcgcaccaccacgcctgcctaatttctttgtagagacggccttcgtcatgttgcccaggctgctctggaagtcctgagctcaagcgatgcgcccgccttggtcttccaaagtgctgggattacaggcgtgagccaccacgctcagcccaatttgtgatcttttatgcactctttcatgtagcatgttttcaaggttcatccaacttgcagtgtcttaatgctgaataatatttcattgtgtagatataatgtatttttcaagttttgtttatttttaattggtacacaacaaatatttgtacatatttgtgtggtacacatgtacatgtgatatgttgttacatgcatagaatatgtaatgatcaatcagggtatttaaggtatctgtcactttgagtatttgtcattgccatatgttgggaacatttcaagtcttctcttacagctattttgaaatatacaatacattgttgttcactgtagtcaccctactctgctatagaacattagaacttaactccttctatctaactgtattaaccaaccactcttccctgccaacccacacacccttcctagcctctggtatctatctgtccaccgtcaacttttttagctcctacgtatgtgataacatgcaatatttgtctctctgtgcctggcttacttcacgtaacaatgacttccagttccatccaggttgctgcaaacgacatgatttcattcttttt

SEQ ID NO: 1885347 - DNA, 4001 bp, Homo sapiens
agccagaggatattggccaggggacagagtggatggcacagggttgaggaaagaagccaatagcatgtgtggagatgcccaaggggtgaagagggagatcggagaagcgggacaggccagagggtgtggccctttcctttcatcttgcttttaagatgcaacagatttcagcagtgtttctcaaagtgtggaccagcacattcaacatcccaggaaattttgctagaaatgcacatcctcgggccccatcccagacctcctggatcagcaaggagccatcagagcccagctgtgtgagcttaacaagtcctcggtagatcctgacgcagcccaaggctgggcaggctggagggcacctgcatgccaggagagcggccgggagaagagggcaggtgctcagagggagtgtggcctagggccgtgtgggctgaggaccagggagggtgttgtgccttagactagtggaaagggcagggcctgcatttcaggacccttctgcctgatgacaggctttccctgaagctggaggggcagggttggggtgggggggcggtgggggatggggagtggtgaaggttccctgaactgacagggaatgagaggagcagacccatttgagggcactttttgcagaccatgtgtagacaggaggtagcaattgtgccgccgtaggcaccctgggcagcccagggaacgcttgtccacagagggagaggctcccatccactctgaggcctttccagagttctcctttcactggtctccaaagagattctgtagaaccaagtgaaactgctgatactcaatacgtttctcatgttaaacaaaaacaaaaacaaagcagccatttcttacagatttattcaatactttctatctggttattatgcctcttattctgtaattattttttattatgaattatttatttccagatctgtctggcctataaggcctgtaggcactataagggggagtactgcgtcaccttcatctttttatccctttggccttgctccgtgcctgaaagctcaccacactggaacgtccaggtgcacatgtgccactggacaccgggatgttgccggatgctcttttggacgctggaatgctggtgcattgttgccggatgctggaatggtgcacgcacgctctgttggacgctggaatgctggtgcattgttgccggatgctggaatggtgcacgcatgccctgttggactctggaatgctggtgcattgttgccaaatgccggaatggtacacggatgctctgttggacgctggaatgctggtgcattgttgccggatgctggaatggtgcacgcatgctctgttggacgctggaatgctggcgcatgtgcacatgttattggcatgagctgtagttcaaacctcagccatatgatgcttgaattcccaaaccattcgtggaaatgtgtacttcttcctgctggaattctctctctctctctctctcttttaactgattggggagtgaggtgggggggggggtcttgctacattgcccaggctcaaacttctgggctcaaatgatcctcctgcttctgcctcagcttctgcctcggcctccggagtagctgggactacaggcctgaaatactgtttctttaaggaagggcatgttacctataataccaaaccacaaaaggatagctgcggttttgggcgaggagagctcagagagtttcttgcatatggccctgtgatggcggccatggccctgcatagacacgagctggaatctgcaggtggcagccaggacgctgcgtgtgtcgagtgcacagtgtggcttggtgccaaccatggcgagggtggagagccccgtgcctgcagcgcgcgcttccctcactgggtcctgcgtccttgggcaggcgatgcccctgcggggaggggctggtccatccccggccagccacggacccacgcatggacccagcgacccacggacctgcttacctgggcgcggcgcgggtggcatgcggccacacggaaggggcgcgctgggctgctgcggcctctgcagcttctacacctgccacggggcggccggaggtaaagggaggcggcggccaggcgcggccccgcggaggcagctgcactcgctcggtccactcgcggcttcgcggctgcccgcaaaccaggagggcgtggagacccggaaccggggggaagggcgggggcacttgtgcggcacccgcggggctcccaggggacctcggcggtgacacgaatttctaggtgaccttggcggtgacacgaatttctaggtgacctgtgtgatacactaggtgacctagtgacacaggtgacacttccaggtgaccgcggcggtgacccgcggggctcccaggtgacctcgttggtgagccccggggctccccgacgaccgcggcggtgacacgcggggctcccaggtgaccccggcggtgcactcacaggactcccaggtgacccgcggtggtgacacaccggggcgggcgcgcgccgcttccgcttccgccgagccgccccccgccccccgcggcgcagcgcgcgcccccctcccggtggcgcggaaccaatcctgggcagggaggcggcggctggaggctgaaagcgctgccgtggccccctccccgcctccgccgcgccccctccgcactcgcacggccccacccgcaggcgccccccgtgcggaggaagcggatctgccaggatcatttttgttgtgtcggaggatgaggttttggctgaggactgaagagatggccttggaagaaatggtgcagagattaaatgcggtttccaagcacacgggtaggaggagctgctggccgtcagtgatctgtgcttaagcttgacatcatgggctgaaatgtggggaaatgcgtctgatttttgtaagccgccctcgtgttcctttctagccgtggtagctgtgacatggggggcactggttggcagctggtgtgttttcagaggctgtcggcgatcgtatgctgcccgggatagtcaaaatgactgcacgttggtgacactggctctctcagggttgctgggtctgcatgcggagccatttgtgtgtctgaagtctgcccatcaacctgcctgtccgcagccctcgcaatggagaatgcattgcgaatggagaatgatctgagccaagggctttcagagcttggggtttcagagccaggggtagggatggtgaagctacctggaagctcgttttgaggatgaaaaaacctggactaatcaggtggttcttttcttcattaaatgcaatttaaacctaagacagatgtttgagacggtatgggtaaagagtggactggacgttcattttcagtattaatcgaaatattacttcaaataagctttgaagagtagttcagatcgattcttttaggtgtaagcagagactgggctgacagcttgcatctggccgtggctttcaggcggtcgcatctgagttctcaggctgtgttatgcagaagggagaggcatccttaactcgttttccttgaaatgaagaggaaataatgatatatcattaaaagtaagttgccaagtgttttgcctgatgttgccatatgttatgtcatatatgccattactagttgtctaactagtacttgcctgggagattaaaatgtcagttgcttggtttgggtgtggttctctttctctgcccaccccgatggattctgagagtgaaccagtgattaaatcagcataagcaccatcgtatgggatggtctaatcaagatgtttttaatgggggcttttatgatcaaagctgctgggtttattgtatgtgggtcgaaagaaaacaaaaccattttcatgccgtctgctccctgattcttagagaatcagctctttttctgaagcttgagtggagcttttccgtgcagggtttgcagggtttgagtatggtgaagggctgcgtggatgccaggttcacagggaggcttccgatcggctgtgggggtgga

SEQ ID NO: 1885348 - DNA, 4001 bp, Homo sapiens
gtgagacccagttcattctgagcttcagttttcctcaagtttttcataggtttgtgctatttttatatatatttgttttatattattcctcatcttttatagtttgtaggtgacttttgttttgatgtggtagaacatttgggaagtagaaaaaggcatttaaaaaaggaaaaaaatataccctttctgaggcagtcactttaaatattttagcctgtttccttttttcccctatacattttttgcttaatgttacatcataaggctgtccctgtgtcattaataatgctttgtatgcatcatttttgttagctacctaaagtacaaccaggggaactcaactgtgatatccttggatatcacctcatatttctcatgttttaaaagtacaggaaaaacagatatggggagtcactgccacattttggaccaaggaagggacagacctaaaaacagtcttccccagctccatcccaaggccgatactctcatatcatggtgctgtcattggagagggtgcagtgtaatgtggcccactccatggcagagaagttagatgaggcatcagaggccagagctggcaagcaggaaattacccactggggttccagggagacttgctgggaagctgccctttgggattctggtgaaacctgctaggaaaccacctttagaggcgccaccgaaagttgctgtggtgaacaccacttaatgtcctgcacaccaaccaggcatcacagcagtaaaggagacaaaaccacctgatccaggaagtgaaacttgtttgctagtggagtcccacctgtgccctctactgacaaaacttaattgtggcagctggcaaaggagaaatggtttcaggggccagagagaagggtagatttgaggctaactggcatacctttctagttaataccataactctttcttttgaccctttaaaaatctgccttctttatttgagtcttgaactatacctgtttatgtgctctgtccctttgcttcagaaatacagactttaaatgtaacttgggcccttttttaaggtatttcatatgcatacattgctaatcaacctctctttgatgagagtcacttacaatagcagttcctctatcaagaaatcattcaaatctattataatactaaagtacctattacttgtttataatatgtagaataatctacataacctagtatacataagtatgtattatatatgcatataatagatacatagatacaggaaaaatttgtaattacaaatgtcttacaaaagaaaaattatgtcaactgactaaatagtttcttacagagtagtatgatttttttaaaaaagtccccagttgctaaaatatcaacttttccttgataaatttgatttttattaatttggctaaatgtgtatttttttcctagtcttaaaaaaattggcacaatagcttatgcctgtaatcccaacactttgggaggctgaggtagcaggatagcttgagcccaggagttggagaccagcctggttaacatagtgagacctcatctctacaaaaactttaaaaagtactcaagcatggtggcacatacctgtaacccagttactcaggaggctgaggcaggaggattgcttgagcctaggtcagggcttcagtgatgtattcgtgccactgcactcaagcctgggtgacagaatgagaccctgtgtcaaaaaaagaagagaaaaaagtaaaattaaaaaaaatacttcaaattgttgcataaagggaaaagtaagaactagattaattacagatagagctgttcttatctatgcttctttttttctccagatgtccttgctccacagtatccatggcagtcaaatgacatgtcgatgaatatgttaccaccaaatcatagtagtgactttttgttggaacctcctgggcataataaagaaaatgaagatgatgtagagattatgtcaacggactcctcaagcagtagtagtgagtctgattgaaaaaccttaaaagacaatatacagaattgaatactgtagaattctgtttctttaacagtagcagggaaatgtaaactacaggtgacaaaaaatacccaggtaaacactggctttggtagaattgtgcagtcattaaaagtcaaaattttttgactttctttttaaagccaaagaccatagttttagttttaagccactaggtagatatttaggggaatagtcaaaatttactgttgaaaaagcagttgctatgtgctttcttaccctgttctgttccagttttgctggatttgtacatagccattctagaaatagagttgagggaaattatccatatacatatcactaataggcttcttggaattatttagaaaagcatttttaaactggcagtggatgactgaataggcatcatatttctttttgtgtgtcatttaaaagtaacaaaaactgccatttgacagtaaaggctcttggcttctgttggaggcatgggaaattgtctcaatttgtacagtttgtaattgtaatttttgtaaataaatttgtttgtacattgtatgctttttttttagtttaaatatactgtcagtgtaggtaggaaattatttctgtaaatccagttgcattttataatacttgagtgactaactgaattgaaacctattacaattaatagggttctcaaaggcctattcctattagaagaaataattttttttaataattgaaaaaatttaccacagccttgtctgattttaagaatagattgtgtgaagatttagaatggaaagcaaccatttcttcccttcaccttcctcttcttacagttccccaggagtcatttttaaccacttttaatttctgttggtaacctctgtgtttaggtaatatgcttatacaactatttcttgatgtatcagttttagacaatgtatcttctgatttcaaaggtaatacaacatttaatgtgaaacatttagtgaatacagtaaaggagaaaataaaattgttagcattctacccagagataatatcaattcatattgtagtgtagatttttttaaagttcacatacacttttttgtaaaatgagaataatgtttatttcctgagatactgctgtattttttaattgctaatctgtattcttcaaatgaactgagaattccatttttccatcattttttccttttgattattttcgatctctagaaaaattggaaaataggagattaatcttatattttcaccatctagaattaaggacatacaatgtttgaatgtctttccctccagggttatttttaggaatggactaacacaatatctaattttaaccttgccttgtccgtatactaggaatattgatccatgtgtatacattcttgaaagatttactttaatggctaaaattttattgtggtatgtgccataatgtaactgcctgtttttatcaccaaatctttagggtagattcaaaaggattgtgtttttcaaattctttaatactgtattagttttcagttgctgccgtaacaaattaccacaaacttggctcaaaacaacacaaatttatcttagttttgtacatcacaaatgtgaagtgggtctcacctaaaatcaaggtgtgagcagggctgcattccttcctggaggccataggggagaatctgtcccctgtgtcttccaggttttagaggccgcccttggtcctgctccaggcccctggttggtgagtgtttctcattctgcattactgtgatgctcttctgcctacctgtcccatatttaaaggatcctgtgatcattctgagcccactggataacccagaataatcttcttatttaaagtgagatgattagcaacctttattctgtttgcaaccttaattcttccttgccatgtaacaaaacaacattcataggttctgtagattgggatttagacatctttggggaaagggggtcattatccagcctatcagaaataatccaaact

SEQ ID NO: 1885349 - DNA, 4001 bp, Homo sapiens
gcttggtaaaactatttgtgtttaagccaggtaggctgccaacactgggcatacacccagctttcttggcctaaagatgtgttctcctaggtagaagccacctggaatggccaaaaacagaaaaaccagaactatagtgttcagaaaacatctacagtgtgtgcagataaggagagaacaaaagaaatcaagatatttagatttgtattacaactgctctacaaaaatatggtaatttttctagtctgtcaagagtgtatgtctgtacttttgatctcaagacaatggggacagttatattacataacccatgcaaagtcacgcttgatacttaagactatataaaaatgatggttcaatttcaaataaccacactgatagtagaattcaaacttaatctctttacatccagaggtcaaattacattatgtatttgcctctaataaatagttagaggaaccataaactcaggctacagatgtctgtatagcctaaattcacctttcatccaaccaccagtaaaaacttatagttttcacataaaactatttttatctttcttgcaagcttcttatctgaaataaaatttgcttagaaatcacatcatacatttagtgtacagcacttgagaaaaaaatgtattccttatttgaagatcaaaaaccctgtacatgcttagtaagtctatatatttaatttaatctgtcaaaagtatctttaacatatcatcaagatcatggtatagtaatagacttaaacatgattcaagatgtttgcaggctcacaaatataaaccaagacataatatgccattgataaaagtgtcagctccatttaagacattaatgaatactacaaaggtgacactttatattctattagttatttgtcttcttagaattggtaagctacataaacataaaatgacttaccttcttgagcttctgaatccatcaagtaatgaaatgatggtaggtgatatattgatgttttcttcattatttcttgaaaactagatagataatacattaaaatatcaaatggtaataattcaaaatatgtatggagtgcttttatagtttcttaataaagcttaacttcaaatacagcagacaaaattatattaaaatatcatatattaacgaagcgtgacttaagaaagaccatctaaacactatctagaacaaattaaaatcagaacaaaagcttctgagtcagaaattttaaaaagctactacagaaagaaaacatattcttcaccagagactacctcagttgtaacaaagaaaggcatcatcttcatattgactagtaagactgcaatcctaaaatttaagaggcgattaaaacattgaaagttcacttgttaccatcaatgcatcattagcacctatgcaatgtcaaacagcctcattgccagataatcttttgagcagcgtctaccttaaggagtccataccatcacagccgatatatttaaaactgaagaaactatttatgcctcttgaatagagcagattatctgaataaatttaacagttattcaaactttagaaaataacgatttgatattttacttctcaatctggggtaaaataacaattgcagtaccatgaattaatatagcactcctttcttccgagaatcccaaagcacattttacagccaccacattttcttttacagcatacttcagcaagttagaagacattattttccctacagtttgcaaatcaggaaaaccaaggttaaattatgtcattgaggctacacagctaaaacgatagcaaaagtggtcacatgttttgctcccaatttagatctcttccattaaagaaagacatgtctgccttaaggctgatatttaaatggaaagcctggacatacctaaaggagttagctgagtttctagaaggttaaaatgtatcatccacaatttttgtttttgctgctgggacctctggtagtgactgaaaggctagcatcgcagcacagtttactactatacacactcgctaccactggtaacgagtccaggcagaagggattaggattctgacagctgcagctcccacgcctctggttatacagcagtgagacggcaatgcccgtaactaagggggcagaaggctaggaatatcccacgagtgtctcgtgaacagagctaaaggtgaatacaacccactcccggaagtgagtgaagactatttggaggaagtgatccagcttttaacttggatgccaagagttattctaagactccgtggctatgacattctaggaaatgaacgctacatatttttcatgtcacctatctgcatgggaacactgtctttagactccaacaaccatactagaatgtctgtagcattgctctgcacccagaaatcaaactaccatgattcctttttattcagactgaatgggcaggctccgaacatagatccatctgtgcacctgcccaagtgcatgtatgtgtgcctctcagaggacatacacatttcccatgccactggaaagatccctgatagaaagttacagagttaagataaagcaatattggaaagttaaacttaggagtgtgactacaggtccataatgtatacacagatgaatcgaggtcactttaatgtattggaaagggctaggagttgggaagcctgattttagttattcctgcctataattagattgtgattttaagccatttacttagtatgtttcttggtttcatcatctatagaacaagtatatatcggcagggtgccttagcctttgggagaccaaggcaggaggaccactcagcccaggaaatggaggctgcagtgagccgtggtcacaccaccaaactcccgcctgggtagcagagcaagaccctatctcaaaaaaatataaatgtcttttaaaaatgatacaaaagtcatacaacatatatttgtggggtgaatattataggtaaaaacattctggaaagttcaaaatcctaagcaatgtgaactattattcataggcagttaacttggggcagaggatactctttctttggggcttttttaaaaacaaaataaatgacgaataaaaaccattgtcttttttaaggatttttttgaaagatcatgcaatcctcactgttagatctcttaagaggcagaatccctcaatcaagcatcttaaccaacatgactgtttaacaaatacatacagacttctgcctccagctgtaagtagcttatagcaaacctcagcttctattaacaatgagaaaaatagatttttaaacacacacacacaccccacacaaacatgcctctgttataaagtatcagagagctgtcaaggcagccaagaattccaggcattgctgtttcctgaggaagccaaagagaagaccgcatgtaaggatagcagcggagcatcaggcaatctcacagaactgtggagacaaaagaagagtgtggctgccaagacagtcagatttgtgggcccaagatcccagaaaaaagggagagagaagcctgacgcttagtgctgactattcagtcgaagaattgactgattaagctgtttagggcaagaggctaatttttgaagcattcagtggcaaaagcagatccaagcgcaaaagaagaaacatcagggcactcctggaaagtgactttcctggaatacgggtgaaactagaagctggagtcttacagaaaaaactgcaaactagccttcaatctactttgtcctcgctggctgcactgaggtgatcttcccctctgctgcctgtccaaatacattctggaatcctctctagaggaaggtacagggtacctataatttttcccatagactgtccaacattcagttaaaatttacccatgcataccaagaaacagacaatagaaataaactcataggtgacttagatattggagttattcgacagactttaaagtaactgtgattaagatactcaaaaacagatgacaagaagtacaccagggaactggaat

SEQ ID NO: 1885350 - DNA, 4001 bp, Homo sapiens
cagggtacttcagcattcctgaggaataaacatgatttctcttttcctcccactgcgatgttgtcaggtggtcactgctcctgtcctttgacatgttttccatgtagaagacatggaacctggaaatcatgctgactgctggaataagccattcctaatgccatgccagaaccaaaggctaatggccacattctttttttaaagaaggtaagtgagaaaacaatccctaatccaaaaccggtacttatctaccacatccagcaggcactggtcccacttcctgctgagccccacctctgacatgttccccacccacagctccagctttcctctcactctaactgcatttaagagacatcttgtaatgattctacatgcaagagttcaaaataagaactcctgaatctttcagctactctaacaatatgggttctgacctgatagcatcttatcactattcttgcccaagacttgacaggccagcccatattacagtaggtagggttaggtggaagtggtgtgagatgttcataaaaattaaagtgaactcctgcttctcaaagaaaacaaggtctcttttggtcaagaaaaagaggggtttcattaaatgacactcttggtaacctgccatccctttcaaatggatgtattcactttcagagtgaggttcagattttccacaatacagagagggaaaacatgagttgaggagaacctcattttcccctaataaatgctagtgctttttaatgggggaaaacaaacaaaaaccccaaagaactctggctcttaaaggaccagggtactctcatgtactaactgcatagaagggataaaccagtctactcatctttctttacatcagagaggcctccttgctcccaagattttagtttttaaaaactttattctaactgataacctggacagctgaaatgatccagctgattctctgtcacatgatctggaaatccaggcaacaacagagttcacatcaccctgagacatgctccattccaaatcctttgtaaccctctggccatcactgaaactaagacaaataaactggatcaaccaagagatggccaaacataagctacacctgaccaaagtcacagccaccctgcagtgcctcccaaagagcagagtgctggaggaaaaatggaggagactacactatcagaacagcagatatgcctctcagtagaatgagccccatacaaatattatggctttgccacaccactgccctgacaggctgcctgaggctgcataagttattcaacaaacatgacaaaatgttcggtggcctcccagttgatacaatgtccacagatgtttccttctctcactactctagtatgctgcacaccaaacagtgctactcaaatgtcattcatactgatgccagtccatgaagtttgctactgatccacaagtacagaaattgagaataagtaaaaaaaaaaattttatagaaattagacacagtaattttttttcctttttctttgagagagtctccctctgtcacctgggctggagtgcagtggcatgatctcagctcatttcaacctccacctcctgggtttaagcgactctcccatctcagcctcctgagtagctagaatataggcatatgccaccatacttggctaatttttatattttttggtagagatggggtttcactatgttggccaagctagtctcaaactcctggtccctgtaattcctcccaaagtgttgggattacaggcatgagccactgcatgcagctgacacataattatgtctgttgaatttaacaaaacatttggtttgtattttaaaattttttgtaattcacttcattcattcactcattcatttaagacagaatctcgttctgttgcccaggctggagtgcagtggtgtgatcttggctcactgcaatctccgtgtcctgggttcaaatgattctcgtgcctcagccgaatagctgggattacaggtgtgcatcacatgcccagctaatttctgtatttttagtagagatggggttttgccatgttggccaggctggtctcgaactcctgacctcaagtgatccacctgccttggcctcccaaagtgctgggattacaggtgtgggccaccacacccggacctagtaatcacttctttattatacattactaaagtatcagactatgatggactggaatttttttaaaaatttatcttttggctgggcatggtggctcacccctataatctcagcactttgggaggctaaggcaggtggatcacttgagctcaggagttcaagatcagcctgggcaacatggtgaaaccccaactctacaaaaaaattggctgggcagggtggcacacacctgcagtcccagctactcaggaggctgagaatcgtttgaacctgggagatggaggttgcactgagcagagattgtgccattgcactccagactgggtgacagagcaagactctgtctaaaaaaaaaaaaaaaaaaaaaaaattaaaatttaaaaaagaaatattgttgcatgaataaatacattaccgtttcttgcctctaagcctttgattattcagctgccactgcctacaggccttctcccatattccttccttcttgctaagtctgacttaaactaggcttaggcaccaactcctataggaagccttccttgaacctggccctctacttttcactcactgactaccactcaattaactgaacggtgaaaagtaacccacagctacgcattcatgcagacaacagaattttactacttcttctcactactggttcatatttctgcaaccagaaaatatcatttcatccctagtaactatggcttccatctgttacttccttactacactaagcacttctttacattaactgcataggttgtcccaagggtcaagatacatcttaaaaacttaagggaaaaaaaaagcattcctatatacattggtaaagtcaatgcagcaaggaagcctcatttgttttctatacaatgttctcatgatcgccaaaagctagaagtcttcttctgggcctattcaaagtcaatctcatgaactctcatttccaatttacatctatcatattcttcacactgttcttgcatggactccaatctctgctctataccttggctaagcacacacaacctgggcataaagagtcagagtaaactatggaaatttacccaagcttacttcttcctgtcccaccctctatctgaccaaggacaatccagataaagcctttgttcagggctgggaaggcaggcaggaagcttatagtccaattctgtacctttaaatcagtccatctctcaccaagaaaccatacagctaacagccactaaaacaagcctcacatatcccaacaccattcatggcaatgctctagaatcattcttctacacacctaaccttactcagttccattttagttcttggctactgactctaccagtttaccatgcccttgtctaatatttgctgactgaacttttttcccaagcataacctttggtgttttctgagacttttagttgggttctactgtggctcttttcactgcttgctgccttgggtatgatgcccacctgagcttcagccctggagatctaccataggctcggtgccttagcggtctaccttgctcccaaaagaattcatatgaccaaacacatttcttggaagttccacatcagtgtcataacatagcaacttatccacatcttgcttgaacaattatttaactattgatgagctgcttttcatttcctttctctactgaatgctacctatcctgtctacaaataaaattatttctctataagtaaattgtttctaaataacttctacttcagtttaaaagtagaaaataaaaagtaagccaggaagaacaacataactaaaaattcagaatatgtcaccaggtgcagtggctcttgcccataatcccagcacttaggga

SEQ ID NO: 1885351 - DNA, 4001 bp, Homo sapiens
cttttccatacttctctattacaatttatctgtttgaaagtcttctctcctgaaaaggtgagcttccagacccaagagccctgcccttcatttctttaaccagctatccaatagaatgtctaacacatgggggaactcaatgaaagaaacaagtgaccggagcagatgctaggctttgttaattcactttgtaggtgcttaacacatagattttcagaaataccaacaggtaaaccttcaggcctgacaagccctactgtttctacaagaagggatggatgaagttaagctagcaatctctcttcaaaatatattacaaattaaaaaaaaaaaaaagaaagtcagtgggggacaaagcagaatcagaaccaaacacaaatgtcatctttatagtgatttaatttgattcaagcacagactacttccacttcccagtacaacctgcccatattgttctcaggaattctaactctcggattaccagtgaccgtaatgctaaaaaactgaataaacctttttttttcaaggcaaaaaccaactctaaaatttgaaaatctgctattagtgccgaatatcatgatacaaaagagaaaaataaagctaaaattagttatatctcatctacccaaaatcaggcttcccctcacgtctttctgctcagcgcctacaagtagttctcacaccaactatgttaataccaacactacatacccttaaggaaggtggtgtagcaaatttcacacaaaataattttaaaatcgacaaagctgataacggagataaaacaagaattatacaccctttagctcagtgcaacaataccccagactcctctttataaggcaatacagtataatgaaattttaaaaggcaaaaataaaagtaatccttaactaaaatggacaaaatgtacaaactccaagtagaacaggcatcaggtaagtcctttccaactttgccttcctctcacctttcattcgctcactgaacaattactgagtgcctactgaatgccaggtacgacactaggcatggtacatataaataagaagcaaacaatgcagtctagtgacttcctggggtaagaaatcaaagtggccaattccatggcactatatgaagtcagactcgtctcaacagagttttgtgtcttaaaacaagaaagcccaaagctttgaaataaattaataggtgatggaatttcaggtatcaattaaattactattacttgactgcaggcagccttgtccttggaaaaagaccatgtgatgccgcctgtgaaggcacaggtataaagaggcctcttaagacaggcctgtagcgatggagctaaagggctttagccggggtgccgctgagtgtaggcagagggcgggtcctggcaagccaaattcaccgccactgccaggacgaactattcagattcacgtggagcaaggggctaacgcaggcagttcctagatccaacactctggggagaagaccactaaacccggcccctcaaagcagaggtaaccttgcctgtcactgagagcgcacacaagaccccactgtacaagttgggttcgctgcctgcctcctcccaggcccaaacaatctcgctctgagtgtcgctggccgcgcggagcaggggccggctttcttccgggacctaggggagctcctcctgcgccgctcactccgcgctcgccaaacgggtccaagcgactgccctggaacttgacattgaaggcggcgcccaccggagacgagctggtgctcacccttcgggccggatcccggcttcaaggctgccccgacccgccgcctgcgccgcagagccgctgctctggctccgaagccgcccggctttttggcgcacagcgtggtatcccgcagaagtcctttcctccaccgtgagaaccctgtcctgggcgtagcagcctttacctggagcgcgcgctctgcgtttccaaggcagcggcccacgctgccccacgtgacggccccgcctccgggtctgggcgcggcctcgacgtgggcacgtcggcgtccagagcaagagcgtcgctcccacgctttctctgccgccgtcgctgcatagcgcctcctgtctctagagtaaggaaaggctagggttgcgcttccctcctgctgtgactgggggcgcgggggcaggcaaaatcatgacataatcgaattccagtggacattattttgtgagagatggtaggttcttgagtaaacaagaaatgcccaccataggcctgaaggagaagtttcccttttaacctactctcttggtaaattcatcctgcacttctaactctagtttctctgtcggataacttgtttttactcttgcatagctcatttaaaaattttagatggaaaatagtgaaagcagtctaatgggattttccctgcaggctttcagacttacttgggacccatgatcccttttttccttcccctttctctcttttggaatggactgtctgtcctatgcctgcccctggcccccactgtcttttaaaagccaattaacttgtctggtttcacaggatcacagatggagagaaattttgccacaggatgaatcacagtaggtctcctctgtaacttaaatgatgtagatggtgagaagagttgatgtggaaagtgttaagacttttggaaatgttgacatggggcgaaaatgtattttgcacaggtgaaggaaatcaactttgggaaccagagggcggattgttacgggttgagctgtgtctccccaaaaaggtgatgaaatcctaacccttggtacctgtaaatgtgaccttatttgaaaatagggagtttgcagatatgattaagatgggtcatactagattagggaagctgtccttgtaagaggaaaatttggctgatacaggaggaggacagccacctgaagatggaggcggggactggagtgatgctgccaccagctgccagaagctggaagcagcaaggccggatcctcccttagcccctttggagggagcacggcccagctgctgcggtgatctcaaacttccagcctacagaactgtgagaaagtccatttctgttgtttaaagcctcccagtttgtgtactttattagggcgatcctagaaaacaagtagagattcaagtcttattattttaataataagatattgatttgttggcccacagtttgaaaagatgctgaattacgggagggacaatcagtagttctaatgttgggatataatcagaaaaattaacctcttattccccagaatttctaaaccaataggactcaagacaaatgaatgtgatcctaggttagagtgtgaatggaatttacattatgtatatacgtagaagagctggatatatagttgtttagttttttatataataccaaattatatttcagagatacttatttttgtgtttcttggaaacttagacaagttattttagaaaaatcctaatgatttttttctcttcacccactcccttctcactaaaaaaggattgcttcattgtcatgaaaattaaatctagaatcctaaaaaaaaaatcagaattcttttttaaccactcatttcaaaattactaaaaacattaaaattatcagattttattgaactcataattaagcagctgatcatttggtaaactttggataaactattttgctagttttactataccttttgagatactgtttcaaaagagaaaatataaagaatataagcataatcccaattagaagagtcaacaggtgctgctttctgatgcagggcagttcaatcattataattctaaattacaaaccctttcaagtctggcagaagaaaatgaattgccagcgcattttcctttttctgcttcaatttttaaattatgaagtacaaagaggatttttttttctctttatctttaaagatgttttctttttcttttcaaaatttgttctctgtgtttccaggtgcagcagtttttcctgttagccttcgcatgttagtt

SEQ ID NO: 1885352 - DNA, 4001 bp, Homo sapiens
gcatagtgaataattattcaagagcagagaaacgagaccatagctctggtattaacaagttgtatgactttcagaatcacttcaccgatccaggccttcagataaaaaagatgagtagcaattgggtaggcagtcaggaaagagaatgccccagatggcagaaagggaatttgaaaacggagatttaagcaagcaaagtacattaatgaaacagcaaattatttggtaatcttagatgttcctcaaactttctgcttttgacttttcatacaaccctcaatattcacactatatgtcctagatgtgtgcaattcagtggtctaatctggacttccagataaaaggccagcaaggctgacttccagctcttccaagatggccccgcaggacagtagccaaccattcaccagcttggctcccattgcaatgtgtgtgtgatgattggaagatgtgatgaattaattacatctttttcctttttttagatcttccgtaagctctgactgccatgtgagagaggaacgggcatcacctgaaggaaaggatgatgtctcaggactttctaagagcaacagaatgttggaaactatccatggtagggatgcagttggctagttacaatgcttgacatcccttcatctagtggccatgggactccaaggtatctttccataaagaaccaaagccaaactcacaatctgcctaaactgctattctcagctttcaagaggaagatgactgttaatacccaagagtaagaataagaagcaagggttctatagctaactcatgccttctttccacagctcactcttattcagcaatatgggctcccttagctccaaccctcaaatccccacctgggcacctttaccttgttctctctccaccctgggacactctctcctgcctattaatgaggcaggctcagtcttatgctttatagctcagtcatctacttaaggaggcctaaaagctctgtccaaagacaaaacctccatcctagcaagatagtctgcctttgtttacttcatagcatatatcccaatccataattatttttatatttgtttcctatttactacctatatccaccactagcatggatacttttaagctacttgatcatctactatatccccagagccatgaaaacatcatacatagtaagtgctcagcaaattacttgctgaatgaatgaagtatatccatatagactgaagcaaaatctaagacattcctctaaatttaatatttgtaagattttttttaaatgacaagatttttatgtatgacctgtgatcattttagtatattcataacatgtggatgtatgcagaagatggactcattccacacaaaaatgccattgtacaaatactatctgttgaggcagcccagcaggtactacatgacaaataggaggcaaaaataatattgcaaatcaccacagctatagagaaaacatagtatcacttacatcatattgatgtaagctgaaatctgtccagagctgaggctaatcatttgtgaaaagcagctgacaatatagaaagaacaagcatctaagttatatatgaactattttcaccattctccttataaagttttaaaaataatatgaaaaccagcaggattgcctgaaatgtgaaaagaacactgacgatttttattgtgatttttagtggaaacattttagttatgtaaaaactgttaaagggatagtctttgtaccctaaaaaagaactctgctgaacattgtcattcacatatatatatatatatacatctgagatattttattaggatgcattcctatattaggaattacagaactaaagaggatggacttttaacatatattttaacatagctctccagaaataaaaagttcttgaccactgatggagtccggatatttgtcctcatccaaatctcatgttgaaatgtaatccccaatgctggaggtggggattacacttcaacaggagatttgggaggtatttggatcacggaggcagatccctcatgaatagcttgggccatcctcttggtgatgagtgagctcttcttctgagtgtatggcaccttacccccaactctctctcttttgttctggctctggtcacgtgacaaagactgttccttcttcacctttcaccatgattgtaagctcctgaggactccccagaagccgagcagatgccagaaccatgggtcctataaagcctgaagaatcatgagccaattaaacctctttgttttataaattatgcaatcacaggtattcctttatagcaatgcaagaatggtctaatataatcagtgacactaatcatcaatattatcttattaattttcccagtttattcaacatcaaaaccagtacattttagttaaactcacattaaatgtttgtatttttttcattttatgagttgtctgtctgtatttttttccacttttatctcagtatgctcatcttcttttgttgttgtttgactggaatacgtgttgcaagtaatttttccagcttctcatttgcatcttttttatgatggtgttagatatgccaaagttttgtgtcatgtgaagtattatctactgatactccccttagaatttttaaaaattaattttatgcttataaacttctctgccattttgcaatcttctatttacgtatttgttttctagatgactaacatggctttttcacaatcaagttcataacgcagctgaatttgcatacttacctaacttgaaaattttctctcaaatagtgagttatcctagaagcatttaatagaaaatgctttgtttcttaactgacttacaagctacccttttgtatactaaatcctttgatgtgctaggttctcctccaagtttcttgcagacaaccaagaacaaaatgaaagagaaagaaagtgaacaaaagtagagtttaaaaagctacagcctttcaaggtcaacattttaaagtaaaacagcatctttttctttgaaatcttatggattcccacagtgtaaaacatgcttctatctaataatcagtattaaagaatctattaagaaatttcaatgatttttgtttcccttggctgagctctcattatggactgttttgctgcttcctttctctatgaagaaaaatcattcattgctagtgttttctcagtgttacaatgcttttccaataagcgttcattctagtggtgtgtgcttcctcatcaacaaacatgaaatttatcttcttaaatatcaagagttcaggttattacaaaacctaaggcttacagtgtggtatagtccaaaatcatactccataaactactggaaaattaatcaaattatattacatgaagtttttatatactcatatcttttgacttgaggtatttcaaatatttgagaatctcttatagacctcatttcaactttaatttttctgtctcatgtgtttggtccatttatgtgatttgcctgggacattaatgaaattctcaagaatgttaattttcagaaaatataaatccctgaaaagttagcaatttagagattattcaggaatataattttgtgctagtttctaacgtaatattgcaattatattaactgaagacaaaatattgccacctagacttcaaaaaacatcttaaaggtagttgcagaactgttaagaaaacaacctaaaaacagtagccattaacatattaaaaatgatataaaaattaagaatacatgctaagctggaaatttaaaacatcatttagaaaccagacactttgactggaggcagctgttgcctctctttttgacttaaacttttatttaactcattctactaaaattaatatccccacgaaaagagagttataaccataacttttaatgaggctcagttttgcccctttcttttttctctgttttacatattttgtttgtaaagtgactgttagaaacatttatagaaatttacacatttgaaatgcagagtg

SEQ ID NO: 1885353 - DNA, 4001 bp, Homo sapiens
catattgtgcaacaggtctcttgaacttattcctctcatttaactaaatttattttttctttgcttagaaacttgtttacccaccacttggactaattgttcaaatcttccctgatggggacacagccatctgcatgcagactgcctcccaccaagtccaagagccccttctctcgcaaaagggctctctctccactcactctaacacatcagagctgttctgtcccttctctgttttttaaaattcttagctatcttgaagtcaccttttttcccttctcctctccctgtaataattctagttccatctaaggactatatcaagtagtagtttctggcttgtttccccagtggaatggtgaattattcagaattattattattcagaattatttacatgtaaaacagcataatgatgtatttctaatctctactgtgccaacacagtagagagtaaacagcaagctataaaaaattggaagacaaagataactaaatatattttattttggtaataatgcactaaaatgtgtaactttttgttgtttcccatttgaaaacagtttacatcagtactggaatgtaatttggtaagcattaaaaactcagtttataagtaattctttaatattaaacagtgttttttagtatcaattctaccatagtataaaattatatattatatgtttcatattagtgtgtatctgtaggtatacacattataccacacacacataaatacactgcaataaggaatactggatggaaattgtgattataataatgccagaaatgttaacccaactcttgctaaatgctgttacatattaaagaagagaaatgagagaaagaaggagagaaagaggaaaggaaggagagagggagggaggcagggagaaaggaaagaggatatccaaaaagttaactaagtttatccctaggtctccaaaatcaacattaagtgcctagtcacatagtgcctcatgcgtgtccgtgtgaaaagaccaccaaacaggctttgtgtgagcaacaaggctgtttatttcacctgggtgcaggcaggctgagtctgaaaagagagtcagcaaagggtggtgggattatcgttggttcttataagttttgggataggcggtggagttaagagcaatgttttgggggcgggggtggatctcacaaagtgcatcctcaaggataaggagaattacaaagaaactttgtaagggtgggggagattagggtggggcagaaaccaaccacaatggtggaatgtcatcagttaaggctattttcacttctgtggatcttcagttgcttcaggccatctggatatatacgtgcgggtcactggggatatgatggcttagcttgggctcagaggcctgacacatagaagtttagtttgatacctataaaatctgtgttctctttaaccttttgaaacacttgctaatgaatcacaaagataaaagtctttcaaatgtatacactgaaaacctatgtaacactgacaaaatgaaagttctttagtctctccccacctttaaatcgaagaagtcactgagtgaggatttagacttaaaagcaattgtgacttgcctatgacttgcttgttatgatgtcacctttacccaagatttactttggaacctatgattcattctggcatttttacatgtcttttaattgtcaaagttcagacttgggtttttggtatctctaaacttatcatcgctaagagtcctttgtaatagtctttcaaaattaatgaatcaaatgctggtgagcacatgaatttctgaagcatatatttttttaaagccaggctttaaaagtcaagggtgataagaaagaggatcaagtaagtgctacagccaataatccaactcactcttcagtgcttctgaatttaaaattagaagtgtttcactacacctgaattacttgaattactttggctcagataagtaattctaatagatcaaccctagagataaacacctaactttaaaattagactcactgaaatgtctgctctcctcaaaatatcattttacaggttgaagatgttgtcctatgaaaatctaagatgagaaacacattatgtatgatacattacatgcaacatataaacttgactcacttctcaacatttcacatttttgtgtatttatacagttaaaatacaattcaatggactcctcattatacttgtataactctaaagggaaatagtagaaataacagttattgtagtgttatgctactgaaaaaaactagttagcttaggtcaaaggatagaaaaatggaatggtaagcaattactgaatcattaaaagaaaggaagagctagattccatgaagcaagagatcaaaggaataaaactcaagcagaggtaaattcattgctagctctattccccttaatgcaataaaacaaatgaagaatcagttaagtagagagtactttccattatatccaacatactaatcatttctacccttcaatggcttgtcaaatttccataagtaaaaagcattattaatatagaagtacagtacatgaccatatttttccttagggatcatgcaatttcagaaattattagagatgggagttaacattcctacctactccagcaaatacccttgggtagaatgcaaaagtaaaaagtgatgtaaataaacatggaagagcaaatcagataaacatggggtaaaatggatatgtagagatactctactataatttatcaaatctgttgttaatctattgaaaaatctgggtatgtcatcttcaaattgactacaaaacatgattgtattttccaaatggttagaagtagacactattgaaaggtgacaacgtgttagcagccctggctcgctcttggcgcttcctacgccttaacatccactctggctgcgctccaggagcccttcagcccgccgctgcaccatgtgggcccctctctggggctggccaaggccagagccggctccctctgttcctggggaggtgtggagggaaaggtgcaggcgggagccagggctgcatgtggtgctcgcgggccaacacaggttcccggtgggtgcaggctccacgagccccactctcagtgcgtcctgccggtgcctgctgggctagatcagggaatgagcttgctctgggctgccagagtgcccgggctaggtgcagaaaagtcctgcagtgagtgacagtgagaggtgaagccagctgggcttctggaacaggtagggacttggagaacttttgtgtctagctaaaaaattgtaaatgcacctatcagcgctctgtgtctagctaatggagtggggacttggagaacttttgtgtctaggtaaaggattgtaaatgcaccaatcagcacactctatctagctaaaggtttgtaaacgcaccaatcagcactctgtgtctagctaatcaggtgggggcatggagaacttttgtgactagctaaaggactgaaaacgcaccaatgagcactctgtgtttagctaaaggtttgtaaatgcaccaatcagctctctgtaaaatggaacaatcagcaggatgcgggtggggccagataagggtgaatacggggagtaagagccagcccctccccccccctccccggctattaagacccacatcgcaaaggggtgaggcaccccccaccatacggggagtaaaagccagcccctctcccatcctggttattacgacccacggtggactcacagcctgtttacgatattgggagtaatatcatctccccctctggaaattatgaactatttcacagacgagtgtacaccctccgtgtacagagggtgtacacccgtctgtattgggagtaatatcatcctcttcctccctgaatattcagaacagtatcacaggagtgtttctactccctgcgatattgggtgtcatatcctcctctcccacgtggaaattagaaacaatatcagtgggggcgtgtacaccgtct

SEQ ID NO: 1885354 - DNA, 4001 bp, Homo sapiens
ttatttttagtagagacagggtttcaccacattgcccaggctggtctcgaactcctgacctcacatgatccacctgccttggcctgagattacaggcataagccaccaccgtgcccggccttttgttcagattttaattaaattaggccaggggtggtggctcatgcctataatcccagcacagtggaaggctaaggcaagactgcttgagcccaggagtttgaaaccagcctgggcagcatagtgagaccctgtctctatttttatttatttatttagttttaatttttacattttaatttatttttttgagatggagtttcactcttgttgtccaggctggattgcaatggcgcgatctgggctcattacaacctccgcctccccggttcaaacaattctcctgctttagtctcccgagtagctgggactacaggcatgtgccaccacgcccggctaattttttgtatttttagtagagatggggtttcaccatgtcggtcaggttggtctcgaactcctgacctcacgtcatccaccctcctcggcctcccaaagtgctgggattacaggcttgagccactgtgcccagctctacttttcttttctttttttttttttgttgagacagagtctccctctgtcacccaggctggagtgcagtggtgcgatctcagctcactggaagctccgcctcccaggttcatgccattctcctgcctcagcctcccgagtagctgggactacaggcgcccgccaccacgcctggctattttttttgtatttttaatagagatggggtttcaccgtgttagccaggatggtcttgatctcctgacctggtgatccgcctgcctcggcttcccaaagtgcgtgagccaccgcacctggctgtctacttttatttttaataaaaaattttaaaaatacaaaaaagtaaaaaaaaaaattaaattatgttgacattttatatcaataaaactacaatgataatttggtcttactctgagttaaatcttgaatacaaaaaagtaaacaaagtaaacaagaccttatttttgacttatcaaacaaaaatctttggctaaggatttaagaaaacattttaataaaaacatgaaaaaaatagtataccattataaagttagaagacataagactaagaccccaatctgtgatgtgtagcaaattatttgagttttgtgtttccttagctatccaatgagtgggttggtcacttgtaagggtttttctacctttaaagttatggttaagtgtgacgttttgacaaccagaattttaggtatttaattcacatattttgatggcttttccccttcagatataaagaaatattcagaaacagtactaaatattgtcttctaagctctgttcaaaatgcttaatatattttatatttatctgtaaagacatattttaaaagtaatttcaaaacaaagggaaaactagaatttgttttatcccaagtaaaaatctgaattaatgtctatgttgaatataaatgtgcattaaaataaattcctctaatgctgcataagctttttaaaaaaacttgatggcattcaatacaattattaaattgcaattacagtattttaagagatgatacatctgaaaaattagtattaattcatttttacagaatcatactaaaaataacaagattatcaataatactgaaaagactatcaataaaactgaaaacacattagtaacattaatatacattaaaacacaactgtagagtatggtcaaccttacttcagcagcacagttaatactggagataattttagaatcttaacgccaatatttacgtgctgctaaggcactgctgacattgctatcataagagctatgaataaaaagaaatatattttcttcagaagatcagatccttgtatttttgaggcagcacaatatggcctgcaccttttcaaaatccacaaaccattatgtgctgctactttactccaaggttttattttttttaaacacacattcgcgcctaaagaatataaaaaatattttctttcaggaaaaaaagaatgcatgtaaaaaaatctatgtttaaacattataacattgatgtaatatgcataattatttttaaggagattttaagtagaataataaaacatttctacatcaaaaacttaactgaagtccattctgtgcccagcacagtgctataggttaggaaacacaaagaataaaatgaggaaaagaaaagcatttatttgctatgccaacttaacagggcaatacaactaaatgcttaaacttttgaatatattcaatatatgaagttatttttccttgtataaacaaacaagtaaatttataaaatttgatctttaccttggtaaaaggagaatttacaaacattttgttccttgcagtacacctttcaaaagacatcttcatcaaataggtaagacttcacatcaagggaaaaacatgaaatgacatacaagagctcagtttcaataaacttaagctagcaaaatgcaaatatacttttaaagaaaaatactttaattctaaatgttaattttattaaatatctaattaagacattttaattccaaatatagttaagaaaaaaagctctaaacaaactaattctcccttaaataatttgttattaataatctaaatattttactttcaacattgatcttcatactagaagttctcttagagttggatatcatttgatacagtaattctaaaatatgaatccttaagtaattctaaaatatgaatccttgggatgatgagttaatttggtaccctgagatgagaaataaaacaaatcccatagctcttaatcttcctattccctgtttctggcccatttaccaggtaaggaagaaactcctagtttccactttctcagatgtagaaatgaaattccttttctctaaaagatatcagaaaattgccaccactctagtggtgccaccattcaagcctggacaatcttttttgccccatgttctcatcattaaaatgactatgctaaagttacatctattacagaatagtaaggtgatgtacacaaccaaagcactaaaatttgctcttccattctaatatctaattacttatacaaagcacagggtcacattccatatgaaatttttctgagtatttttcccattaataaaaaatatatgtagctaatctcctatctaagcaacctggatttcacatataactctgctccttattgtctcaagtttctgcacaacgttttttaaatttttattttttctttttttaagagagtagtttccgtatcttttagagaaaaagaaattcatttctacatctgagtaagtggaaactttaggagtatacttccttacctggtaaatggaccggaaataggtagggaataggaagatcaagagctacaggatttgttttacttctcatctcagggtactctgttgcccaggatggggtacagtgccatgatcgtagctcactgcagccttgacctcctgggcttaagtgatcagtccaccttagcctcccaagtagctgggactacaagtgcacacaccaccatgcacagctctttacatttttattttattgtagagacaaggtcttgctatgttgcctaggatgtcttgaactcctggcctcaagcaatcctcctgccttggcctcccaaagtcctaaaattacaggcaagagccaccatgcctgacctgcactttttttttattttttgagacggacagggtttcaccatgttagtcaggctggtcttgaactcctgacctcaggtgatccacctgccttggcctcccaaagtgctgagattacaggggtgagccactgcgcccatcctgacctgcacaatttttaacatgtaaccaagataaatccgtttgcattcacttgagaaatatataacatatatttgtatttatcaattatattaaggaattgtccttcagggt

SEQ ID NO: 1885355 - DNA, 4001 bp, Homo sapiens
gttgttgccgttaagatggagtctcgctctgttgcccagactggaattcaagtgattctcccgggttcaagtgattctcctgccccagcctcccaagtagctgggattacagacgcccgccaccacacctggctaattttttatttttagtagagacagggtttcaccacattgcccaggctggtctcgaactcctgacctcacatgatccacctgccttggcctgagattacaggcataagccaccaccgtgcccggccttttgttcagattttaattaaattaggccaggggtggtggctcatgcctataatcccagcacagtggaaggctaaggcaagactgcttgagcccaggagtttgaaaccagcctgggcagcatagtgagaccctgtctctatttttatttatttatttagttttaatttttacattttaatttatttttttgagatggagtttcactcttgttgtccaggctggattgcaatggcgcgatctgggctcattacaacctccgcctccccggttcaaacaattctcctgctttagtctcccgagtagctgggactacaggcatgtgccaccacgcccggctaattttttgtatttttagtagagatggggtttcaccatgtcggtcaggttggtctcgaactcctgacctcacgtcatccaccctcctcggcctcccaaagtgctgggattacaggcttgagccactgtgcccagctctacttttcttttctttttttttttttgttgagacagagtctccctctgtcacccaggctggagtgcagtggtgcgatctcagctcactggaagctccgcctcccaggttcatgccattctcctgcctcagcctcccgagtagctgggactacaggcgcccgccaccacgcctggctattttttttgtatttttaatagagatggggtttcaccgtgttagccaggatggtcttgatctcctgacctggtgatccgcctgcctcggcttcccaaagtgcgtgagccaccgcacctggctgtctacttttatttttaataaaaaattttaaaaatacaaaaaagtaaaaaaaaaaattaaattatgttgacattttatatcaataaaactacaatgataatttggtcttactctgagttaaatcttgaatacaaaaaagtaaacaaagtaaacaagaccttatttttgacttatcaaacaaaaatctttggctaaggatttaagaaaacattttaataaaaacatgaaaaaaatagtataccattataaagttagaagacataagactaagaccccaatctgtgatgtgtagcaaattatttgagttttgtgtttccttagctatccaatgagtgggttggtcacttgtaagggtttttctacctttaaagttatggttaagtgtgacgttttgacaaccagaattttaggtatttaattcacatattttgatggcttttccccttcagatataaagaaatattcagaaacagtactaaatattgtcttctaagctctgttcaaaatgcttaatatattttatatttatctgtaaagacatattttaaaagtaatttcaaaacaaagggaaaactagaatttgttttatcccaagtaaaaatctgaattaatgtctatgttgaatataaatgtgcattaaaataaattcctctaatgctgcataagctttttaaaaaaacttgatggcattcaatacaattattaaattgcaattacagtattttaagagatgatacatctgaaaaattagtattaattcatttttacagaatcatactaaaaataacaagattatcaataatactgaaaagactatcaataaaactgaaaacacattagtaacattaatatacattaaaacacaactgtagagtatggtcaaccttacttcagcagcacagttaatactggagataattttagaatcttaacgccaatatttacgtgctgctaaggcactgctgacattgctatcataagagctatgaataaaaagaaatatattttcttcagaagatcagatccttgtatttttgaggcagcacaatatggcctgcaccttttcaaaatccacaaaccattatgtgctgctactttactccaaggttttattttttttaaacacacattcgcgcctaaagaatataaaaaatattttctttcaggaaaaaaagaatgcatgtaaaaaaatctatgtttaaacattataacattgatgtaatatgcataattatttttaaggagattttaagtagaataataaaacatttctacatcaaaaacttaactgaagtccattctgtgcccagcacagtgctataggttaggaaacacaaagaataaaatgaggaaaagaaaagcatttatttgctatgccaacttaacagggcaatacaactaaatgcttaaacttttgaatatattcaatatatgaagttatttttccttgtataaacaaacaagtaaatttataaaatttgatctttaccttggtaaaaggagaatttacaaacattttgttccttgcagtacacctttcaaaagacatcttcatcaaataggtaagacttcacatcaagggaaaaacatgaaatgacatacaagagctcagtttcaataaacttaagctagcaaaatgcaaatatacttttaaagaaaaatactttaattctaaatgttaattttattaaatatctaattaagacattttaattccaaatatagttaagaaaaaaagctctaaacaaactaattctcccttaaataatttgttattaataatctaaatattttactttcaacattgatcttcatactagaagttctcttagagttggatatcatttgatacagtaattctaaaatatgaatccttaagtaattctaaaatatgaatccttgggatgatgagttaatttggtaccctgagatgagaaataaaacaaatcccatagctcttaatcttcctattccctgtttctggcccatttaccaggtaaggaagaaactcctagtttccactttctcagatgtagaaatgaaattccttttctctaaaagatatcagaaaattgccaccactctagtggtgccaccattcaagcctggacaatcttttttgccccatgttctcatcattaaaatgactatgctaaagttacatctattacagaatagtaaggtgatgtacacaaccaaagcactaaaatttgctcttccattctaatatctaattacttatacaaagcacagggtcacattccatatgaaatttttctgagtatttttcccattaataaaaaatatatgtagctaatctcctatctaagcaacctggatttcacatataactctgctccttattgtctcaagtttctgcacaacgttttttaaatttttattttttctttttttaagagagtagtttccgtatcttttagagaaaaagaaattcatttctacatctgagtaagtggaaactttaggagtatacttccttacctggtaaatggaccggaaataggtagggaataggaagatcaagagctacaggatttgttttacttctcatctcagggtactctgttgcccaggatggggtacagtgccatgatcgtagctcactgcagccttgacctcctgggcttaagtgatcagtccaccttagcctcccaagtagctgggactacaagtgcacacaccaccatgcacagctctttacatttttattttattgtagagacaaggtcttgctatgttgcctaggatgtcttgaactcctggcctcaagcaatcctcctgccttggcctcccaaagtcctaaaattacaggcaagagccaccatgcctgacctgcactttttttttattttttgagacggacagggtttcaccatgttagtcaggctggtcttgaactcctgacctcaggtgatccacctgccttggcctcccaaagtgctgagat

SEQ ID NO: 1885356 - DNA, 4001 bp, Homo sapiens
agttccttaaatttcttaaagaacacattagaggtgaaaacttttgttagacttcagacaatatttttaaaagctgatttctagatttattgggtggtctaacctagtgttatggaagtttatttcttattactaagatagcctcttttactccaaaatacaatgacatttctcaaaacttatctttcaaacatcaagtttgcctgtacttcagcttgggcccaattttaccacttggtccttttaaatctattattcaggtatcccacattattctacacaaatacacataggctagagacaaaaacacatgaagaaaagagagaaggcagaaatgctgggtaaaacactaactgccacttcttagtttccacttcagtgactttaagtcaaataagcctggaatcaactatcactgttgccaaagtctggcttacgtagggagtagggaacataaatgttaactacagacttagaaataaatgaatatctgaatctcaccccaccgctgcactcttggcatttgggaagagtgtacacatacatttaactgttactctatttagcatttgttctttttctaactcccatttttttaagttgcagatgctaaaagcagtctgaggaccttggtcatttatagcttataaatcactgacaatcagaaagaaaaactagtatacaagcatttaacagttacacttcagttactcatgtattggtaaactggtacttgcttaatagaaacaaattgtaccccaaccctaaattccatgcttaaaaaaactcatctttacacattgctttaaacagagcggcattctctctaaatttaaatacttgagtaatatatgagcaacataaattaacttttagattaagtaaaatatcctggaataacactaactccaaagaaagcaaaaagatatactctaactttacagatgatcatcaggtatacagtatgtttagtcatatcgcaatacttaacagccaaataaatctaacaacaaaaaatatagccagaatttatactgccaaatctgacacgcaaccccaaaagtgaaatgtttttgaatgaaaacaagacaagatgtatttacacaaaaagttacacattttctttaatatttcatgtatcttgtacatttaacagtggaagtcgaaatcttcagtaatatttaattttcaaaatcttctggtcacaatccccaccaaactcaacaggccgggacaagtgcaataccatacagaaacacagcattgcaaccgatcccaacctgtgtagaaaggggtttgagtttcccttacttttctacagacttttcactaccacagtcagttttgcatggatttgcacagcagaatatcacacagctggatgcaaacctgcaaaactaaccatagaacagtgttcagtaacaggacagtttgattgggcgacaggccgaagctggagttctacagctagcagtactttaagtgctcataatgcagtagataactaaacactacctgcactataagcactttagtgctacagaagctgtcacatcagatagaccaggcagattctacatcgacacaataaaagtacacaaaattagtaaaaatcattcatttgaaggaaatagcaggccaccatcagttttgcatagatttgcacaactacattcttcttgtagtgcaactatgcaaaactaacagaggactgcaaacaaaaactattaaaacacctatatacttgcttggcttgaattattggatgaatacataacttcttatgccagaaggagcacttagggcagtagatgctaatctacttcactatctgcactagatgcaccttagaacaaaaagcactcaacatcagcaggccctgcactttaaagcccaacttggcttcccgaggcagctgtcaccataatgctacaagtgccttcactgcagtagatgcacatatcactacctgcactgtaagcactttgacattattctgactggtcacaatcttcagttttacaaggtgatgttctcttttttcctgctaaatttgaaatagataattagaattaacacctcaaactctaacaactataaaccatacaaattcagcataatccctaatggggaagaaaaaattagtttaattatctcaaagatatgaggtccatttagacacgtatttatgccttaagaattctttacagaaggcaatcataaccaaccatccaactagcactggaagtggtggctcttccaatggctggcctctcccaaatggattgacacatagagaaaaaaaacaaaacaaaatgagactgcaaataaatgagaactaattttggaacatttaaaggcaatttagtccatgtgtaccttttagaggaaatcttcacatccacgtggcaaaacattttcctcctcttctggcttccacttagcaaatacttgttgaaatgattaacaaaattactgttcagactacacttcaagtgttatcagtcaattgtagcagaacgtaaatatcctgtttaaatctatcatctcaggttatatctactttatcacccaacttaaaagagggtctaaaattatatttcgtaaactgcataagccagtttccaaaaatgtacaggaatatttacactgtaattttactaccttaaaattagcaaatccgtacttaatgagttagtttttcagaaaaggtacattgtctaaagaaagaaacacctacttttactctctaagaaaccaatcctatttattcaactttaatagcaagaaaaatttgtttttaagaaaagttcaagaaaatcagaatacacttacccattccagaaaacttccttttcagcaagtattctcagaaaagctactggtgcagttaggtccacgtgtatgactggaatagggaaaaataaggaaaaaaaagataaaacattatttgctcaaaattactaccaccgtccaaatctatatttgctattttccaacctcctaacagcaattaattccatccatttgtgagagtaagagtcgagcaatactagcaggatttaaaagcccaataatttacagttgaaaaatacgtaagagaataaagttgaaaaatccttagctatcagatacatgtctaaataagctcctaaaatacttgattatgatcagcagcaatcaccgactccactgtacagctccagtaaaaggaaaaaaaaaaagcagcccacagactattcttcaccacccctcccccaatcaagacctcgtggctgcaagccgggataaagagttgtttctccaactgctgtggtcctgatggcatgccgttaattttctcttttggtgatattgcaacgacgagcctgcctttttcagttccttttccctttgctgcagtttaggaacagaagaccgggcaggaacacccgagactgcaaagtgcccgccacgctcatggagcccgggccggcagcacatgtcgcacaagggggagcgcggccctgcgattctccgcgtagccgccagggggcggcgggtcagagtcaggccccgccggacgcggcaacccccccaacccgtttcccggcggcagccgcgcggcgaccggcggcgccgaggcccgagtgcggcggggacgcgggcgcgccgcccctcctttgtgtcccccagcccccccgagcccggcccagaggggcgggggctccgcggccgcggtgcccgtcgcacgcggcccgaggcctaagccgggaacaatcggcggcggcgcgcagtcgccgccatgtcccccgccctcacccccgtgcagcccgccccgcaggaacatggcggcggggacgccgctcccgccgagccgggctggccctcccgcgccacactcccagcaagcggccgggcgcaggcggctccacgccgcggctgaggccgactgcggcctcctccgagggccacggcggggaagttgcgggccccgccccgaggctgcccacgcgggctaa

SEQ ID NO: 1885357 - DNA, 4001 bp, Homo sapiens
aagaaaaatttgtttttaagaaaagttcaagaaaatcagaatacacttacccattccagaaaacttccttttcagcaagtattctcagaaaagctactggtgcagttaggtccacgtgtatgactggaatagggaaaaataaggaaaaaaaagataaaacattatttgctcaaaattactaccaccgtccaaatctatatttgctattttccaacctcctaacagcaattaattccatccatttgtgagagtaagagtcgagcaatactagcaggatttaaaagcccaataatttacagttgaaaaatacgtaagagaataaagttgaaaaatccttagctatcagatacatgtctaaataagctcctaaaatacttgattatgatcagcagcaatcaccgactccactgtacagctccagtaaaaggaaaaaaaaaaagcagcccacagactattcttcaccacccctcccccaatcaagacctcgtggctgcaagccgggataaagagttgtttctccaactgctgtggtcctgatggcatgccgttaattttctcttttggtgatattgcaacgacgagcctgcctttttcagttccttttccctttgctgcagtttaggaacagaagaccgggcaggaacacccgagactgcaaagtgcccgccacgctcatggagcccgggccggcagcacatgtcgcacaagggggagcgcggccctgcgattctccgcgtagccgccagggggcggcgggtcagagtcaggccccgccggacgcggcaacccccccaacccgtttcccggcggcagccgcgcggcgaccggcggcgccgaggcccgagtgcggcggggacgcgggcgcgccgcccctcctttgtgtcccccagcccccccgagcccggcccagaggggcgggggctccgcggccgcggtgcccgtcgcacgcggcccgaggcctaagccgggaacaatcggcggcggcgcgcagtcgccgccatgtcccccgccctcacccccgtgcagcccgccccgcaggaacatggcggcggggacgccgctcccgccgagccgggctggccctcccgcgccacactcccagcaagcggccgggcgcaggcggctccacgccgcggctgaggccgactgcggcctcctccgagggccacggcggggaagttgcgggccccgccccgaggctgcccacgcgggctaacaaagcccacgcggagcgggggtggcgcccaggccgcgccgatctcggcgcccctccgcccaccctcgcgcgtacaaagtttggggaaccgcgggctcccgcccacgccacgccgcccgctggcgcgcaggtacctcgtgggcgcgccccctcccggcccgcggcctgccccatgtgccgccgccgccgccgctttgttctggaggcgctttaactctcgccctcgggagaaactttcctacccagagaccccacgccccgcgcgcgccccgggccccggagaaggcacgggcctcgcacgtcctctccccgaggggccattgtgttcgccgtccgcccacccgccttcgggtcggcccaggcagggtctgcgcgggtcccgggcgcggccgccacgcgcacgccgccccctcccaccctcccgccccggccctgcccccctccgccggcccgcgggcgagcgagggggcagccagatgcggctgccacacgccggggcggccaacggccgagacccgccccggccacgccgccgccgccacgctgccccgggccagtccgccccgggccgctccgccccgcccgccagacccgggccgcacacaacaggtttccctccgtcgccggaggggcgggcagactcaccaggaggagtagccgccaccatcttcggctggccggccgcgggctcctgctcccgcctccccgcccgcctgcgctttactacgaccggaggccccaggccgggggtgcggccggccggcccgccccgcgaggagagcttcgcggaggagcgcgagccccggcggcgctgcggtagtcgtccccaccccctcggcctcgcccgagggcgcgaagtggcgcgaaggcgcaggtcgggcggcggcggcggcacctcgaaggaccatgtgggtgaatgaagggcggcggctcccgcctcaacgtaaatacggacaagccccactccctcattagcataaaaaacaaagtacttccgacctccccgcccgcccgccaatcaccgcaggccccgcccacggcggctcgttcttggcggccgggagagcgggagccgggagccgctggcggcgccgcgcagccttccccgggccgcgctcccccgtggcccgcccaccgccgccagcctcgcggagcgcctcgcccgaacacctcgcgccacgcctccggcacgccctccgttaacaagctctgcgcgcgtgcagacccccgcgcgccgcacaccctcctggaagcgcacgcttcccggggcttcctgggagccctgctctccctgggactcgacgtgtacgctgtgcgatcacagtttattactttaccggcccttggtgggtttccgaggtaattaggggcctgctccaggccaaccggaaccagagaagtaaaatccagtgactttaacatcgaaacagaattactcgctgcaaagatcgtttgagacccagaaataaatacattacacccgacactcttgtgaatgcacacttcgtggcaatgtgtttccttaacctggccgcgtgtaaaccaaaacgcatgcccgagcagaggtttcacagctgcagtacctgagcctcccctctcatgcccagctgcatttagtaagaactctgggttctccagtagaaatagcatagctcggaaagaacctcataaacaaccacaaagctgagaaaagaagcccaatcaggagcacctccttcttcacattgtggttcaggaaattccggaattctcagaaacataattgttaaaagtgaggattcataacatttacgagaaatacagcaattataaattggtttaaatctagtaagtagctactgcaaagcacatatcactggttcgtgattgtacaagtcaactgtaaaacacacattaccaaaggatgtctttaatgccccaatgttaaaatttttgacattcaaaccttgacagtattgtcatttactgtctttgacttattttatcatgctttgcttaaatccaattgtcaaactagtgatgacataaaaaatagtggattaaagttttgctactcttttttttattgagtctagtttctagatattcctttctttgtaaatcaaaataaaaggccaaatctgaaattttacaatatctaatatttctgtaatatagtcatttatgaacgtttcaaagaggaaaacactgctaattttattacaagtctaattttacgttacttttggtcggcattgactaatatgtcaatgcctttttctttaaaactttatcttctgtttcaaattagaatggttgaggcggggggatgttgtgagtaagattgttcatcacactctctgaatcatgggaaatcccacctatatacaggtttcttagcaggagttattcatctcatagtttccttccaattaaagtcaacattgaaatactactagctttaaaaagctgtttttaggtatctcactatatttctgtggaaatctgacatacaagcaactattttctgtgactacagtataagaaataattcttaatgtatacccttttttatggtaatcaggattttggaagacgcaaattcatttaaacctactgacttggaaattccagaaagtttcagaattagtaggttgcattttaagggtttcgctcatacttcctttcaaaattaataaattatcttaagtataattagaataattgaaaacgttttaatcccaaatgaatttgaagcttagccaacttgatgttttttggaagtcactactagtgagaaacctat

SEQ ID NO: 1885358 - DNA, 4001 bp, Homo sapiens
caattcaaaaagcttaagaactctgctaatgtacaatttgatttccattttataaatcactgttcatttcacatcctgaaaatttatgttttcatcaactccagaatgatagaattcttacctttctattcaggaatccaaggctaagttccttaaatttcttaaagaacacattagaggtgaaaacttttgttagacttcagacaatatttttaaaagctgatttctagatttattgggtggtctaacctagtgttatggaagtttatttcttattactaagatagcctcttttactccaaaatacaatgacatttctcaaaacttatctttcaaacatcaagtttgcctgtacttcagcttgggcccaattttaccacttggtccttttaaatctattattcaggtatcccacattattctacacaaatacacataggctagagacaaaaacacatgaagaaaagagagaaggcagaaatgctgggtaaaacactaactgccacttcttagtttccacttcagtgactttaagtcaaataagcctggaatcaactatcactgttgccaaagtctggcttacgtagggagtagggaacataaatgttaactacagacttagaaataaatgaatatctgaatctcaccccaccgctgcactcttggcatttgggaagagtgtacacatacatttaactgttactctatttagcatttgttctttttctaactcccatttttttaagttgcagatgctaaaagcagtctgaggaccttggtcatttatagcttataaatcactgacaatcagaaagaaaaactagtatacaagcatttaacagttacacttcagttactcatgtattggtaaactggtacttgcttaatagaaacaaattgtaccccaaccctaaattccatgcttaaaaaaactcatctttacacattgctttaaacagagcggcattctctctaaatttaaatacttgagtaatatatgagcaacataaattaacttttagattaagtaaaatatcctggaataacactaactccaaagaaagcaaaaagatatactctaactttacagatgatcatcaggtatacagtatgtttagtcatatcgcaatacttaacagccaaataaatctaacaacaaaaaatatagccagaatttatactgccaaatctgacacgcaaccccaaaagtgaaatgtttttgaatgaaaacaagacaagatgtatttacacaaaaagttacacattttctttaatatttcatgtatcttgtacatttaacagtggaagtcgaaatcttcagtaatatttaattttcaaaatcttctggtcacaatccccaccaaactcaacaggccgggacaagtgcaataccatacagaaacacagcattgcaaccgatcccaacctgtgtagaaaggggtttgagtttcccttacttttctacagacttttcactaccacagtcagttttgcatggatttgcacagcagaatatcacacagctggatgcaaacctgcaaaactaaccatagaacagtgttcagtaacaggacagtttgattgggcgacaggccgaagctggagttctacagctagcagtactttaagtgctcataatgcagtagataactaaacactacctgcactataagcactttagtgctacagaagctgtcacatcagatagaccaggcagattctacatcgacacaataaaagtacacaaaattagtaaaaatcattcatttgaaggaaatagcaggccaccatcagttttgcatagatttgcacaactacattcttcttgtagtgcaactatgcaaaactaacagaggactgcaaacaaaaactattaaaacacctatatacttgcttggcttgaattattggatgaatacataacttcttatgccagaaggagcacttagggcagtagatgctaatctacttcactatctgcactagatgcaccttagaacaaaaagcactcaacatcagcaggccctgcactttaaagcccaacttggcttcccgaggcagctgtcaccataatgctacaagtgccttcactgcagtagatgcacatatcactacctgcactgtaagcactttgacattattctgactggtcacaatcttcagttttacaaggtgatgttctcttttttcctgctaaatttgaaatagataattagaattaacacctcaaactctaacaactataaaccatacaaattcagcataatccctaatggggaagaaaaaattagtttaattatctcaaagatatgaggtccatttagacacgtatttatgccttaagaattctttacagaaggcaatcataaccaaccatccaactagcactggaagtggtggctcttccaatggctggcctctcccaaatggattgacacatagagaaaaaaaacaaaacaaaatgagactgcaaataaatgagaactaattttggaacatttaaaggcaatttagtccatgtgtaccttttagaggaaatcttcacatccacgtggcaaaacattttcctcctcttctggcttccacttagcaaatacttgttgaaatgattaacaaaattactgttcagactacacttcaagtgttatcagtcaattgtagcagaacgtaaatatcctgtttaaatctatcatctcaggttatatctactttatcacccaacttaaaagagggtctaaaattatatttcgtaaactgcataagccagtttccaaaaatgtacaggaatatttacactgtaattttactaccttaaaattagcaaatccgtacttaatgagttagtttttcagaaaaggtacattgtctaaagaaagaaacacctacttttactctctaagaaaccaatcctatttattcaactttaatagcaagaaaaatttgtttttaagaaaagttcaagaaaatcagaatacacttacccattccagaaaacttccttttcagcaagtattctcagaaaagctactggtgcagttaggtccacgtgtatgactggaatagggaaaaataaggaaaaaaaagataaaacattatttgctcaaaattactaccaccgtccaaatctatatttgctattttccaacctcctaacagcaattaattccatccatttgtgagagtaagagtcgagcaatactagcaggatttaaaagcccaataatttacagttgaaaaatacgtaagagaataaagttgaaaaatccttagctatcagatacatgtctaaataagctcctaaaatacttgattatgatcagcagcaatcaccgactccactgtacagctccagtaaaaggaaaaaaaaaaagcagcccacagactattcttcaccacccctcccccaatcaagacctcgtggctgcaagccgggataaagagttgtttctccaactgctgtggtcctgatggcatgccgttaattttctcttttggtgatattgcaacgacgagcctgcctttttcagttccttttccctttgctgcagtttaggaacagaagaccgggcaggaacacccgagactgcaaagtgcccgccacgctcatggagcccgggccggcagcacatgtcgcacaagggggagcgcggccctgcgattctccgcgtagccgccagggggcggcgggtcagagtcaggccccgccggacgcggcaacccccccaacccgtttcccggcggcagccgcgcggcgaccggcggcgccgaggcccgagtgcggcggggacgcgggcgcgccgcccctcctttgtgtcccccagcccccccgagcccggcccagaggggcgggggctccgcggccgcggtgcccgtcgcacgcggcccgaggcctaagccgggaacaatcggcggcggcgcgcagtcgccgccatgtcccccgccctcacccccgtgcagcccgccccgcaggaacatggcggcggggacgccgctcccgccga

SEQ ID NO: 1885359 - DNA, 4001 bp, Homo sapiens
ggtaatccgtctgcctcagcctccccaagtgctaggattataggtgtgagccaccgtgtccagccggaactttttaagcatagtttgaaagccacgtttgtcactaaataaccaaaaagacacaattattaggtctccttcaattcaaaaagcttaagaactctgctaatgtacaatttgatttccattttataaatcactgttcatttcacatcctgaaaatttatgttttcatcaactccagaatgatagaattcttacctttctattcaggaatccaaggctaagttccttaaatttcttaaagaacacattagaggtgaaaacttttgttagacttcagacaatatttttaaaagctgatttctagatttattgggtggtctaacctagtgttatggaagtttatttcttattactaagatagcctcttttactccaaaatacaatgacatttctcaaaacttatctttcaaacatcaagtttgcctgtacttcagcttgggcccaattttaccacttggtccttttaaatctattattcaggtatcccacattattctacacaaatacacataggctagagacaaaaacacatgaagaaaagagagaaggcagaaatgctgggtaaaacactaactgccacttcttagtttccacttcagtgactttaagtcaaataagcctggaatcaactatcactgttgccaaagtctggcttacgtagggagtagggaacataaatgttaactacagacttagaaataaatgaatatctgaatctcaccccaccgctgcactcttggcatttgggaagagtgtacacatacatttaactgttactctatttagcatttgttctttttctaactcccatttttttaagttgcagatgctaaaagcagtctgaggaccttggtcatttatagcttataaatcactgacaatcagaaagaaaaactagtatacaagcatttaacagttacacttcagttactcatgtattggtaaactggtacttgcttaatagaaacaaattgtaccccaaccctaaattccatgcttaaaaaaactcatctttacacattgctttaaacagagcggcattctctctaaatttaaatacttgagtaatatatgagcaacataaattaacttttagattaagtaaaatatcctggaataacactaactccaaagaaagcaaaaagatatactctaactttacagatgatcatcaggtatacagtatgtttagtcatatcgcaatacttaacagccaaataaatctaacaacaaaaaatatagccagaatttatactgccaaatctgacacgcaaccccaaaagtgaaatgtttttgaatgaaaacaagacaagatgtatttacacaaaaagttacacattttctttaatatttcatgtatcttgtacatttaacagtggaagtcgaaatcttcagtaatatttaattttcaaaatcttctggtcacaatccccaccaaactcaacaggccgggacaagtgcaataccatacagaaacacagcattgcaaccgatcccaacctgtgtagaaaggggtttgagtttcccttacttttctacagacttttcactaccacagtcagttttgcatggatttgcacagcagaatatcacacagctggatgcaaacctgcaaaactaaccatagaacagtgttcagtaacaggacagtttgattgggcgacaggccgaagctggagttctacagctagcagtactttaagtgctcataatgcagtagataactaaacactacctgcactataagcactttagtgctacagaagctgtcacatcagatagaccaggcagattctacatcgacacaataaaagtacacaaaattagtaaaaatcattcatttgaaggaaatagcaggccaccatcagttttgcatagatttgcacaactacattcttcttgtagtgcaactatgcaaaactaacagaggactgcaaacaaaaactattaaaacacctatatacttgcttggcttgaattattggatgaatacataacttcttatgccagaaggagcacttagggcagtagatgctaatctacttcactatctgcactagatgcaccttagaacaaaaagcactcaacatcagcaggccctgcactttaaagcccaacttggcttcccgaggcagctgtcaccataatgctacaagtgccttcactgcagtagatgcacatatcactacctgcactgtaagcactttgacattattctgactggtcacaatcttcagttttacaaggtgatgttctcttttttcctgctaaatttgaaatagataattagaattaacacctcaaactctaacaactataaaccatacaaattcagcataatccctaatggggaagaaaaaattagtttaattatctcaaagatatgaggtccatttagacacgtatttatgccttaagaattctttacagaaggcaatcataaccaaccatccaactagcactggaagtggtggctcttccaatggctggcctctcccaaatggattgacacatagagaaaaaaaacaaaacaaaatgagactgcaaataaatgagaactaattttggaacatttaaaggcaatttagtccatgtgtaccttttagaggaaatcttcacatccacgtggcaaaacattttcctcctcttctggcttccacttagcaaatacttgttgaaatgattaacaaaattactgttcagactacacttcaagtgttatcagtcaattgtagcagaacgtaaatatcctgtttaaatctatcatctcaggttatatctactttatcacccaacttaaaagagggtctaaaattatatttcgtaaactgcataagccagtttccaaaaatgtacaggaatatttacactgtaattttactaccttaaaattagcaaatccgtacttaatgagttagtttttcagaaaaggtacattgtctaaagaaagaaacacctacttttactctctaagaaaccaatcctatttattcaactttaatagcaagaaaaatttgtttttaagaaaagttcaagaaaatcagaatacacttacccattccagaaaacttccttttcagcaagtattctcagaaaagctactggtgcagttaggtccacgtgtatgactggaatagggaaaaataaggaaaaaaaagataaaacattatttgctcaaaattactaccaccgtccaaatctatatttgctattttccaacctcctaacagcaattaattccatccatttgtgagagtaagagtcgagcaatactagcaggatttaaaagcccaataatttacagttgaaaaatacgtaagagaataaagttgaaaaatccttagctatcagatacatgtctaaataagctcctaaaatacttgattatgatcagcagcaatcaccgactccactgtacagctccagtaaaaggaaaaaaaaaaagcagcccacagactattcttcaccacccctcccccaatcaagacctcgtggctgcaagccgggataaagagttgtttctccaactgctgtggtcctgatggcatgccgttaattttctcttttggtgatattgcaacgacgagcctgcctttttcagttccttttccctttgctgcagtttaggaacagaagaccgggcaggaacacccgagactgcaaagtgcccgccacgctcatggagcccgggccggcagcacatgtcgcacaagggggagcgcggccctgcgattctccgcgtagccgccagggggcggcgggtcagagtcaggccccgccggacgcggcaacccccccaacccgtttcccggcggcagccgcgcggcgaccggcggcgccgaggcccgagtgcggcggggacgcgggcgcgccgcccctcctttgtgtcccccagcccccccgagcccggcccagaggggcgggggctccgcggc

SEQ ID NO: 1885360 - DNA, 4001 bp, Homo sapiens
atctccccaaaagcacaccattttgcaaactaccagaccatgctgtattatgaaactttttttttttttttttttttttttttgcgtttaagtcttggtcttgcgcccaggctggagtgcagtggcaggatctcagctcactgaaacctccacctcccaggttcaggtgattctcctgcctcagcctccagagtagctgggattacaggtgcacgccactgcacccggctaattttttatatttttagtagagacagcgtttcaccatgtcggccaggttggtctcgaactcctgacctcaggtaatccgtctgcctcagcctccccaagtgctaggattataggtgtgagccaccgtgtccagccggaactttttaagcatagtttgaaagccacgtttgtcactaaataaccaaaaagacacaattattaggtctccttcaattcaaaaagcttaagaactctgctaatgtacaatttgatttccattttataaatcactgttcatttcacatcctgaaaatttatgttttcatcaactccagaatgatagaattcttacctttctattcaggaatccaaggctaagttccttaaatttcttaaagaacacattagaggtgaaaacttttgttagacttcagacaatatttttaaaagctgatttctagatttattgggtggtctaacctagtgttatggaagtttatttcttattactaagatagcctcttttactccaaaatacaatgacatttctcaaaacttatctttcaaacatcaagtttgcctgtacttcagcttgggcccaattttaccacttggtccttttaaatctattattcaggtatcccacattattctacacaaatacacataggctagagacaaaaacacatgaagaaaagagagaaggcagaaatgctgggtaaaacactaactgccacttcttagtttccacttcagtgactttaagtcaaataagcctggaatcaactatcactgttgccaaagtctggcttacgtagggagtagggaacataaatgttaactacagacttagaaataaatgaatatctgaatctcaccccaccgctgcactcttggcatttgggaagagtgtacacatacatttaactgttactctatttagcatttgttctttttctaactcccatttttttaagttgcagatgctaaaagcagtctgaggaccttggtcatttatagcttataaatcactgacaatcagaaagaaaaactagtatacaagcatttaacagttacacttcagttactcatgtattggtaaactggtacttgcttaatagaaacaaattgtaccccaaccctaaattccatgcttaaaaaaactcatctttacacattgctttaaacagagcggcattctctctaaatttaaatacttgagtaatatatgagcaacataaattaacttttagattaagtaaaatatcctggaataacactaactccaaagaaagcaaaaagatatactctaactttacagatgatcatcaggtatacagtatgtttagtcatatcgcaatacttaacagccaaataaatctaacaacaaaaaatatagccagaatttatactgccaaatctgacacgcaaccccaaaagtgaaatgtttttgaatgaaaacaagacaagatgtatttacacaaaaagttacacattttctttaatatttcatgtatcttgtacatttaacagtggaagtcgaaatcttcagtaatatttaattttcaaaatcttctggtcacaatccccaccaaactcaacaggccgggacaagtgcaataccatacagaaacacagcattgcaaccgatcccaacctgtgtagaaaggggtttgagtttcccttacttttctacagacttttcactaccacagtcagttttgcatggatttgcacagcagaatatcacacagctggatgcaaacctgcaaaactaaccatagaacagtgttcagtaacaggacagtttgattgggcgacaggccgaagctggagttctacagctagcagtactttaagtgctcataatgcagtagataactaaacactacctgcactataagcactttagtgctacagaagctgtcacatcagatagaccaggcagattctacatcgacacaataaaagtacacaaaattagtaaaaatcattcatttgaaggaaatagcaggccaccatcagttttgcatagatttgcacaactacattcttcttgtagtgcaactatgcaaaactaacagaggactgcaaacaaaaactattaaaacacctatatacttgcttggcttgaattattggatgaatacataacttcttatgccagaaggagcacttagggcagtagatgctaatctacttcactatctgcactagatgcaccttagaacaaaaagcactcaacatcagcaggccctgcactttaaagcccaacttggcttcccgaggcagctgtcaccataatgctacaagtgccttcactgcagtagatgcacatatcactacctgcactgtaagcactttgacattattctgactggtcacaatcttcagttttacaaggtgatgttctcttttttcctgctaaatttgaaatagataattagaattaacacctcaaactctaacaactataaaccatacaaattcagcataatccctaatggggaagaaaaaattagtttaattatctcaaagatatgaggtccatttagacacgtatttatgccttaagaattctttacagaaggcaatcataaccaaccatccaactagcactggaagtggtggctcttccaatggctggcctctcccaaatggattgacacatagagaaaaaaaacaaaacaaaatgagactgcaaataaatgagaactaattttggaacatttaaaggcaatttagtccatgtgtaccttttagaggaaatcttcacatccacgtggcaaaacattttcctcctcttctggcttccacttagcaaatacttgttgaaatgattaacaaaattactgttcagactacacttcaagtgttatcagtcaattgtagcagaacgtaaatatcctgtttaaatctatcatctcaggttatatctactttatcacccaacttaaaagagggtctaaaattatatttcgtaaactgcataagccagtttccaaaaatgtacaggaatatttacactgtaattttactaccttaaaattagcaaatccgtacttaatgagttagtttttcagaaaaggtacattgtctaaagaaagaaacacctacttttactctctaagaaaccaatcctatttattcaactttaatagcaagaaaaatttgtttttaagaaaagttcaagaaaatcagaatacacttacccattccagaaaacttccttttcagcaagtattctcagaaaagctactggtgcagttaggtccacgtgtatgactggaatagggaaaaataaggaaaaaaaagataaaacattatttgctcaaaattactaccaccgtccaaatctatatttgctattttccaacctcctaacagcaattaattccatccatttgtgagagtaagagtcgagcaatactagcaggatttaaaagcccaataatttacagttgaaaaatacgtaagagaataaagttgaaaaatccttagctatcagatacatgtctaaataagctcctaaaatacttgattatgatcagcagcaatcaccgactccactgtacagctccagtaaaaggaaaaaaaaaaagcagcccacagactattcttcaccacccctcccccaatcaagacctcgtggctgcaagccgggataaagagttgtttctccaactgctgtggtcctgatggcatgccgttaattttctcttttggtgatattgcaacgacgagcctgcctttttcagttccttttccctttgctgcagtttaggaacaga

SEQ ID NO: 1885361 - DNA, 4001 bp, Homo sapiens
ggatctcagctcactgaaacctccacctcccaggttcaggtgattctcctgcctcagcctccagagtagctgggattacaggtgcacgccactgcacccggctaattttttatatttttagtagagacagcgtttcaccatgtcggccaggttggtctcgaactcctgacctcaggtaatccgtctgcctcagcctccccaagtgctaggattataggtgtgagccaccgtgtccagccggaactttttaagcatagtttgaaagccacgtttgtcactaaataaccaaaaagacacaattattaggtctccttcaattcaaaaagcttaagaactctgctaatgtacaatttgatttccattttataaatcactgttcatttcacatcctgaaaatttatgttttcatcaactccagaatgatagaattcttacctttctattcaggaatccaaggctaagttccttaaatttcttaaagaacacattagaggtgaaaacttttgttagacttcagacaatatttttaaaagctgatttctagatttattgggtggtctaacctagtgttatggaagtttatttcttattactaagatagcctcttttactccaaaatacaatgacatttctcaaaacttatctttcaaacatcaagtttgcctgtacttcagcttgggcccaattttaccacttggtccttttaaatctattattcaggtatcccacattattctacacaaatacacataggctagagacaaaaacacatgaagaaaagagagaaggcagaaatgctgggtaaaacactaactgccacttcttagtttccacttcagtgactttaagtcaaataagcctggaatcaactatcactgttgccaaagtctggcttacgtagggagtagggaacataaatgttaactacagacttagaaataaatgaatatctgaatctcaccccaccgctgcactcttggcatttgggaagagtgtacacatacatttaactgttactctatttagcatttgttctttttctaactcccatttttttaagttgcagatgctaaaagcagtctgaggaccttggtcatttatagcttataaatcactgacaatcagaaagaaaaactagtatacaagcatttaacagttacacttcagttactcatgtattggtaaactggtacttgcttaatagaaacaaattgtaccccaaccctaaattccatgcttaaaaaaactcatctttacacattgctttaaacagagcggcattctctctaaatttaaatacttgagtaatatatgagcaacataaattaacttttagattaagtaaaatatcctggaataacactaactccaaagaaagcaaaaagatatactctaactttacagatgatcatcaggtatacagtatgtttagtcatatcgcaatacttaacagccaaataaatctaacaacaaaaaatatagccagaatttatactgccaaatctgacacgcaaccccaaaagtgaaatgtttttgaatgaaaacaagacaagatgtatttacacaaaaagttacacattttctttaatatttcatgtatcttgtacatttaacagtggaagtcgaaatcttcagtaatatttaattttcaaaatcttctggtcacaatccccaccaaactcaacaggccgggacaagtgcaataccatacagaaacacagcattgcaaccgatcccaacctgtgtagaaaggggtttgagtttcccttacttttctacagacttttcactaccacagtcagttttgcatggatttgcacagcagaatatcacacagctggatgcaaacctgcaaaactaaccatagaacagtgttcagtaacaggacagtttgattgggcgacaggccgaagctggagttctacagctagcagtactttaagtgctcataatgcagtagataactaaacactacctgcactataagcactttagtgctacagaagctgtcacatcagatagaccaggcagattctacatcgacacaataaaagtacacaaaattagtaaaaatcattcatttgaaggaaatagcaggccaccatcagttttgcatagatttgcacaactacattcttcttgtagtgcaactatgcaaaactaacagaggactgcaaacaaaaactattaaaacacctatatacttgcttggcttgaattattggatgaatacataacttcttatgccagaaggagcacttagggcagtagatgctaatctacttcactatctgcactagatgcaccttagaacaaaaagcactcaacatcagcaggccctgcactttaaagcccaacttggcttcccgaggcagctgtcaccataatgctacaagtgccttcactgcagtagatgcacatatcactacctgcactgtaagcactttgacattattctgactggtcacaatcttcagttttacaaggtgatgttctcttttttcctgctaaatttgaaatagataattagaattaacacctcaaactctaacaactataaaccatacaaattcagcataatccctaatggggaagaaaaaattagtttaattatctcaaagatatgaggtccatttagacacgtatttatgccttaagaattctttacagaaggcaatcataaccaaccatccaactagcactggaagtggtggctcttccaatggctggcctctcccaaatggattgacacatagagaaaaaaaacaaaacaaaatgagactgcaaataaatgagaactaattttggaacatttaaaggcaatttagtccatgtgtaccttttagaggaaatcttcacatccacgtggcaaaacattttcctcctcttctggcttccacttagcaaatacttgttgaaatgattaacaaaattactgttcagactacacttcaagtgttatcagtcaattgtagcagaacgtaaatatcctgtttaaatctatcatctcaggttatatctactttatcacccaacttaaaagagggtctaaaattatatttcgtaaactgcataagccagtttccaaaaatgtacaggaatatttacactgtaattttactaccttaaaattagcaaatccgtacttaatgagttagtttttcagaaaaggtacattgtctaaagaaagaaacacctacttttactctctaagaaaccaatcctatttattcaactttaatagcaagaaaaatttgtttttaagaaaagttcaagaaaatcagaatacacttacccattccagaaaacttccttttcagcaagtattctcagaaaagctactggtgcagttaggtccacgtgtatgactggaatagggaaaaataaggaaaaaaaagataaaacattatttgctcaaaattactaccaccgtccaaatctatatttgctattttccaacctcctaacagcaattaattccatccatttgtgagagtaagagtcgagcaatactagcaggatttaaaagcccaataatttacagttgaaaaatacgtaagagaataaagttgaaaaatccttagctatcagatacatgtctaaataagctcctaaaatacttgattatgatcagcagcaatcaccgactccactgtacagctccagtaaaaggaaaaaaaaaaagcagcccacagactattcttcaccacccctcccccaatcaagacctcgtggctgcaagccgggataaagagttgtttctccaactgctgtggtcctgatggcatgccgttaattttctcttttggtgatattgcaacgacgagcctgcctttttcagttccttttccctttgctgcagtttaggaacagaagaccgggcaggaacacccgagactgcaaagtgcccgccacgctcatggagcccgggccggcagcacatgtcgcacaagggggagcgcggccctgcgattctccgcgtagccgccagggggcggcgg

SEQ ID NO: 1885362 - DNA, 4001 bp, Homo sapiens
atggaggaggtgagcatcacaattcaacaataccctgcaggttccctggggagccaaaagaggcattaaacatggagggagcagaggcaggagcaagggggctcagtgggagtccagagaaggatgtgggtacagcagaggccaacagaaaaacagcaacctactctatgctccccctttactgctctttcatttgtgatgcaaagatgaggaaaatcaggtaagcactttgtaccaatgcatttctctccacaaatgtaaaatacaattaaacattccaggtactgattttcaaattgccatgtattatatagtttccctcaagaaaaccatgtacatttggtgttcattcctggtgttttagaaataacaatgatagttctttctaaaacatttgaatttataccactgtgatgttatgatcccatttatgctattacatgtctcataggcaaacatttcttaaatgtttagttttcagacaaaaaagaaaggaaagcactgatgagttccccttctaagtgaaaccttccaatgcctcttagctcaagggaaaggaaggggaaagaaactttgttgcttccagcagcaaacagagaggtcaacctaccaagctatagggccaggcattgagccctgaaccagagaagccttagagccaactttgtcctgctgctttcccttgaatatgccattttatttccctggaccacggtttcctcatctgtagaatataaagtccctttcagctatcaaggtgcatgctctgcttcagtatctgtaaagtagaaatactacttgcctccaactcttaggaagataaagactaaaaaagaaatgtttggacaaggctttaagattacataatgaaatggatataaataagactcatacagtcacacagctaacagagaccataaagatctgtccagctaaagtgaaacggaactctcaatgcacgggaggagacagctggcagtagtcttcttttttaatttaacttaatttttttagagacagagtctctcgttctgtcacccaggctgcagtgtagtggcaaaatcatagctcactgcagtctcaacctcccaggctcaagagatcctctcacctcagcctcctgagcaccttggactacaggtgagtgcgccatcacaaccagctgatttcttatttttattttttagagatggggtcttgctatgctgcctaagctggtcttgaactcctgggctcaagcaatcctcctacctcggcctcccaaagtgctgggattacaggcatgagccactgtgcccagccaggtcatttttatgccactttcttcagggcttcctgtggctaagagggaaagtagactgatagcatggatgaggtgacagcccaggcactggccccaggctttctgagggacagccggcattaggtttttctccatgcactgtcctacaggtatagaattcatgtcctccactggtgtacattgcagactaaataaaacatgtcatataacaacctcctttccaaagctaaactccaggcatgcctgagttcaagaggtcacccagcagggaagctccactgtctggtgagaagagggcctccactgctaggcagtggcaagaagccatgccggttacctcctctgagccttccttttctcatctgtcaaatggggacagtagtagatcctacattatagggatgtgtggaggattttaaatgagtactgatgcacgttaagccctcagaacagtgcttggcacacacccagagtttggtagatgctacctaacatcaatattgacattaattctagaactatgtagaggatacgacttcaataagaaaacaatcagtcagaagcagtggcagaagggagggtcctgaaatccagagtcctcctgcagagatgcagctgccactcctcgcctctgacacttgcagacattcggagagaaagccgtctgcaaggtgacagagggcggactggaagaacacaaggaacccagggatgctgatggagcatggaaaaccgcagcagaaggcactgaggcaaggtgtgccctccaggcggggcaggctgtggctgggcagagcgcctgccagggagaagtagggcaaagggaagaaagcacctgtgggagaaacatggggaaacaaggaagaaacctgcatatgcacgggagcacaaataaggaaggagatgggagaactgggtggaggcagatggcaaacgtgggggccaagggaggtagatgagaattaggatatgggataataagacaaagccacatgaaactctaaagtgcgggaggagggcagagaacagggagggtgcatgacaggcaccccgagaataatgcagtgaggaagtttgcaagacgggggagggggacattaggaaaaaaggagaatttgttgggaaaggtggaaaaagaaaaggagtgagatttctccgcctgttagcaaggggaataaaggagagcaaatcgctgggtgaccaggaaaggttcacagagaagaaaacacgaggcagcaaaaaccgaaggtggggacagagaaaatgctggcagggggaggtgcataatataaggctatgggaagccatgggaacaagagctgaataaattcacagtattattctatttatccacatccctatgcaatgctgggaagcaaatgacccacagggttttgtttgcttgctttggtttggttttcctgcacttggagggaggggaaatttgctcaagctctgtaaccttgcagtcagatgggtggcccagcccaagtcacccgagctccccctgacgctggcagcagcgcgggcttctacctgcctggggctggagtaccaattcccccacctcctgcacagaatgggaccaaaccaactccgccaatgcattccctgcagtccacagacgatgggcaccgggtcccaaaatctttcccctgggacgagactccgctggtaccaagagaaacttgctttctaaactaagctctccaaccgcatcgctccgggtccccggaggcaccagccacgccacccgatggagcagagcgttacagggctccgccgcgccaggctccccagactctgccacccccacggccgcccctgtaggccaggccccgcgagctgggagcgcgggtgaagttacaaggcgacctccctgcaggcttccggctggaaacggccttttgcgagaacaccacgtgcatgtcctcccaaaagcgatggtgccgggtggcccagagggcgcagagccaccgccgggcagggagcgggcgcacggacctaacaggtgagcacccggtagcctccaccggcgggggaagcagaggccaagcagctgggagctggacatcccgaagccccgaggcagtccactgggactcaaatcctcccgatattctacctaacagcccatgcccgcgcccgcccggcagagccgcgcgcccgaagccgtcttacctcctgcggcgcctcttggcggagcctacaaagtcagcgtgtccaacacgtccctgccctcagagccacctccggtgccggcggagccccgaggtcgccgcactctcggaggagcctgggatccagtgcgcgccctcggagctagcgaccggcagggcgatcgcgggagaaagcgcaacgcacactctcctcccgcgccgcggcagcacactcagccaagccacgccccagccccgctccccaccaggccacgcccccagcccggctcttccccccgccccatatcaggccacgcccccggttagctcactccctcaggccacaccctcggccacgcccccacactaccaaccacagccggggaccccacccatcaaaaacagttccccggccaggcgcagtggctcttgcctgtaatcctagcacttttggaggccgaggtgggcggatcacctgaggtcaggaatttgagagcagcttggccaacatggtgaaaccccgtctctaataaaaataa

SEQ ID NO: 1885363 - DNA, 4001 bp, Homo sapiens
tcaatttactttaagtagagaaaaaagaatactgaaaatataaggcaatcaattttaaggaactgacttaaccccaggatgaggttacagcaagtttccttcatttaacacagtccagtccaaacatttttcatgggcacaactgaaaagtgtcactccataaagaaaaaataattggtaattttatacttttataagaagtcagccagatgtatccacacatcaccgtcaccagaaccacaatcaacttttctattcctgtacctaaatttttctgagtgcttaaatatatccaacaacagaattaaggggaagggaaatgttctggattgaattgtgcccactccctaaaaaatgataagttgaagttttaaactccattttctcagactgtaagcttatttgaaaacaggttcttcacaaaggtaagtgggttgaaatgaggtcatcagggtgggctctattgccatataactggtgttcttataaaaatgggaaatttagacacagagaaaacacacttatgcaaaaagaacaccatgagaagatgaaggcagaaattggggtgatgatttacgagacaaagaatatcaaggattgccaaagaccaatggccacttgcagaaactaggaagaggcaaatacagactctggagggagcatggttctgcagaaaccttgattttggactcagattccagaactgttagagaataaatcttgtggttttttttgtttttgtttttgtttttttgagacagagtctcgctctgtcgcccaggctggaatgcagtggtgccatctcgcctcactgcaacctccgcctcccaggttcaagcaattctccttcctcagcctcctgagtagctgggattacaggtgcccaccaccacgcccagctaatttttgtatttttagtagagatggggtttcaccatgttggtcaggctggtctcgaacccctgacctcatgatccacccacctcggcctccctaagtgctgggattacaggcgtcagccaccgcgcctggccaaatcattgtgtttaaaccactcagttgttgatgctttcttagggacgacctagaaatacagaagacagaaggatcgtgagacagttcgttattgtttggcgaactgtagctggactccggctcatataatgaaagaaacttaaaggaatgcctaagaatattactctacgagtgtaagaatttggtttgtcagtttaaactgatatcagcagttacctaaaccaagttttttaataagaacatccaggactgacataatgctattttgttcagctctttgaaaaacagcacaaagctagcatctctgtgacattcattaggttctgtagcacaacatcccagaggatgcttttgggcttcctgcatctcagtcacttagaatgaaccttaaaattcagatttttcaaggctcatcccaaacctaccgaatcaaagtgacttcttctgttgagtaagaatgtctgagggtggagtgttctattgagtcagaatgtctaaagtcatttgtaaactaatctcagatagataatccttgtatacattaagagaaccactgtcctatgtttacttgactgttttcataatgttttccttctgattgtggtaaagttaaaattgttttgagctaaatgtgtaccaatatcagtttctgcagtataaacaaagcttgattatttcaaggtcatgcagtgagaacatttatgctgtgtgggaggaacctctaattccttctaatgaataacacaagcaaaatacaagaaaaacaatgcaaacactggaaggcataagtaagcacatctgtttttaaatgttctcctctcattgattcctctaatcaaggtgcttctttagatagcttacacgttgaattattcatgcatctgtgctttaccaactccatgatactgaagagtctttgggcagtctcctggaggtggtaaaacacaaatgcgtgaaaagggggcagagagcatatctttgctcttgatgtctttttaacctctattgaatcctctacaaaacctattgcatggcttagacacattaaacacccaataaattcctgctgcctaatcagaaggaagaaaatctgatacatgaacactcccaggataaaatggggtgatggcttggacatgctggtaacagaggtaacattttctatttccaaattgcaagttcacccataactgtaatggagatgagtcactgggtcaatggtcatgctgtaaatttgtagctctctgctaacacttgaaaataattcttaaaatgattgtcttcattttattagcatgactgatgacttggaagggaatctataattgattacattctacaaccaacctctgttactcaaatgagtgaaagtgcagttataagtagataaatcttgtctaagaaatgaagataaattcatataaatgcataaaggtgaaattgttatgtaatggctatgcctaatttattaagcatgtcataataagcctgacaaaaagtctaaaaaatattttttgcaagatactgaacagtaacaaaatattttacctgttggatgtacaaaatcttattttaacagctactgaacacattaaaaaaaatacagcttaggctgggcgtggtggctcatgcctgtaatcccagcactttgggagaccgaggcaggcggatcatgaggtcaggagatcgagaccatcctgactaacatggtgaaaccccgtctccactaaaaatacaaaaaattagccaggcgtggtggcaggcgcctgcagtcccagctactcgggaggctgaggcaggagaatggcgtgaacctgggagacggagcttgcagtgagctgagatcgtgccactgcaatccagcctgggcgacagagcgagactccgtctccaaaaaaaaaaaaaaaaacctcaatatcaatatttcctgtattttatacttaagaataccacaattacaaaagtcacagccacaaaagtgtgagatcatacagctgccagactaagtgttcccccacaactcttttaactcacttttcatttgttctgtaatcatgcattccatcaacagccttttttttttttttttttaaatctgggcattgtttgagttgaaaaaagctgggggtttggaagcagggagggtactttaaggaagatgggtttttatcaccaggtcactttccatccacaattccttggtatggacagaagagaagggcatgcctagagcctgaagctagcacagaactcactagttgaaagaaacaaggatggtcagtggaaggggaggtaaggaaaatctggccagtgggctccatgccttggagtcatgcttagatccacctttgtgaaggggtggactgcctaggtcttcataactacctgtgccagcacttagctcatagttgtcacttatcatgggtgggtaagttaccaaataaacaacttcatctggtctggttactggggattgaaggataagaaacggtatagtctaggctgggtgcagtggctcacgcctgtaatcccagcactttgggaggccgaggtgggcggatcacaaggtcaggagatcgagaccatcctggctaacacggtgaatccccgtctctactaaaaataacaaaaaaaaagaaatggtatagtctagtgtttctggctgttagtcattggtaaagccaaaatactcctgcctttgaagtttcctgatgccttctaaacattatatttcaatctggtgaaggaatagggctctaatgagtcatttgtgaaaccctaatcaatagccttgtggtctccctcatttcttattatcattgcacacactacatccacatgactgcttgtaagactatttttcaccgtaaattgaactcaaaatttgcatatttctaccaattttaaattttggcttatgttacattttgtatgaacaagttgctgcctagagtagaaaagtggca

SEQ ID NO: 1885364 - DNA, 4001 bp, Homo sapiens
agaactgttgggtgtcccaaacaattgttaggtgggtggaggcctaccaaagtgctggaatcacaagtttttgttttttttttgttttttgcttttttttttacacagagtcacaagttttgttttgttttgttttcacacagagtcctgccctgacgcccaggctggagtgcagtggcatgatcttggctcactgcaaactccgcctcccaagctcaagcaattctcttgcctctgcctcacgaggagctgggactataagagtgcaccacaacgcccagctaatttttttgtgtatatatatatatatatacacaaatatatatatacaaacacatgcatatatatacatatatatatatgtatatatatatattttttgttgtttttgagacggagtcttgctctgtcgcccaggctggagtgcagtggcgcgatctcggcacactaccagctccgtctctcaggttcacgccattctcctgtctcagcctcccgagtagctgggactacaggcgcctgccactacacccggctaatttttttttttatatttttagtagagacggggtttcaccgtgttagccaggatggtctcgatctcctgacctcgtgatctgcccaccttggcctcccaaagtgctgggattataggcgtgaaccaccgtgcccagccttttttgtatttttttagtagagaaggggtttcaccatgttggccagggtggcctggaacccctgacatctagtgatccaccctccttggcctcccaaagtgctgggattacaatcatgagccaccacgcctggccatccagccacgtttttcttatatagggttcttgtcaatgtaaagactaagctcagttgtatctatgtgcagacgggcagacagcatgacaaaatttattattttactgatttaatgaaaactatgcttgaccttttggtgtgtaagtacattaaagcataactataattatgtgaaaggatacattgttatggggatcaggacatctggactttctgttgttgtaggagtttgtccttacaggcattatcaagctgctttcttaattgtaaacatatcaggaccatgggttgtcactggcaaggaatgtgccttgctagttttaagatggggttgatttttcaatggtgtcactggctctcctaggctcctgcttccctaataagaggactgcttgaggccaggagtttgatgccaccctgggcaaaatattgataccttgtcactacaaaaaaaaaattagctagatgtggcagtgtgtgcttgtggtcctggctactggaaggctgaggcaggaggattgcttgaccccaggtgttggagactgcagtgagctatgatcgtgccactgcacttcagcctcagagacagaatgagaccctgtttctttccctctttttttggcttcatattttgtaatattttatttgagcactgaaaaattctagaagttacataaatataagtaactcattttacagattaaaaatttgagattgaaatattaggcaacttgcatgaggtcaaaacgtggcaagatacagaacagagactgaacatacgactcaagattttctgcatgttttacattggtgggctcaaatttattcaaatgacagagcctctaagtgttatggtgtcccttgagaaacatctgcttaattcacaagactacattatatgtacacaatatgagaatcatgagaacatatgtccatgtcaaaaacatatgtccatgtcaaaactgtctgctaaaagaaatatgaactatttataagttttccatgaatattcatatagcaattaataatcaatttactacaaccctatgagacagatactagtattaccctccttttgcagataagaaaatggcatagagaagttaagtcactggcccagggtcacacagcaagaagtgaagatgagcctccaactcaggctgtctgactgtagaactcatgatctttaagcattattccatcattttgtcatcaatgaggaggaacaaaaacatttacacattagttcgtatgtgtgtttctctgtgagagaccctatttctaaaaaaaaaaaaaaaagaatttgttgaaaggacgccacatgcaaaattgattggaagggcaaacaaccagttcagaaaatgtgaaagaacaaatatttctctggcagccagaactaaagcaaaactcaagtcagtgcaaatatcaataagtctgataacacatttctaggagggatgggtgaaatggcaccattatatattgctggtgtagcataaatgggcataacttctccagaaggcacttctgtaataccttgtcaaaattccaaatgccaaatgtacacaccttttgagaaattgcttctaaaaatattttggcatagaagtgaaataatgtaagtagaagagtattcacaacagcactgtttgtaatggcaaaagattataagtcacttaaatgtccaccaatggaaacttagtggattatgatacatttttacaatgtctactctgaagataaaaaaaaaagagtgagcaggtccttgatgtactcatatgggacatgctacatagcattagaagcagtttatatacgtaaaatatatatgtattttacatacgtacaaaaatacacacatgtaaatgaaaaacaaaactataagccctcaaatgactaaatggaccccctcttagccaagaagacaccagagaaatcttaaaaattagttcctggccatgacaggaaaggaggtcagaaaggcctcaagacatcccctcccttttggaatttaggcacaactgactagcaataatgttacaatagaaatcaaaagactgacagaacaaactctgtggcaataaaataccaaattataaacaggacctaaagccatgcaaggcaagggttaggtcacacctgcaggccatctgtcttgataagtaggtcattttgacccagtatattgaagcttgctctcacaaccggactctgacacagcatccttatcccaatttcaacattcctttctgctaactccaagtttttagacaaagctttgttcctttaacccactgcaaatttaaaaaatctctgaacccactgtgacctgtaagcccctgcttcaagatatctcatgttttcgggctaaactagtgtataacctccatgtattgatttacggttttggctgtaacttttgcttccctaaaatgtataaaacaaagttacattcttgaactcctgatctcaagtgatccgcctccctaggcctcccatagcgctgggagtataggcttgagccaccactcaccgccatagacaaagttacattctgactgcctcaggaccacttactcaaggcttcttgggtttgtgttttccctgggcctccatcactcatactggctcagaataaaccttaaaatacttcacagggccaggcatggtggatcaagcctatgatcccagcactttgggaggccaaggtgggggaattgcttgagcccaggaatttgagaccagcctaggcaacatagtgagactccatctcttaaaaaaaatatatatatatatatattttagtgtgtgtgtgtatatatatataatgtgtatatatatattatatatatatttatatatatatataaaatatatatatacacattatatatatattttatatatatatatataaatatatatataatatatatatacacattatatatatatacacacacacacacacataagccaggcacggtggctcatgcctgtaatcccagcactttgggaggctgaagtgggcagatcacaaggtcagagttcaagaccagcctggccaatatggtgaaaccccgtctctactaaaaatataaaaataagctgggtgtggtggcacatgcctgtagtcccagctactcgggaggccgaggcagaagaatcgcttgaacccaggaggcaga

SEQ ID NO: 1885365 - DNA, 4001 bp, Homo sapiens
ttaaaaggttaattttttaaaatgttgtctttactagtcatgagcacatgtatcactgatgccaatttatgtcaacctaaggaaggtcaatggaagaagcactggatccaaaggctaaactgaattatacttttgctagtaactttggacgaattatttctcaccccatcttccaaattaatgatcaaacagtgttaataatacatatccttgttatcgctgcaatttaatgggactcaagttaacaaatctatgtgaatgagtgttgaagagttgaaagtgtaactattattcaccttgttaaaaaaaaaacatgggttatagagccaaataaaactagcttggaattttcctcatcttcttcatagatccaaatcccttgacaagttacttagcatctctgaacctcagtgcaatcagcaaagttgaggtagtaatgcatagcctggaggttgaatataaagttacattgaaacaagacatcccaaaataactagtatactgtctggcccttaaaaatttactgaatatatgatgattttcctttctactgtatcttacatcatgaatttatttaacataattagtgctggcaaccttatgaaaggaaaagacaaatcacagattatattttcaataggtttttaaaaaatcaaaatatataataaactctaccaaagcaataagcaaattaagaataaacaatcctgtagaaaacaagcaatttaaggaatcagaaactgaaatggccaataaacacagggaattattttcacagttttctcatctgaacagctaataaataacactgatataccatttcatatccatagtggcaaacttttccatttgcataattacttttattataactgaggataaacagaaattcttatacataattttttattgcctaataaagttgtatgtgtgtatccctgaattcagcaatttcaccagaaagcatatatgtgagaaactctaataaatggaccaaaagaattccaaaactgtaccaacctatctcagtagaagaatgaataagccttgtttttattataaattgaatattaaaaagcaatgaaaattaatcagatctacatttatcttcatttaaaacctcaaaaacataatgctaagtctaaaaattaaatcataaaattatatatacagtagtttaaatttacaaagcaatttcatatatattaaattataatttatttttaaaatgcaaaagcatgataggaaagatttacaccaacctgagaatcatagatctttctgggaagacagtccaggaaatagcatggggtacatctaaattctatcaattatatttttatatatataccaggaagaatgatttcttctgcatcctagtgtgggtattgtcaatgtacataccaattcttcttaaggctgttaaacccaccattctcactaccaaaatattattattcattttgttttgaataagctcaataatctatgttgtgctattattgttattattgttgttgttgtttaatgagcaagccaagtttatgaatatgtgaacagtgaatagattccattttgagagacattgatttatcacaatgaaatacagaccaattataagctacagtttcttcacgtgtgtttttaaaatatcttattttactcgaataaaaattcttttagaaatttagtcgaatttttcttgtgccctctgataaattacctcctacttaatgttgtctgtattttcagtaaaaagtttaccaatatttacgtgtatttgctaggacatatctgagttgaattcctcattatgactcttacagtttatatgacctaaaacaatttctgtttcatcagttgtaaaattggtatgaaatattacaaggttttgtgaggattcatgtgggatgacatatgtaaaaacacaggactatgcttggcacacagtaccataagactttgtgctatgtgccaagcacagtcctatgttttcacatatgttagtagcataagtcacagtacaaagtattattagcaaccttatcaacactgtcactattaccatcaggccattcaaagatttagaaataattaggattttatcgttgtttgctctttaagtcaatactttgcatggttttgaaagtcctccttaatttcaccacactttcccacatgttaagctgatctctttacgacattgtatcttaaatcagcatgctcttaccagacctatggcttttgatctttcatcagcctcacctacaatgtccttttctttccatttgtctattctaatcctttctatcttccaaagcttgcctcaaatctcatcttgtctacagtttcattgaattgatttaaatcttctcaaccaatatttatattgtctgtatcaggtaatttagtggttaattatgttctaccttatattcttcactgatgttttatattcacattgtcaccacaaagtaaactgtttgaacctatgggctgcatctgtgatttctttcatcactctgatagagcattacagaatcatgagtgagtagcagatatttgatacattttgactgtaataaaaaataacccattatatttttcctagcatccaattgtgtctatcactcatcagttcaaggaaagtctctctgccataaatggtggtttccaataaaatttatttcacttaatttaattcatgttgcactcagtttatctcttgtctaaggtaaactatccaagaagaaaacctttaacaacttttcaatgtcatgataaataccttttggatttttacaaaaaatttttactaacataattaagtgtgatcaagtaggataacagaataagaatggttattcctaaaggtatgaaaaagtgggagcatcagcaaaatagggctgctatttcttatggttttttttttggtttaattaggcccattaatctgagaaataacctgagactataaaagaaataaataaagaatcaaatacttctcctaacaggagaccaagttaaaataaggtgcctcagtcacagtagagccccaattcttaaaggacagtatcacttcacactgtagaactgaaattataataagccactgtgggaattaaacatcctataaggcaatttcataaatattataaccagattattctggttaaagcctccatcactcataggatgatcatttagtttagagcaaaacaaatgcatatcagattataatttataacactgcttaaaatatgaagtcttatagctattttaagtttaaaacatgttttaataattacccttctgaacttctaggagctatcatatattactaaaacttttgctctgtttgaggttttagaaaattatagctaacttatgaaaaattaaaatattctttttatcaatgctcagtgatggaattttagggattgttctaaaaatatatttaatttgtaatagatatatttttatacatttctcaatcttctttatacatgcaaatatttttagtcttttataaggttcatcagcaattcctctaaagctttgtcaggaaggtgattcagaatatcccaggcactttatttcattacagtgttggaaaccaaatgatgaactaacacagaccctgtattcaaaagaataactttcctgaaatggcttatagagtagagataaatgataagcaaaacctattaaggtgtttccaagcatgtagtccataaaacgccacgttctaaaaatcattgttaataatcataatacacttatgatcattataaacttttttgtgataataaatttttgatcaatacactcctctgtgttctaattttgaagcttaaagtttagataatatttctgccttctaggttataacaatctgtattcattatttgttatcaaccaaaaaaatggttatcattcatcaaccatttttaatgaatgaaattagacagtaaaacacaaaaataattaacatgtctctg

SEQ ID NO: 1885366 - DNA, 4001 bp, Homo sapiens
ctgatgagaaagtttgaaatcagggcagaagggaggaagtaggagggggaggtgtgagtgtgctttggaatgctccctggggctataaaaggacatcctgtgggttgtcctgtctgggagctgtcctgtccaggctgggtctgggctatgggttcagggtgaaagccattagaatcaatgaaaggaggtgaatgtataaccaaaaaagcaaaatgaaccatcaggcccaatggtgagggtcatggagaaagaagaaatgggaaaaagagacccccagggggcacttctggacaaaggggccacagaaggggcaccacagagctatctggggtgcaaggaatggaactgtgagctgcgtctcactcacatttgagaaaaagtcacccttcatttctttccagccacccaccccaccaactattccccctttcccaagaagccattctaccattctatacattgtactatagtatcaacaaagttttttttattttttattaattttattttactattattattatgattattattattatttgcaatggaatctcaaactctgttacctaggctggagtgcagtggcgcaatctcggctcactgcaacctccacctcccaggttcaagcaattctcctgcctcagcctcccgggtagctgggattacaggcgtgcaccaccacccccggctttttctttttttttttttttttttttttttttttttttgagacacagttttactctattgcccaggctggagtgcaatagcaacatcttggctcactgcaacctctgtctcccaggttcaagcgattctcctgcctcagcatcccgagtagctgggatcacaggcgcacaccaccacacccagctaattgttgtatttttagtagagacagggtttcaccatgttggctaggctggtcttgaactcctgacctcaagtaatccacccgcctcagcctcccaaagtgctgggattacaggcgtgacccaccgtgcccagccaacaaagttattttccttaaaaaaaaaaaaaaaaaaaaaaaatctttcctccccagatagtctgtctcctgatccctcagcttctccctcccctcccgctgcctctgtctgcctccaggtctccacacgtggctcactgtggctcagcactttgccctctttcttcacctggaaacttctaccactgctttaaaactcaggaaagttggctgggcgcggtggctcacgcctgtaatcccagcactttgggaggccaaggcgggtggatcacgaggtcaggagatcgagaccatcctggacaacacggcgaaaccctgtctctactaaaaatacaaaaaattagccgggcatggtggtgggcgcctatagtcccagctactcgggaggctgaggcaggagaatggcgtgaacccgggaggcggagcttacagtgagccgagatcgtgccactgcactccagcctgggtgacagagcaagactctgtctcaaatacaaaaacaaacaaacaaaactcaggaaagtgttaaagccttctcttcaggaaaaccatccggtttccaaatctcattttgtagagttttcttccctaactcattctcagccttttccttaagagtaggtccccagaagtttcctaatgaattccttacttcctctgcaatgaaacctctaatgctgtcaccatagacacaagggctggccctgaggtcagcaaatcagaaactatgggatcacatccacagcgactcaaatcaccagggcctaaaagggcgtgtccttccatcgaacatgtctaggaaacacctgatcactgtctaggaaacaccatttactcctgacttctcccacactcaccttcctcacctacggtccatcaaagccttttgaagattttattcactccttatgtcgtctggtaacataggggttctaagacaggcaatgcttctggagctaacactgtctgtctcagaaccccagtgttaccagatgacatatggagtgaagatctgagaactgctttttttttttttttgagatggagtcttgttctgtcacccaggctggagtgcaatggcgcaatctcggctcactgcaacctctgccttccaggttcaagcgattctcctgcctcaacctccccagtagctgggattacagatgcccaccaccatgcccggcttttttttttttttttctccccagtagagatggggtttcaccatgttggctaggctggtcttgaactcctgacttcaaatgatccaagtgctgggattacaggagttagccaccacgctggccccttcttttttgaatgcctgattccacaggtctgttatataagtgcctttctcacttctgcctcaaataagctttttctaagcatctgtttctaatctgtttggttgtgtgatctctgctttggttcattcactcattagccttgagagatgagaccagcctggttaatctagaatcccagcctagtgcccttcaccgaagtggaagagagatcctcaatactgggccaatgaatcaaagtgtgtgtgtgtgtgtgtgtgtgtgtgtgtgtgtgtgtgtgtgtgtgtgtgtgtgtgtgtggaggtggtggtcggggagcagtatattcattatgaagtcagttgtgtccaaaataatcttcacaagccaggcaaaattacttctattccatatatgttttctgttcactgtctcatggttaaaaataaatgcaatctccagagaaaactatgccatcagtcaagttggccttccccattcccagcccctccatgcacttttcgtactttggtgtggcccctcccccaccccaccccttctgccctgcacttgctcagcagggacaggccctgtgcacggtaattcacactgggctatagctgggcttgtcactctgagtcaagcaggcatggacctggctatggtgttgatgcccatccagggagccgatgacggcaggaaggaagggctctactctcccacctcaccccagcctaaaggtgctcagaccctccctgcagatatcttctccttgtcctacctaagcaaaaagcaagactcctcatcctctgaactgaatcctttctctccctcttgcccaaaatccccagataaatatatattctaatttttagcaccttggcatttaaaaatttaattgagttagtcattaacagatacttggtagcttaacttcctttctctttagttctcaaatgatctcatgtctaggttatttctacttctggatactgatgcttgaacaaagtatgtcatactttctctctgttatcatacttgcatgcagactgttgctgtacatggaaaagtctgtttaattcaatcataaatccagccaagagttttgagttgagcatcctaagaacgctaagggaacatctcaggaacgctggcaagtcataaatgggtaaccacagttgatgcttgatagcaaaactggtaagcccagtaataaaatgccgtcttccagataaacaaatccaacaaaccgaaaggcctctagtgtataaatattaacctatgctctattctgaatttatctccattaacttcctgacttctgaaattcttgaggaatagtcaaaatatagactatttctttccttgtgataccttattactaaagtgattattccagaccttaaagttaaaagctgcttgcaaaactactttattagttagctctatttgagaaattactttaaaaaagtaacaacaaagaagtaacaagatttttaaccgccagagaaaaggtaaaaaactagagttgtcttgtcttagtatcctgacttataaggacttcctcttgcaattcatccaaaagcaataagcagtaaactaaaaaacacaaattccatccctgaggaaactgggagacatctgtagccccaaaccagaaaatgtaacaaaaatgtgccaagctgcagtgaaggtcagaaagaagg

SEQ ID NO: 1885367 - DNA, 4001 bp, Homo sapiens
caggagttcatgaccagcctggccaacaaggtgaaatcccttctctaataaaaataaaaaattagccaggcgtggtggtgtgtgcctgtaatcccaactactcgggaggctgaggcagaagaattgctggaacctgggaggcggaggttgtgatgagcctagatcgtgtcactgcactctggcctgggcaaaaagagcgaagctgtctcaataaataaataaaaatataaataaataaataaataatccacttggacatattctactgtcatgtattttaattaattccatatggtatgactgttttattagtgcttagaattaaaatatatattcactacttttttttttaatagcagacagcttattgaagggcaatagagagcagagagtttataaagacatactctgaacactgaggcagagcacactgctgaaagagagtgagccagcagcatactcactgctttattcatctgccattttcttcttgcatctcaggccttaaatttaaaatcatttctcttctgcctgacgtacaactttaggagtcttttaatgaaagtttgctggtagccaactgtttttgtttgacaaatgcatttagccctcatttctgaaagacattccaaatatatcagtaactgtggtaaatataaacaaactaaacacccaaataaaaataaaaaattttcagtgtctcatgtgtactggaaaaaaaaatgtattctgctgttattgggagcagtttctatacatgaccaacagattgttgtttttgcctttttctttctgagacagagtctcactctgtcacccaggctggtgtgcagtggggtgatcttggctcactgcacccttcacctcctgggttcaagcaattctcatgcctcagcctcccaagtagctgggactataggcatgtaccgccatgcccggctacattttatatttttagccgggcatggggcttcgccatgttggccaggctggtctcaaactcctggcctcaagtgatctgcccacctttgcctcccaaaatgctgggattacaggcatgagccaccacacctggccaagggattgttgattaactgtgaattagtatctttcatgaattgtaaaaaactctcacccattaactatttagaggctaggcacggtggctcacacctgtaatccagcactttgggagactgaggtgggtggatcatctgaggtcaggagttcaagaccagcctggccaacatggcgaaaccccgtctcgactaaaaatacaaaaattagccaggcatggccgggcgcagtggctcatgcctgtaatcccggcactttgggaggccgaggggggcggatcatgaggtcaggagattgagaccatcctggctaacacggtgaaaccctgtctctactaaaaatacaaaaaaattagccaggcgtggtggtgggcgcctgcagtcccagctactcgggaggctgaggcaggagaatggtgtgaacccaggaggcggagcttgcagtgagcccagattgcgccactgcactccagcctgggcaacagagtgagactccatctcagaaaaaaaaaaaaaaatgagcgaggcatgttggcacgtgcctgtaatcccagctactagggggtgctgaggcaagaggatcgcttgaacctgggaggcggaggttgcagtgagctgagatcatgccactgcactccagcctgggcaacagagcgaggctctgtctcaattaaaaaaatgaaaaaaaaaaaacaattatttagagttagcctctgacctattttctcttttctttcctattggcaatacgattgtacaaatgttactcttttactttcctttcctatttctttcctctttgcttctctctgctgcatatggatacttctttactgctgttaaactccactaaatttttctttttttttcttttcatcctctcaacccagcttttctcaactttgggaagaactgggacgagaaggccaacatttttaatgtttttcaaatctgcttggtcacttttaaagcatcctgctcaatattcattctatcttacacatattttatattctgactctgataagcccaatattcagaggctttatgagtctgattctgttctcgtttctgctggtacacattcatggttttgcttccttgtgtgttttgtcatttgaaggctgttgttatggtggattccttcacacggttcctgttgacctggaacactattagcttgggaccactgtcaactaaatcttgttttgagtttttttagaatccttgaaccttaaaaaaaatttaggccaggtgccatggctcacatctgtaatcctagagctttgggaggccaaggcaggcagatcacttgaggtcaggagttcaaaaccagcctggctaacatggtgaaaccccgtctctactgaaaatacaaaaaaattagctgggtgtggtggtgggcacctgtaataccagctacttgaggggctgaagcaggagaattgcttgaaccctggaggtggaggttgcagtgagccgagatcacgccgctacactccagcctgggtgacagagcaaggctctgctaaaaaagaataaaaaaaaaaaattttttttcttgagacagagttgctctatcactcaggctagaccatagtggtgtaatcagagctcactgaagccttaacctcctaggatcaggggatgctcccacctcaggcccctgaagagctgtgactacaggtgcatgctaccacgcccggctaattttttaattttttgtagagacagggtctccctatgttgcccacgctggtctcaaactcgttggtttaagtgatcttcctgcctcggcctctcaaagtgctgggattatatgcatgagccactgtgcccagccctcaatcctttgaattgtatgaaagttgagtcacgctgctcagcagcataatggaaaagaaataattctaactttggcatgaagacctaaagtactagaatggattagaataaaccctttatttctacaagattaatttctctatagtgacccagacttaggtgagggtagttaatttagtgtaaaatatatgtataaatgtaaacaaataaacgtatgtacatatatatctgtctataaatcatctcaactcttataacatagtactgtgatatcatccagtaattgtattgtatttcaaagaagtatggtcaccgagtgaaaagaaaaaggttaggagttgttgtcttaaatgtattactaattcccagatattcttttgaacctatgaatactgatgatttttctccatgcaagaatatttttcagttaccatcatatttttgaaaacaatgtaacatttataccagccaaatcaaatgtaataatcaacataacatatacaaactctagtaaaattattttatttagttgtaatatccatctctaattgtttgaaataaaaatttccatggtcttaattgaactgtatgttactttcttttagaatatcctttttttcattaaaataatttctaaaccactctatgtgttcaaccttctgtttaacactaagatatgggtttttggaaaggccacaagtcaccagctccatgaagtggcgaattggtccttgttttggaaagctctccaggtgtttctccagaaatatatgttcatgaaattctgaaccatcatcatcaaaacctaggaaatgagaccaaatacattacattataattttaaatacaaaacctacatcataaaaataatattaatgaggtaatataatattacagtttaaggcatgaactttggagttagacctaggttgcattttttttttttttttgagatggagtcttgctctgttgctcaggttgaagtggagtggcacgatctcagctcactgcaacctctgccttctgggtttcatgcgattctcctgcctcagcctcccgagtagctgggactacaggcat

SEQ ID NO: 1885368 - DNA, 4001 bp, Homo sapiens
tttgagtttctggttaccctttccaaaggaggcaatcagatattcatttatctcagtgagcagagggatgactttgaatagaatgggaggcaggtttgccctaagcagttctccgaagcttgactttttcctttagcttagtgattttggggccccaagattttcctttcacatgagttaataactgtccagtcttgtgaaatatcattttaatattaggatatctgaaatgtttccatatggctgggtgtggtggctcacgcctgtaatcccagcactttgggaggctgaggcctgaggaacacttgagcccaggagtttgacaccagcctgggcaacatagtgagactctatctttacaaaaaataaaattagccaggcgtggtggcgcatgtctgtggtcccagctacttgggaggctaagggaggaggataacttgggcccaggggcttgaggctgtagtgagccatgatcatgctactgcactccagcctgggggacagagatagaccctgtctcaaaatcaatcaacacacaatgacaacaaataaatgagatgtttctacagatcactttgtttttttagaaacactaaattaattaattaatttagttattgagacggagtcttgctctgttgcccaggctggagtgcagtggtaggatctcggctcactgcaacctccatctcccgggttcaagctattctcctgcctcagcctctcaagtagctgggactacaggcatacggcaccatgaccggctaatttttgtatttttagtagagaccaggtttcaccatgttggtcagtccggtctggaactcctgacctcaggtgatctgcccgcctcgacctcccaaagtgctgggattacaggcgtgagccaccgtgcctggcctaaaaacactaaatttagtaaggtactggggtgcagttttgtcactgacagttatggtgctgtagaaagagcccatatctggaagctgcctttagcctcagctctgcctcttgcttttgtaccttggaaaagtcacttcacctgttttctcatctatataggatgaagatcataatttcttttacacagtgttatgagactgaatgacagaaattaaaagaagtgttctacgaaggcaaagttaggtttcttatagcaggaagggagatgcacacagagaagtgggaatctcaggagacggatgtggccaggggctttttacgggggttgggctaagcattattagtcaacgggctgtactgctatttatggtaggttttgaataccgtttctccaaaataacctatttcctccccaaacccaaacttcctcaactgggatcgaactcaatcctacagcgtgttctgagattctatactcgcctcacttctcccaagatcgtaaattctggaggagccattccttcatcatccatgtttgcatccttcacaccgttcactggttaagtgcttagtacgtttgctattgggcaaggtcctcaaacgggaggtggacgtcagaatagtcaggttatcgactgagtaactgttagtggtggataatttaaagccaatttgaaagttcatcctttcccccaaaggcaaaaacaggcgttccttttcttaaaagagaattttaaatagaattgggtctctggtgtcctgcctaaagcccgcaaagaaagagggtacggttgggggtgggggtgatgggggatactgaacccttttctggttgcgccttgcccggagcccccggctagagccctggcgctcctggcgcgctcccaacgcgaatcggtgactccgcaggccgcgcagtgcggaggtgcccgtcccaccctcccccttgtggggtgcggggctccatttccccaagccgctggggtcggcttctggtcttgagatgcggatgaagtggtgtgaagggttgggcttttttttttgttcctaaaaatgcaacgaacaaaaaaaaaagtacaacaatccaaacccaaccatcttaattgcacggcagcttaactgggagactttcttcccgggcggccccacccgggaccgcgccgcttcagtcgagcccaccgtctgggcaaacggcgtccacttcccggagccgctgcccagcctctgcgggggggctttgggcgggcgcaggactctggaagggagaaaagcccgcagcccggccctccccgtcccaggcggcccgcgcgggtggacggcgggagcaggcggcggttggagacgccggaaggaacgcggtctcaccacccggctccctccgccaaggcgaggcgcggccggggaggcgggacacaggcgaagcgggacggggaggcggggccggaggtgcaggcggaggcgggcgacggggaagggagggggagggggaggggaaagggagggggagggggaggggaaagggagggggaggggggaagggacgggaggggagggggaagggacgggaggggagggggaagggacgggaggggaaggggaagcgggagagggaagggggcggagctagccggagccgcgagtccattttggggctgtgcttggcgcgtaccgtgcggtccctgtagttggaggacgggcggtcgcgcggcctttcccactagccggaggtcggagataagtacccgccgcccggctcctctcgggaaagcggggtggtcctcgaaccttcagcgagggtggggagttgcccaggtcagcagggatctgcgtgggttgggggggctggcgaaggccgtctgagctccagtccggcagcgcggcagaaaccagcggggcactgtcatgggcctggggaggagcggcctgcggagggcgccggggcagtgtgtctgtggtccagaaaacctgctccgtccggagccttcctggccccgctaccagcgtctccacatcccctagaaaagaaaagacgggtgtgggccttaggttacagcgcgccgccagcgtttggttgcatggcgccgggggagggcgccctaaccgagaagctgcttaatacaaagagctccaggctcctggcggttcaccaggtctaaacagccgggctttatttgtgggggcgattgaaaaaattgagggtcaagattggggtgctgtgcaaataaatgcgttaatactgttctttttcttctttctttgcagtagcctctagttcgttagtcaaaacgtgaaaaaaaagacctgctttgccctgggaaatagtaaccctgccaaatacatcagcttgtaggagacagaggtaaactacaataattttcctgtgttatcttttttttttaaacacccaatttcaataggccctagaaccttccaaaatggaactgtgtgtagaatacgtatgttcccatccactttcattggtggtctttgttctttgcatattttgttaaaacttagaaaaacagaattcacgtttagcaattatttatgtggtatttatcttaaatatagccaaacattcatattacaaaggaagaaaggggcttccacacttttttcctacttttttttcccttctcctatgcttagtgaattgtcaggctgctagggcttgtagaacagggcttgagttttctagagacctttatataataggcactttaaaagcagaatttcatttacataggcactccttctagtagaacttgatggagctgttaaccggctatacttccttcttgcacaatgggagcgtccctatccctccctaaaaatacgttttttttcctttctcccagctggcttactaaacctccctgggaagtcctttcctaaaaccgggctgttctgttcattctatacatttatgataggttatctggccttaattctgtcacagcttttgttcagatatgctcattttcatgacactgctttgtacctgataccttatgtaatatttgttttgccttgccttgaaatcacagttcaagtttagaaccttttcttgcttgatacactgatgctccaaaataaca

SEQ ID NO: 1885369 - DNA, 4001 bp, Homo sapiens
caatagattctttacttaggactttcagtagtattactccatttctccaggttttggtaataaccaaaaaaaatcctaaagatataccgaaacttggaaaggtgatgggtgatacaggtggttaggtggtgggctagcaagctgggacacagggaaggttaagggagtcatcacacgcatttagctaatttatggaagcgctcaccaagcatgttaaatgcagaacatccaccctgcacacagaagctagagatgtagattaacaactgagaagatacaagtgtttctgagcaggaagacacaaaaccatatctgaaaccaatagatacgatgtgttagcagctccagagaaatgaggtacattgtcacaaagattggtatgtaaagtccctagcaaggactttcactagatagtatatcatctgaggatgagaaccagtggtgtagatttttctcataatataatctcaggttttcctctgattgtgttaaacactcaaaatgctaagtcagtcagtattcattgaacacaactcgattaaattcttctgcttaaaagcctcttttaaaaaaagcagatttgctcgttttccaagtggtaagaaatagcaggtttgcaggtgagattaaagtgtattgggtagaattctgaggttttctgttttctgctttcccaccagcaagtctgactttaataacttacacattatttaatagaaggagcactaaacaattttactcatatttctccccataaccatttttgcctattgtactcattgcccgcatcacgagctcttagaatggttcctggcacagagtaggtgctcaaagatcttttgtttggggaatgcatgaatatacatagtatgaaaaaaaaagcagttcttcttttattgtgacaaacaatgatggtaacagttcaaatttgactattttagaataaataagtaaacacttgtctccttagcagctggccactctacctcttagagagagggctttcttctctttcttctcggtctcctgtctcccaccattttgcttctctattaccaatgagaacatgagtggcatggtcccaaagcctttctgttccccctatctccacttttcggtttttagaataacgatccccagcctttaagttttctataggattcgttagccagtggctattaagtgctgtcacggagcctaacagagagctgggaagggagcaaaccagcgggccggtggtgcactactcgagggccagcacctgcagctgcttctttgggaaccccctggtccccgcaaccgcctcagagacccgcgcagttcactgtcccaccaagcggcaggaggaggtgcttgtggcgggaaagttcaggccaggtccaatcaggcccctgggattaggtagcgagggtgggtgcggctccccggccccaacccgggctgccggccccgccccctgggtgggcttccccacggttctccgcccccccccccccacccgccccctcggcgctcttgccccgccccgctccggggccgcggctaaaacccggagccgccgcgacgcccaggggactggagggacgcactgagcatgtgcagatcagctcggtggtggctgccgcggccggaggcgagggcccggtgctgatgcgaaccgccggctcggcctcagcccgcgcgtggtcggccccccaggccggggcgacagggaaggagccgtagcctccccgtggcccgaggagccggcgcggcggcgcgcactccccggcggccgcggcgccctcggggcccacgatgatggcggagcaggtgaaatgcgcctcggcaggggtcagctctggagcgggctccgggccggtggtgaacgcggagctggaggtgaagaagctgcaggagctggtgcgcaagctggagaagcagaacgagcagctgcggagtcgagcggccagcgcggccgccgccccgcacctgctgctgctgccgccgccgccgcccgccgcgccgccccccgctggcctgcagcctttgggtcctcggagccccccggccgccacggccaccgccgcggcctcagggggcctggggctcgggctggcgctgggcgcggggggcggtggcggcagcggtagtggcagcggcggtggctccagccccgcgttcccgggcaccttctgcctgcctagccccgcgccctccctgctttgcagcctggcgcagccacccgaggcgcccttcgtctacttcaagccggcagcaggcttcttcggcgcgggcggtggcgggccggagccggggggcgcggggacgccgccaggggcagctgcagcgccgccctcgccgccccccacgctgctggacgaggtggaattgctggatctggagagcgtagccgcctggcgggacgaggacgactacacctggtactgcctggctccgctccttccccgagaccctggcctcgggggcttcgggcaccggggagcgggggcggggggcggacgggggtcccctcgcggcagccggggtgactccccgcggctcccggaggggccgacccagcaggtgttgagccaggcggtgacacttcccacgatgaggcttctcatgaaggcagaaacctgttttctaatcgctccgactgcggatgaaccggcccccccttccccccatctgccatgggttctgctatttgctgattgttgggtcccaagctcctcgttagcattaagtgcaaaatccatgtcatcttgtctttttgctcagtgctgctcttttccccagtgttttcggagggatgacgggggatggtaggggttggcctctgtctgcgactgttactgttctttcgttttaaacgaacgctggacaggatttgcgtgctcttcctcctcgggtggcatcggaagccgcgcagtgatggatctctctttatagagaggttcgttcttgctgtttgaattttgcagtcgtgtgcccttttgcgttgcattttcattgaaatcttattttcagagactgacttgctttttaaaatggggtgacctcactggctttcccataaatagtgccaataaagaggacttttcttggagtggaatgaacaggtgggagggacttttttatttatttatttatttttttacctaggaaccaacgaactgtctttaattttttaaattaaactgtagaagaaaagtgagattagagaagccttattttcttatttcttggaaactttttagcttggttatcagaaaacttgaggctgacagcatttattcagttgacatctggttagcactgtctactttccatgaatgagtaactttagggggaggcttgctgtagtccttctttactttaggtcctttttatgtaggaccctttctgtttttccaagctgtgttttcattactttctttgtgtctctgttgcatgattgcatggaagggattgggaaatggagatccttactggtttcctattgggaactgcagtgttccttttcccttacactctgtcatgtgagagctctaactgtaaagtacattagttaattggtttcattcaagaatcaaaatatatggagttacagtaagcctttcagaggtgtattcatcatccaccttaatactttttggcagctgtgcaggtagctcaaggtgtaaaaaaatcaaacaactcatcacttttgggaactttaagccattttttcaaagctgcacccttatttctgtaaagtaatctcagtttcagtctgaatgtggtactagaaaatgctctcatgatggtccttagatttcactaataactctcagcccttatgccactttcaaattattttaggttgatttagtccctacttagccttttctgatggtatgtatgtaaacagtggaaggaaacttgtttacatttttgatggggagatatatgggatcagttttatgcttaaaatatttgcattttaaaatttattgtgatattgtttgtaaata

SEQ ID NO: 1885370 - DNA, 4001 bp, Homo sapiens
ctttgtattttttttttttttttttgagacagagtctcgctgtatccttagtggcgtgatctcggctcatagcaacttccaccttctgagttcaaacaattctgcctcagcctcccaagtagctaggattacaggcgcctgacaccatgcctggctgatttttgtgtttttagtagacacaggatttcgccaggttgtccagggtggtctcgaactcctgacctcaagtgattcacctacctcggccttccaaagtgctgggattacagacatgagccaccatgcccggccagtcctttatattttctttgcacccacctcacatcctgttttttcttctgcagtggcatgggcctattttctttctttattcagatcaactttattgaggaataatttatgaatggtaataaactgcatccattcaaagtgttcaaattgataggcttggcatttttatatgcctgtgaaacaacaactataatcaagatacagaacatttttatcacatataaaagattgcctcatagctttctgattgaatatttaaaaatatttaatactgcctattgtttacatttgtttttgatccacatatcatttttaatagtaggaggtccatgattttgaaagttttgtttattccttaaaattttgcttaaagctaatttatttggatatagcactattggaattctaatagtatacattcataatatcaactctaatgtttttaagttattcataaagaaaagtgtttcttagagtatcctcactttccctttttcttatagaatgttgttataatgattcatttaattatttaatattttctgaaatgctttgactatggtaccttttagaaattattagaaaacatttaaaaatgtaatcagtcattttatatatgttaatatttattcctttgtggttttccttgcatatgtttaaataataaacatgcatttagatgcatatgtttattattaactcaaaaataatcatctttaacatttaagataaatggagattgaggttaatcttcattaatattattaaatattactttggaattcttaccatagtttataaatgaaaaaatcaggaaatatgcaaaaaaattagcaaattcttattatataacattgtgctaaattatcatatttcattgattaataaatggtgttgattgtaaggtgcaccctcaataacgactagcctaaaaagctagtaaaggttttttgatgttgattttgtgaagcattctttttttcagaaatattaaaatgtaaacatatctttgacttgaggggatactatattttaaaaattgcacaaggcaagactgtacaagggtggaaatggaactttagcatttaagaagtatgagcatttgaagaacttattggcagtctaataattctaaaagaatattttgggagctatcatgttgagctccattccttaaaagtcagtgaaatggctgggcgtggtggctcacacctgtaatctcagcattttgggaggctgaggcagaatgatcctttgtgaccagcctgggcaacatagcaagaccccatctctaccaaaaacttttaataagttagccaggcatggtggcacatgcctatagtcccagctattctagaggcttaggtgggaggattgcttgggcccaggaggtcaaggctgcagtgactcaagattgcaccaccatactccaggctgggtgacagagtgagaccctgcctctttaaaaaaaaaaaaaaaagataagggatatgcaaaattatctaggttcaaattgttttcttaaaaaatctatttcctgggaacatacactcaaaatagcttcatttgaggtggcaatcaggctctgttattgacagcatacctagaaagcaataagacagagaatttccctcacagtctgaaaactgagtttgtagaggattaggcctctaagaacccagaactggaggtgtctaggtctaaggcagctctagaaagaaaccgcagtagcagaagcttgactctttattgtggtattccaacatgaaaatgacccagtgtcttcaggtgtttgctctggtattttctctttaacagactgattcaccttctattttatgtgtttttctccactttactaatgacttaatttatgcatctttctggctcatttaatatttcttcaaggcacagaccttgtttctctacgtgcctcatgactacttctcttcttattgtttattgccttatttttgtaaatattccctagttcagatatttgagagagaatctcattgtcttttgtttaaagccacttcatgaatgttttctaatcttggataagatgcttttttaattgactttccacttttgatcaactctggcttagggaagggagaattgcttagaatgaaagttgattaggaacagccttgtgtcctttagatggggctagctctgatcctcaccaaaaacttatatggcaggtagtttgtatattacaactttcaaacttttacctccatcttatacatttctattgagctccacactagcatttcagtgacttagttaacaaccccatgtaaaggttgcatggtatctcagttcaacacgtccatacctgaagtcatgttcttcattcttaacttgtttttccagtgcttctgttgcactaaaaagcatcatgaactattaagttcctttgtcagtatctggatacctttttctttcttgtaagccttagcattatgtgtatattaagaactgagtgtgttcctccagtggatgagccttgaaacatctacgtatttcattttattgtgcttttgagttccatagagtgatctcatttgttttaagtctaaattgcagtaagtggtagtatttgttttctgaaatataataaaattggaatttacttatattagatatgtttataattttaggcagcaaaggaacagactcaagatttaatagtaaaaaccactaagcttcaatctgaaaggtaagtttttcttcatacaaccaccttttcaataatttggagattggagtcaaagaaaattatatataactccaaatcagaattaaagcagaataataaaaaacatggttcataaggtcctaaactattatattacccaatagtaacttaagcataaagacagtagtttaggagcaataaacttgacattgaggttgagagattattccttctttggaagagaggtgatgatgtatcgttattgtttgctgtggagttcagaaatgatgctttttaaaatgtaaatgttttcagatttttaatagttttattacttttttttcacaatcattgtcttttatttttaagctatgatatatcctctctggtataattaagagttaattgtataaattctccttgtagtttatacaataggtatactattggttgattgaatgaatgagtgagtgagtgaataaaggtgagtacagtctggatttgtgtaatgtgtggtgttcagtattgctaaaactcatagcaattatgctaaaactcattaactgcatctctcatgtgtggagtagtatagggggggagaagcattatattatgatgcagtatacttgtctcctgctcagtagttgggtacatcacttaaaccttttagtattctaggtatttcatcagtaatatggagatattaccactttaactgctgattttggggtaggtcagtatactatagtatagaccacaggttatcaaactatggccacaggccaaatccagctcaacacctgcttttgtaaatgcagctttattggaacacagctatggttgtgtttacatactgtctatggctgcttttaccctactgcagtagagtcgtgtggttacaacagagaccatatgtggcctacaaagcctaaaatatgtactatcaagatttttacagaaaaagtctgtgacttctgatccaactagtgtttttttgtagttc

SEQ ID NO: 1885371 - DNA, 4001 bp, Homo sapiens
catatgacccagcaatcccaatgctaggtatatacccaaaagaaaggaaggcagtgtattgaagagatatctgcactcccatgtttattgcagcagtattcacaatagcaaagatttgggagcaacctaaggggccatcggtagctaaatggatcaagaaattgtggtacatatacacaatgaagtactattcagtcataaaagagaatgagatcctgccatttgcaacaatatggatggaactggaggacattatgttaagtgaaataagtcaggcacagaaagacaaacttcaactgttctcactcacttgtgggagctgaaagttaaaacaattgaaatcatggggacagagactagaatattggttatcaggggctgggaagggtagtggggtagaggaaggaaactggggatggttaatgagtacaaaaatccagtgagatagaaagaagtaagttctagtatttgatagtacaacaggataactacagtcaacaataatttattatatatttaaaaataactacaagagtataactggaatgtttgaaacacaaagaaatgacaaatgcttgaggtcagagataccctatttaccttgatgtgattattacacattgtatacctatatcaaaacatttcatgtaccccataaatatatacactatgtacctattaaaatttttaaaataaatagtcttaaggtaacagttttcaaatttttttttactgcaacccacaggaagaagtgtatttatagtgagagcttgcacatgcatacatacaccatatatacatacatacaccacatatacatacatacaccacatatacatacaccacatatacacatacaccacatatacatacatacacatgtacatacatacaccacatatacatacatacaccacatatacatacatacaccacatatacatacatacaccacatataaaaaaccaaaagtttcataagacaaaatgtgtgatgggctcagaattgaatatttcctattatgttacagttcttttttttttttttttttttttgagacagagtcttgttctgtcgcccaggctggagtgcaatggcgcagtctggattcactgcaacctccgcctcctgggttcaagcgattctcctgcctcagcctcccgaaaagttgggattacaggcgccgccaccactcccagttaatttttgtatttttagtggagacggggtttcaccatgttggtcaggctggtctgcaactcctgacctcatgctccacctgcctcagcctcccaaagtgctgggattacaggcgtgagccactgcgccgggcctatggttcattttttaaaacgctcattgtgacctaataaattaacttcccagatgactcatgggtttggacccacaacataaaacaccactgccccaaacaatctgaaccgaggcgcacagaatagtaagtggtagctactgacattgagtctcacaacttcctccactggacattgaaattataattataaacagaaatataaaattgagacaatttcttgaaaatgtttcagaaatgcatatgccccttggtttcaggcttctacctgttttagctcttctttttctaactggttgaaaatgcaggtattggcagaaaacctgaggataattacagaccctagatgacaaagacagagatggcaaatcatgctgatgaaaagcctgaagatctgtaaatcagaaaaacaaaattcctggttattcagaatatacagacatcattccaatcaaaacttggcctttggcaccggagcagtgaggcaaactggctggtcatgagaacaggcattacttctggccactccagaggcaggtggaagcagagcgtccaagccttcaagccccttggtcttggtacagacctactgcctttctctccagaggacagtcaaaagattctgggttagggatgcctctggagactctaaggacactaagcagcttaaaagggcttctatgagcccatgagtaaagtcctcatgcaggcctcacccagcaagcagttgagctcagtgtattagaaatgagagcagcctgcgcaacatagtaagaccttggctctacaaaaaataaaaaattagccaggcgtggtggtgtatgcctgtagctgtagctagttgggaggctgaggtgggaggatggtttgagcctgggaggttaaggctgcagtgagccaagattgcactactgcactccagcctgagcaacaggaaaaaaaaggaaagaaaataaaagagcaacggaggaagggagggagggagggaagcaggcaggcaggaaggagaggctgggcatggtggctcatgcctgtaaccccagcacttgggaagaatgaggcagaaggatcacctgaacccaggagtttgagaccagcctggacaacatggggagacctcatctctacaaaaataaattaaaaaatgagccaggccaggtggcacacacctgaagtcttagctactcgggaagctgaggtgggaggattgcttgagcctgggagctgtgacctgcagtgagctgtgatcgtgccactgcactccagcctgggcaacagggcaagatcctgtctcaataataataataataataacaataatcataaaaaatagaaatgagccaatactctgattttcaccccaagatggattcaagcaacattcccaagaccaccgccagccctcctacaaccagctttggctgatggtgactgaatatgctcggtgcccagggtcaccctcactagaggcacgcctcagccagagcacagcactgaagagtcagcatgcacagggctgaggccaccgccccctgcaatgagaatgggctccccagccaaatctacccacagctggggtcataagatgagaatccttcccagcaatccctcagattcctctttccttgtgtctgagagcctggtaccctcacaagtgttcttccccagggtgtctgtcctccttgagacatgtcctatgggttttcatccccatatgtgttttctgcattgtcatattttaaatcccattcaagagactgcagaacattatttccaaatttaatttcatatggtttgaatgacatttccaaaaggaaaatgcaccaatctcagaaatgttttactccactgattcattcttaactttccatttctgtaccttctttccttcttgtgttggactattttttttttaaagatggagtctcgctctgtcacccaggctggagtgcagtggtgcgatctcagctcactgcaagctccacctcccgggttcacgccattctcctgcctcagcctcccaagtagctgggactacaggtgcacgctgccatgcctggctaattttttttttttttgtatttttagtagagatggggtttcaccgtgctagccaggatggtcttgatctcctgacctcatgatccgcccaccttggcttcccaaaagtgctgagattacaggtgcctgccaccgtgcccggctaattttctgtacttctagtagagacggggtttcactgtgttagccaggatggtcttgatctcctgacctcgtgatccacccacctcggcctcccaaagtgctgggattacaggcgtgagccactgcacctggccgtgttgtactatttttaagaaataaagtgatttttttggtataataaataatgggaagatgcacaatgtcaataccaaacttaaatagctttgattcatttgggttcccaccttcatccacttataattcattttaacctataggttataaatgattaattactcatattttaaaatcatcaaaaaacttatatcattgaggttgtatcaactacaaacaatgtatgactgtaggcttgcactggtgatctgagaaaaggctcccagcaggactgaaggcaagaatattcagagaacgctcaatagaaaactgttacatacttttcaaa

SEQ ID NO: 1885372 - DNA, 4001 bp, Homo sapiens
gcctgtcatcgtgtcctggtatcaggtgactgtaagaagaacctctcaggcagacagtgaatcgctgcattttattttggttctaaagctggcccttggtctccagaatagagcaagaagaagcaagcagcctctgactttcccagcttccaggctgcccaaggaacaactttcactgtcctgctcaactttgagagggagggaagaaggagggagaaaggaagggagggagggagagaggacgggcacacacacctccactagccgccaggcctcgctgatgattgcatattgcaggcggttcagaacgaagccggccacctccttctggactcgcatggggcactgtccaatcttcttcatcagggcgtgggttctgtccactgtcgtaggggccgtctccgggtgggggaccagctcaaccagcgggatgtagtatggcggattcaccttaggagagagagagaagtgggggagtcaaggagatgatcctgggtttggggaactgcacccaccctgaatggtcaggagcagcagatgcatctttggaatggtgcctttagattcagtggccaacaacaagatacttgagaaagaaatttattcacaaaggagagagaaaaagggaacctgatgcagaattgtgtggttttgtttaaaaaaaaatacccaaaatacaaagttggaatttggaggaacagcttgctatcctgtatgtttatggctaatcttcaagcccctggcctccccaggacagagtttctctgctcccatctgtcttgtcttcaaagcttcctcccagcccaccaccccccagaatcatgtcttcccatctgcagtcaccacaggctctgacattcttctgtgtcagtgttaaaaattattggcaagctgggtgcggtggctcacacctgtaatcccagaactttgggaggtcgaggtggagggatcacttgagcccaggagttcaagaccagcctaggcaacacagcgagaccctgtttctacaaaaaataaaaaaattagctaggtgtggtgttgtgtacctgtagtcccagctacttggaaggctgaagtgggagaatcatttaagcccaggaagtggaggctgcagtgagccatgattgtgccattgtactccagcctaggtgacagtgccagatcatctcaaaaataaattattagcagtgtcttcccaaaacctggtatttccttaattcctccatattgtaccttaagtgtctgcctcttccagtctaatgtcaccttcctgctctagaaatcaacaggcatcaacacacctcagcagccccagcaccccgacgagcccaacacaggaaggcattgtccaggtgagcatgccccaagggaggaccctggacttcactgttcaactctggtgttcttggtttactttgagaaactgttcttagagattcctcacagagagttatcaaatgtccaaagaaaacagtgcctggtagaacctgactggcctgagcactgagccaagtataccacagcaaacagaaatgatgcttttcaatgggttttcctccactacatgggtgataggtagaatgtcacatttgctaagtgatgcttccatgagcagaagcttccatttaaagatgactcccacagaagaggaaaggagaaataagggccatcctgggcacctgctctgccctctcaggaatcaagaaaagacggctcctgtttccaaatagacagatggtaaatcgatgcctcggttaaacacctgtcacctactgaattcttatagaaacgcttaacctctgaccttttgaaaaatgaagattagaagaactggaagtgtgtctttctcagatgaattttaccttattttatataaagcaggcatgctgggattggggtctttcaaacattgtaagcctcactggtagcaaaaacagactgagacaaggagttagaaagcatttctatgtacaactcaccagttccctcctctcagtcttctctgcgatttttcctgctcacactttcactgagtgatggtgacccccagtctgccacagtggcccatctgtgcccactccctggtgtcaccaccaccaagacttgaggacacagaatacacctgcatgtctcacacagatcccagcctcaccctggcccacatctgcaactgagtgctggacgccttcccttgggcacaccccagcacagacttgtctcatgtgggttatccccatggtccccaaccctggcaggctcctgatctcagtgagaatgtgtcacatccccacacccaagtcagtaccaggagaaatgttcctggcccctgcctctccctagcccctctcactttccattgagaggtgaggccagctggactccctgggtcaagtgtgaacttggggagcttttctgtcttacaaaaggattgtaaaatgcaccaatcaggaactttcctgtcttacaagaggattgtaaaatacaccaatcagcactctgtaaaacgcaccaatcagtgctctgtaaaacacatcaatcggggctctgtaaaacgcaccaatcagcactctgcaaaacgcaccaatcagcgctctgtaaaatgcaccaatcagcaggattctaaaagtagctaatcgggggaaggattgaaaaaagggaactctgataggacagaaatggaacaggggaggggccaattagggaaaaaaagctggtcactccccccacccacccctaccgcccacccacacccacacgcgcccccccacccacacccctacacccccacctgcagcgttaacccactccgctgtctttccctgctgtggaagctttgtccttttgctcttcacaataaaccttgctaccacttactctttgggtccgtgctatccttaagagctgttaacaatcaccaccaagtctgtggttcacgaagtcagcaagaccacaacccaccaagaccaactccggacacaccatcagttactgaagtcctgttacttctctttactcttctctcaaaaaaatcattgccactgccaccctcagctcagggcccccgtttccatatatattctgcactcccttcatgggactcctgctggggtctcagcccctctatctcatcctcccagagcaatccgtgttgtagcgggagcctatcaaatccacagcagcagcagaaagctaggttcaggtgccgcggctggggtggagctgtggaaagttagtgtttcatgggtaggaggttcagtcttataagaggagaaagttccatggattgttggtggtggtggctgcacaccagtgagaatgtccttaatgcctccaaactgcacacttacaaatagttaagacggtagattttgttatgtatattttaccacaattatacattttaaaagtaaaaaacaggactttgatcatgccttctccaacgaaaaatcttgaagggctgcccagcgcccactgtacaaggcacacggctgactaggacgcaggggccagcgactgggccccacgcagccccccaaaacagacttccattcacaccgacttccatccacacctccgtgtccacctacggaagccgccgcaaaaggaccttcgaggtctcccggctgggaaacagtctccctaaccacagccctcagcctctggcccaagaggtcaatcttgtcaataaggtcgggtgccccttgaatttaccacagtagaggggaggagaggaggcgagacaggagaggaggcagctcccccgccccaaaccttccatgtgggagtgtgcgaggtggactcggaaacacgcccccgaaagggttcgacagatacaacggcagcgcagcgcaggggcctgggcctgcgcaggccggcggagcacaagggacgcattcttccccgccgcccgggccccatgtgaccgcgccgacagcgcggctgcccacagagactcccttcacccccgctccgggagcaaccaaaacggcgaggcccacagg

SEQ ID NO: 1885373 - DNA, 4001 bp, Homo sapiens
tgttgttaacagtaaatttccaacctcaattaaaatatgatatgattgttgtgataaagttttctgttgagtttcacaggcctagtcaaccctaagccatgaaattacttgatttctcattttactcacattaaaatgctaccaaacttttgtttctatagtgtcatcggcgtgtaatttgggcttcacttgggacaaatgtattacatatgtagcttctctatctcatttgttcattaacttctcatcatacaactcggagccaaaaatatcataaacccaaaggcagccatggcactgaaataaccgatctgtattgtatctgataaagaatatgcttatataaggttattgtgaaattattatcaaaatagaaagataaaactaaaataaaaattttagtagagaacttgtggaacgtaaaaaagcaatactttcaaaaaccttctcgcatccatagtagcaagtttgagaaacactacatagtagacacggagaaaaactagttttcatacaagtacttttcaagaaactttttaatttcaccacagaacaatttaagtttatgaattagaaactcgaacccatattttccagaaaaaaaatggtaaaattatagttttgcacccagacctttacaacacaatttaatttatcttgtaatatagctgaaaactctattttcagtagacagtagaaattacttcagcaaagtctctattttattttcaatgtatgaatatcaattatgtaaattccttcatggtagtttctggaggtattgtaataagaataattaaacaaaagctcaagagtagtacttgacaggatctttttaaaattaatgttgaatgcaggtgcctgaggaaaagtaaatttaagtattgaagtggaagatacagaacttctgtcaaaatgctgaaaggacctggttacaaatggaggcttaaaatgtttatattactgattgttaattatgtctaatttacttagaaagttaagtctcatctgggcatggtgactcttattcataatcccaccattttaggaggctgaggcagaaggatcacttgagctcaggagttttagatcagcctgggcaaaatggtgaaaccctgtctttacaaacattaaaaaaagaaaaaaaatcagtcaggagtagtgatgtgtgcctgtagtcccagcaacatgggaggctgtgttgggaggatcacttgagcttaggaggccaaggctgggctgcagtgagccacgattgtgccactgcactgtagcctgggcaacagagtgagaccctgtcttcaaaactaaacaaaacaaagacaaagaaagaactattgttcctaaaactagcctgaagcttgtcgtctattattgagttcttattttaatcaaataaaattagtacatgccattttttcttagtaatctcctcacagcactaggaaaacttcactctttcagacatctcaaatatttctgacattttccttttctaaaacaaaacatgtttattacaaaacataccataacatagacagtcatatctataaaatgatggaattctgccattaatggatactattatatctatcttactattatgcctcaagccatgccaagatgaaacatttagtatcttttttttcttgatctcaaactcagggtgcttcaggtaaggggtaaatacttttctatgtgactgtaacctaaacttccacaagtcatcaaaactacgtaaaaacgaattcacatgtgtggtaataacattactacatcacattttttactggctcttgttttcagaagcttgcagagactctgtacttttgcaaatgtcctccctgttgttgttgttgttgtcattgttgttgttgtggttgtggtttttaactcaggagactttttgcatgtgctcacaaataagttcaagaaactactacctcagccattatgcgtttgatctacactttagcttctgggcagtactttctctcctgggctctgctattgcctctactggaaagcaccatattattaaggcaaaagtttagttttatgaaggtgtcactgcttcttccagacacaggcgccatttgcattagggatcatcttgtgtataagttattagggattgtcttgtgtataagttatcttatcactctggctgctcctgacaatgttgaattttaccagaaacctgtactcctggaaaacagcaaaggttaaaaaatccccccagtcttgtgtcttccaggaaatggttcactgcaaagaaccacacttcttcctacgacttatataagatttatgggtgccttccttatttacccatgacaaagctggacacagatcttctgaattcctattctttgagtcatataaaattagttgatgagcagtcaggcacccatctttggttgatgaacttagattcctatgtcttaatctcgatcaaaaagtgttctttagggaagaattttgagatatttggaaccgaattcaatgttttacaaacgtacctcttatgtttttatagcatctattgatatgctattctaagatgaggacaaacacaccaatataatttagtaaatagtagttgataaaagttctatatccacacagctattttaagtgagtcagttgcatcctaaaggaaagagaaaaaaatatttagagcaaaaagaaagacagatctttcttttttttttctgtcatagctatacgttctctggctgacatacactcataattcagtatgtacttattgaataaagtcaggaagttgttgtgtaatgtaatgatataatatgcttcagagaatgaaaacaaaccaattctatattacaaatctgaaaatggacaaccactggcaatagactttctatgtcataaaagtaaagaaaaatatagttgggtctattgtagattaatagagatttaagaaccaacacaaccaaatacaatgtgtgattcttgattgactccaggtgtgagcaaatcagctataaatacacttttagaatatctgaatatgctcaaatatagaatttgtgggtattttgtaatattatgtgatttgtctcaattattttagctgtaataatagcactgcagcaaaatttgagaatattaatttttggagatatatgcttgaagtatttagaatgaagtaccaatgtatctataatttactttaaaaagaacatatacctagtgatgcaaatatagaaaaatagaaacagcttttgcatatagacttgggtatagagtgtattacactctgtatttttccaaatgtgtaatagaatgtccatgcctatcgtaaaaaagatagaatagaaggaaaataaaatatttgaataaataagataaaaataataaagtatctatatacctaccacttgctcatttcaaaaaggaaagacacttaaaaagtttccttaacacacgtgaagcttctgagagtaagggagacaacaacgcctcctctagacaaaaatgtcagaaggagagctctgcaaatgcctccctagccaaagtaaggtgaatggtgtagttagccaaggagcaagatcggcatgttctcaagggctagcatcctattttccctgaaatctgtaccaaaatatctttagtcctttaaaaaataccaaaattagttttaataaaaaatccatgagttacttaatattattctattggtaaatatttttataaacttacaataatttcataataaaattttatggtatagatgtgtgcatgtgagtgtgcgtgtgtatgtgagtgtgtgtgtgtgtgtgtgtaagtgattgtttccttaggataatttcctactagtaaaattgctgcacaaaaggtctgaacatttttgcatttcttaattaaggttacaaaacaactttctagaaaatacagacatagtcataaatggaaattagcacagtggctaccaaatatgcaacttgcaatatgtaggcattacacaaagaaaa

SEQ ID NO: 1885374 - DNA, 4001 bp, Homo sapiens
ttttcaatttaaatttaaatttgcaggtatcaaattatggccataattgataatgacaattatatttacaatataaatgtcaaatatatttccctacatgatatacacttatgatgataccctctcaatagataattctaatatgaaaaaaaaatatttgcaaacatttggacaaatgtgactttcacatccaactccatcaaataatgtttaatattaatagacttaattctggggagatatatttgatcaatcatttaattttacaatggccaaatgtatctatgtaattaagtgcatgcatctgagtgctgtctgaaagcatgtatacacatatgaccatgtgttgcttagtatagactaaaacatagatacatttgttcatgtgggtaaaagttttggctcatatttgatcactcttatgtaattcacttatatattttctaagcaatagtcaacattcaatgcaaataaagaaacagattaataactgaggcttttccttatatctatgatgttttccctcttgtgtttttctgttctgaactgttcaagtcacagtattttctaaaatttcattctcttgcagagcatcttatagagacacctagtggcaaaaggtaatggtggcttccgggaccatccttaatgttgagttaatggcagaaagttttcatcatttacttatttgaaccacaagaggtaaactagattattagcataagtgtttctaacaaaactgtaacctaaactaattccaaacatatttaatacttcttagttgaataatatttcctttaattagaacaataaatatttaaaataaaaataatacaaaaccatgaattaaactttgctattgaatgaaattataaagatttagaacagtgataaaatataacagctttatttcagctattttgaaaaaatcaataatcgattaagacaatttaggacctttaagaacttctacaaagttaatcgatattgaaaattatgtttctgataggactcaatatttatattccaaaggcttctggctgtaattcctatataattttaaatttaaatatttcatttcattttgaaaatataaaagtaattttaaacttaaaataaattttctgaaatgtttatataatgttaaaagttaatgactgaataaaaaatacagaaataagccttttgtggatgacgtgtaagttatatttgttgatgcaatgtatctacagctagtggctatcattcctaggtcaaatgcttctaaatttaatgaaacgttcattacaagattttgtttttattgtctgaaattacatattacttctttccttcctctcccttgaatataacccatacttaaacaaaattgcttccaaataaagtttttatggtataaagtaaaaatatatatattcacacaacatacgcaggggaaagttcaaaaaagattgcagtacctcaggagactgcaatgttcatcacctgagatatatatacatctcagaacatagacatattatcagactctatatcaatattaaacatatgattaaccagattataacacagtattatcccaaatattactaagaataaaacaatatcaataataattaagacgtaattaattgcaaaataaagtgggtaaaatatatttacatggagaaactaactacatagttatcaaaggaacaggcacatgtgcactcagcctgcactgggtcacttactattatcaacttttctcttatacccgggatgaacggcaggtctaatattacaaatattgaaaacatgtcttatgaaagtaaagacccctttttggggatggaagtgtctggtttcatggaaagacccaagaatacttactgtagagatgactctagtggagtttagcagatgactcttcaagaaactcgctttctatcgatattgcatttacttaggggttttccagctttttagtacacaccagatgtattcacaaacattccctctgaaagtctttcacattcccttgtgttgcctagacacacctataaaacgtaattctattaaagagaaaagaaaagtagcgcccttgtttgcagctaggaggaaccactcccttttccaggatccttaacagtaagtacacgagacagcagcattctgaatggcaggaggaaggcaggcgatcagcacagggctggaatcatctgttcctgaccaccagcaagcctggcactgccggggttatttccactcctccctttcccaatccgagaattgcacagtcccacgctcgaattacacacatggtccaagacttctctctcttcctacgaatgtgacatccaagggggccccggttgcgccgccctagcccagggacgccttcgccctcggctgccatctatcggccaccgagcgcccgcttcgccccgggcccatcatgtctgctgcagcttggctcgcaccagaggcgcgacaataaacaagtgcactggactgggccctgcacccgctccggagcagctgtctcagagacccggtgttgcttaccgcgttgccacctcctcggcgcccgggaggaagacgcaactttctcggagttttttttagagccaccgggctgccaggacaagccacaggcatagaacgacgcggttgctgcccgccccccccttcccccagaaaccccaaaggatgtcggtgatagagagttccaactaatgacgattgtgcgccgcatctggggaagggatacagaaaaaaaccctgcaaacaccgtgaggatgaaactgccaaagggatgcaagagcctctcaaatactaattaggggccgcggcggcggcgggctcggcgcggagacagcgtcggcgggatcccagcgcggtggtcgccgctgcgctggggggcggaggacagcgcaggagctgcagccgccgccttcgctggagcagccgaggggccggtgccacctttgctcgccccctcactaccatgtacagtgtgcgctgcaagaagaaggcgggagatgcatgcacacccccgcgacccgctccctctggctcgtcccccggcgtgcgccactgaccaggggggaatgtggtgaagacggcgaggaggagagccgaggggggaggggagggccggccggcgcgaacccaggccggagggtgcgaggagccagaggaggctggagggggcggcggccacagctgggtcggagaaagttgccccctatgcagatggcaactgtgagtacccctgtgggggggagggtgcagcgaaggctgccagggaccccgcgatcgcgccttaacacgtattggagcgagtgtgcgagtgatcatgagtgtgagcgggtgcgagcgctcggcggggctgaccgtcacgttggcggggccggcggggccaggcagtcttctccgcgtccccctcctcccgctccgtgcctcccctcccagcagctccccctccccgccccgcccggctccggctcccggcccctaccgcgaggcgcctctccagccggacctccgccgccccctcccgccgcctccctatcccgccgctgcagaacgccccccgctctccaccccccaaccctgctgcccgctccgactaccgcggagagcaccggggagagccttttggggagccccggaacccgcggtcgccaccgcggcggcggccccaggctggaggcgtccgggcgcctctttcctccagcctctgggactgcgctgctcgcagtctcctcgccctgcctgggcttgagaaacctagtgcataccccaaagagggtttttgtgtatgtgtgtgtttttaaagggtggctatgatgactgggccttggagatgtgagactgggtaagtctatcgtttactttgcaaaagaggtgtgtgtgtgtgtgtgtgtgtgtgtgtgtgtgtgtgtgtgtgtgtgtgtgtgtctatgtggcggggtggttttccttccctctcctccctccccttcttcctccgtttt

SEQ ID NO: 1885375 - DNA, 4001 bp, Homo sapiens
tcattgtcacttaagcctgtttaattaaaagctgttcttgtaaagtttcgaaacagctggtcactgtccttggtttaacagctcatgcacatacagtactcaaagataattaaatcccccatcagcaatttcttcttttggctgaataagcccttttcaatgtttctttgaaaaaaatttctgtgcctttaaatatcttgcaacatcaccatagcacgttgagttttacagctgtaatatgggcacgtgattttcttatagtcatttataactacaaggaccattcctacccatccccatcgtgttcttccaccatattctatttactgcttaagcagcttggttctcccattgagcatttttgtcctcatcgagcttcattatgtttgctgtgatggttttctccactttgccaagaagctgcttctatttctaaggagcactgcagagcacttgcattcctggttaaatcttttgcctgttctatttcagtctatgttcttacttgataagcacctggaatgggctgaattgccacccccaaattcatatattgaagtcctatctccttgtacctgacattatttgaagattgggtctttaaagaggtaactagattaaatgaggtcattggggtgggccctaatccaatgactggtgtccttttgagaagaggaggttaggacacagacacacacacagaaggtaagactatataaagacaccatgagaagatggacatttacaagccaaggagagagaccacaaaagaaaccaaccctgctgacaccctgatttcagacctccagtctccagaactctgagaaaataagattttatttattaaaccacccagtccgtgatactttttttgtttgttttttgagacggagtctcgctctgtcgcccaggctggagtgcagtggtgcggtctaagctcactgcacctccgactccctgtcaagcgattcttctgcctcagcctcctgagtagctgggactacaggtatgtgccaccatgcccggctaattttttttgtatttttagtagagatggggtttcatcatgtaagccaggacagtcttgatctcctgaactggtgatctgcccaccacatctgtgatactttctatggcagccttatcaaactaatatagcaccctcaaatgtgtctcatatccctaactattattaattatgtaaagaaccccacagataccaacatcatgtacccctcatattgaaaagggtacattacttctatggtattgttgccaaaaatgcctaaactcaatctgtccatgagtaggcatcagataatcccaaattgtgaggtattctagaacacaactgatcagtactctcaaagtgtcaaggtcaagaaagcaagacaagtccaagaattgccacagattgtaggagtcaaaggaaacataaaaactaaatgcaatgtgggatcctggattcgatcctggaacagacaaaggatctttatggagctctggtgaaataatagcattgtaccaatgtagatttctcagttctaataaaggtcctataattatgcaagatgttaaatattagggaaagctgaataaaggatatacaaaaactctcagttctatctttgtaatgtttttgtaatgctaaatttatttcaaaattaaaataatatatcataatataaataatgtattataaaagtaatatgtactatgactaataatataaaaatcaaataacaaaataaatgaactaataaaacaccaccagtggagaaaaatcacatattttcatcattgtgaagtcttccctgaaataaactctatattaaaaaaggaggggagaaagaagctaaccttcattgagatctactgatactgagtatttgacaggtactatcttatttaatcctcacaatagcactatcacttataaaatgtgacatctgatgaaacagaagctcagacatatttcagtgattcatccgaggtcacataacaagtgatagactggaattcagacccagctccatttaattccaatgcaccatgtttgttctcctggttaagtatgaatttctatgtccccaccaactatactttcacctaagtatatccgttctaactatggatttcattcttagccaaatattggaatcacctgggaagctttaaaaattcctgaggctcaaatcctacccccaattctgctgtaattatttcaagatttgattggacctcagaatttttacattatccccagatatttcatatgtgtagagaacaactctactagtttatcaatgttaatgttatacagaacagaactaaaacccttgcaaaagataggcagtcatatttatcatttattcaggagtaagcatgtatcaccaaaatcaattaagttcaacttgtgcaacatactatttaaggaaacaagcaaaagaaattctttaaaagacacatggagaacagggaccaacttcagaagagctctcatcagctaactgcatagagcaccaggaacacagaagcagttgactccagagataaatctcaaaaccctttcaataaagagaagaaagtagcaatcattttactaaaaaaagtcaaatgacttactgtctcggattttaatttcctctagtccctttaaaatggcaaagggaaaccatcaagctatgtaagactctaattgaaaataaacattttcctacttttgagtggaattaaagctgggaaaaactgaattgcttcaaggtgaggaatgaaacagaaagaaacatcaagaaagctgcaatgagagtatttggaaaccattctgtttgctgaattgtcagccatgcaagcacttatagacaattacaaccttagaaaacaaataaaaagtgtgtaagtaggcactttgatgcttcctcctaattataggctttacgagctggattcaaaaaacacaaatagaggcagtgcgaacaatataaccctgaaatgaggttatgaagcttattagctttacataattacacagctgtgacaggttgacgagacccctgcctgaagcaggggtcttacagcaaggtggccattttttttttaattttaccctttttaaaaatacaatttaggttgaatcatggactaaccaatatttgacctacacaagtggctatttcctattttgtgtttccatatgaagatctccttcatctctctgggggttctcggggggcactgacttgtttttctctatcctttgaaacatccacagcaccaagcagacgtgtgtgaataacagagcatgctcagtaagggcttgtgcaataaatgaaagaaattcacctacctatagggaaaagctgtgtttcctaatatttaacctattgaaaagccctggaagccaccatttgtgatatgtatctccccccaaaaaatcattctggtaattggcctggacaccaaattgtacctgcaattcagctgacggtctggggttagtagagaatggttatttactgtcccgcctgaggtgtctgtgcagggctatgggaaggagtagggttaggggtctctcgctgtatttgcacacacatatacacatacacacacacacacagaaggtttacaatgaactattttgcatatctatgatttaaagatgcaaatattgatttttcatttttttacaaataagaaaggaaactcaggaaaacaagagcaatttataagaacgacatgaaactaatatttagttgactaaaatttttagtaatgaagcctgtgtatgaacttctttgttgcataaacattttatctttgaaaagccaaatatggacttggcagatattctcatatatgccaaagagagatttctttaggacatttaattcaaaaaaaaagagcagagctcttcaaggctttaggcagcaaactgcaggatataataataaaagctcacatgtatttattccttgctatgcttctgtgctagcactttaaac

SEQ ID NO: 1885376 - DNA, 4001 bp, Homo sapiens
taacaaggaaccaaatagaaactcgggaactgaaaaacacaatagctgaaattaaagcattcactggaaggattcagcagcagacttgagcaggcagaattagcaaaggtgaagagaaggcagttgaacttatccagtctgaggagcacaagtaagaaaagaacagaacctacgggacccatgggacaccatcagaaataccaatgcacgcatataggaatcccaacaagagagaaaaagggaaaacaaaacaaaacaaaaaaacaaacaaaaaaccctaaagaaataatggccgggaaatgaggaagcacatcaaaagccaaaatgggccaaatgccaggcctcttgcaccaaacagttggccaagttgtgaatgcaaaggaaaagttattgaaggaaattaaaagagcttctccattaaacacacacaaaaaagtgaaacagccttattgcggcggatagggagaaggtttgagtgatctggatacgagatcaaatgagatacaacgttcctgtaagccaaagcctaatccagagcaagaccctaactctcctcaattctatgaaggctgagagaggcgagggagctgcaaaagaaaaggtagaaactagcagagattggttcatgaggtataagggaagaagccatctccacaacataaaaagtgcaagatggaacagcaagtgctgatggagaagccatctagatgctctagcaaagataattaatgaagatggctacattaaacagaaaacgatcaatgcagacaaaacagccttatattggaatatgatgccatctagcactttcatagctgaagaggagtcaatgtcttgtttcaaacgataggctgacttgttaggggctaatgcagctggaggctttaaactaaagccaatgctcattcacattttgaagaaaatctgagagctaagtctactctgcctgtgctttaaaaacagaaaaagtttgggtgacagcacatctgtttacagtatggtttactattttaagcctacccgtgagacctactgttcagaaaaagattcctttcaaagtattactgctcattgacaatactgacaatgcacctggtcatccatgagctccgtgggtgatgtacaagatgaatgctgtttgcatgctgctaacacaacatcc[450 bp omitted]cacgataaaactttaatagatgaggagttgctctctatggatgagcacagaaaatagtttcttaaaatggaatctactcctggtgaagatactctgaacactgttgaaacaacaaaggatttagaagattccataaatttacttgataaagcagcatcagggtttgagaggattaaccccaattttgaaagacattctactgtaatatgctgtcaaacagcatcatatgctacagagaaatctttcatgaaagagtcaatcaatgcagcaaacttcactcttattttaagaagttaccggtcaccccagccttcagcaccatcatcatcagccatccccatggaggcaagaccctccatcagcaaaaagattacaacttgctaaaggcttagaggatcataagcatttttttttttaacaataaagtgttctcttttttttttttgagatggaggctcgctctgttgcccaggctggagtgcagcagtgggtgtgctctcagctcaccgcaacctctgcctcctgggttcaagcgattctcctgcctcagcctcccaagtagctgggattacaggcacccaccaccacgcccggctaatttttgtatttttaatagaaacagggttttgccatgttggccaggctggtctcgaactcctgaaagtatttttaaattaaggtatatacactgtttttttggatataatgctattacatacttaatagactacagtataaacataacttttatatgtactgggaaaccaatttgtgaaactagttttattgtgatatttgctttatcttgccagtttggaaccaaaactgcagtgtccccaaggcatgcctgtaggtaaacatgagtccatactgataaatgatcgaataaacaggagagaagaaacaaatcttcaagaagaataacatgcacagatactgctctctccaggggttggagctgaaacctcctcaacccacagagtatggaaagggaaaaacaggaacttgacagtggagaaatctggcagacaccactgtgaccaggtggccaaggtcagcactgcctgggataggtcgtgtggtggttacaaccacccagtaggatgtgatgagaaaggtgcttgagaaacacatcaaactccaattgagggacattctacagactacctggccagtactcctcaaaactgtcaaggtcatgagaaacaagggaagtctgagaaactgtcacaggcaagagaacgcaaaggagatgggatgactaaatgcagtatgtgcctggatgggactctgggacagaaagcagacattacggaaaaactggtgaaatccaaatcaaggctggattttagtgaatggacactaacaatgttggtttcttagtcatgacaaatgtaccatgggaagagaagaggttaccaatgggggaaactaggtgaggggcacacataagctctctgtactatctctgccatttttctgtaaatcaaaaattagtccaaaataaaagtttattggaaaagaaaaaaaaagacataacagatggtttaccttctttattccactatgtataactattttgtaggttcagagaatcagaacacatctgttgcaaaggtgtgcgatccagtctcttaaggcgggtctctgttcctaaatgtagagatgcagtttggagtcacgttaggaagtgggacattcttaagccatggagaggatgtgaaggaatactaacctacactgggacagtgggaccaggaccactgactggagtcacgtgctgtggtctgacatagatgtctctaacatcatgtcactttcattcatttcaatttcaaaggtttcttccaaggaaggtctggaatctggagttttccttgaggtttccaatggcgtaagccccgtttcttctgcagtctgtttttctacttcaaattccctgaaatcccacggaggtgaaataatgttttttagtgtcttcattgtatgcacatcaaagtcataacattttaatttgtctttaatgtctgctcctaaaaagaaatactataattagaataaaataagaaattccatcacttatcatttctattgttatataacaccatctcttatcatttaagtcagattatactatttagaataaaatacaaaactccatcatttatcatttccatcattatacaccatctctatcatttaagtcaaattatacttttaagagcacaagttgagagcagaaggaaaacaacattccaatcttctttttcatttgttttccaccatttgcaaaggaagtgtcagaagactttcagaagcacatgcagttgcagctccagtgtttcaacagttgcccatttccaaggcctcctaaatacgtatgaggcct

SEQ ID NO: 1885377 - DNA, 4001 bp, Homo sapiens
atagccacgggtttttccaggtttggtgctaatcacatatttaatctgggaaatgaaacaaaaccttaatgttaatcttgggtcaagtggggttcttggctccttccctgtgcacattaatgagagcactagtatgacaatcagagcctgagccaccatagatttaaattgaaacaagccctttaccaaacctgacctgtccccaacctcctgtggtcacctgaatgctaatatgcccctgccctctcttccttgtcttattgaacaatagtaacatacacgataatgtcagttctccaccaatttatgaaaacaagattctttcatcctaatgcttctaatccaatacagtgactcacagattgtttttaaactaagaacaaatcaaagctttagctttacaatttttatttctacagtgttcaataaatatttgttgattgactgaatgagtattttgccattaattagctctataaccttgggccagtttcatttaatttttctatgcctcattattctcatctatataattgagtttgattaagtcatatttttcaaattatttttatggtttaaacgctttcttcaaagcaaatcttaaggccaggtgtggtggctcacgcctgtaatcccagcactctgggaggctgaggcaggcacatcacttgaggccaggagttcgagatcagcctggctaacattgtgaaaacctgtctctattaaaaatacaaaaatcagctgggggtggtggcacacatctgtaatcccagctaatcgggagactgaggcaggagaatcacttgaacccaagaaggggaagttgtagtgagccaagatagcatcactgcactccagcctaggcaattgagcaagactctgtctcaaaaaaaaaggaaaagaaaaagaaaatcttaagcagaatctagcatttaaagcagaaaaaagtgaggctgctgtagatgaaataggttttggggccctaagactcctcttttcccacccccatttctgctcctgagctgctttgctgaacccacaggaccctctgaggtaccatttgtccaagcactggactgaatagaaatacaaatataaatagcattgactctcagacttgtaaaaacaaaacaaaacaaaaaacttatagtcaactggatgcagacagtcccaacctgcagcctcttaactcttaggaattaagattaaccacccagacaaattaatctggtttctttgctttggagggtattacatcaactcaatcaatgtcaatcaattttgtaatgctaagctgaattggaaattatatatatatatttttgataaattaacaatgaacatgactatattaataataaacaatgaacatgagaacatgaacaaactactaatgaatatattttagtagacacaatttctcaacatatgaaaatggggggaggaataaaggggatccttggggagtgaaaaggttcagaatcacaatgaattcctttttctttcttttcatgcaaataaaatgagccagagaaaagtgaaatggcttgcctaagccctcacagcttacttagtggcagattctgcattgggacctgggacttgtaatttccagcccagtgctctttcactgaccatgtcgtttctttataaggttagaactttacctttatgtttctggaatccctgatcaccatgctacagaatgataaaacatccacattatctcagcattcattatctgagtccctgaagtctgaagcagtataggagactaaaagtcatcataacctagaaacgtttatttatcaaatgactgcttataaaagccactcagtcatatccactaaacattagctttgcttccttccttctaggagcaacttttttgttaggtaggtatctagctgatgattggatttttatacagagtggcaatacaatacaactacagtgcaaatcaaacacactatatttgtactgtattgctaatatgcataaagcaaatctcgcaaatggtataggattttatgggattaataagaggaagctgaatgcttagtccacagtgaaagagggagaaaaatatagctgatattgttatcgagtaaaaggggctcactgtccaatgcactagaagcccatactatgacaccatgttcttgagaaaagaaaagctttgtactgaaagtcaatcccaaggagacagaagtcaagctcaaatctgtctccctgtgctgccttcaaaacagtatttttattagaaaagtttcagggggtggattctgagattagcaggtgattggtggaaggaaagcagaagtctggaaagtccttgggcatgctcagttatctcttcatgctatctcatgtatcacatgtgcaaattcagggggagttggtatgaaacatagggtggaaattcaggctgcgttgtcagcaagctccttctgcaccgactccagttggtcatattggttccaaaggatttcagccatttcttttatctgataagcagagggcatttcagcctttcagtaggtgtttttttttttttaatctgtcattctgcaaactcaagaatttgttagtcattggtttctttaactcttttgggcatagtttcagtattgaagagttagacaagggccaaattagggagggccttatgggtttcattaatggttttcatcctgattgtcttttaagcaggagaactgtcatcagattcacctctaaaattttcattttgaaattggcaaatacactaaaatatataatctagcaatcgtatttctgtgattctatgtcatagaggcatatccacttgtagaaacaacacatgtatcaggttatttattgttgtattatttgtaagagcaaaaaatggatctgactcccatattcaacaaaaggggcctggttaaataaacaatggtatgacatgcagctgtcaaaacaaataaggaagctctctatgtagtgatacatatggaaagagctttaggacatatggcaagggaaagaaagcaagatgtagaacagtgtatatggtaggctatcttttgtgcagtaaggtgggagaaaatatatttgaatatgcttgtatttgccttaaaaaccctaggaggattttaaaaatatatgggtggaagggatatcatcggagggttggggtgagaagtgcaggagtgaacgcaagacttctctgaacatctctttttatagtgtgttaaattttgaaccttgtcaatgtagtacttaatacaaacaaatccatttaaaaatcactctggcagctctatggagagtggattgtagggaaatagagtagaagctggagccgatttaggaagccactaaagtagttcaggcaatggctgaaggtggttggcacttacttggaggtagcggtggagctggtgagaaatggtgagctcaagcttgtggagccaactggacttgctggtggatatagtgtatgagagaaaaaaagaaataaagaataattcctagatatttgtcttgagcaactggaggagaagagaagatagagtgaaggtgggaagaaaatgcaaggaaaacagaatcgagggttctgttttggacacatttttaatactggcatgcctgttaggtgtcgaagtgaacatatctacaactagagaaacatcaaggaggataatgacagcagagatgtttccaaaaataatgagttcaaaattaaaggattgagaggccctgggaaaagttcataaaatccttgaacgtttttgtcaaaatgtccatcttcactatcatgctgtacaaataaaatataaagtggagaatgtcatttgggctattttaaaatttcattggaaaaattacatccccaaattccaatccatttattcttagttctaacaggaagtatgtagatgtcattatagcttacattttgttacatatgaagtataataaatatgatttcacagtttgtattgcatttttcaagataa

SEQ ID NO: 1885378 - DNA, 4001 bp, Homo sapiens
gccagctggcagaggccactcttcccctaccagctgcctgcctgaggtgctggccagctgccggcagctgtgctatggaaagagagcccaccagtacccaagacagaccactgaatatcccttctgtaagcttccttgataactcccctttcttaacatctaaccctgcgagttgttatcctttgaacagacaactttcttcaaggattgaagtggatgtagctctctaaaaaaaggcttagtggatatcaactttattttcatgaccttgtttatatattctagtcacactacatatttttgtttgtgactgtcatgtgtggaaaggtgttccaggacctaaatatcataacaaaaataggcatctcagttgagtgactgcttcttttctcattgcttttcctggtaagtgagattgttcaagaaattcttctccctcttttttggcttcgggtttgtattcttgttcctatcagtagtgaccataagttgtcacctaatggaattagttcagtgacccttacaaactaaattaacactctatctccagtttctactggatatgtgtctaaatcacagttgggcaccttgttagctgcctcagttaagagttcagtgaaagaataagccatcctcccctttcatccctaggggctgtctcttagtgtactagaggctcattagcagccttgtaacactgagattgcccacagtatacttattctaacaggttttcttactttgagacatggtaaatgtctattgcaaatcctgttgacatttaattttcaaattatcttctgtatttgtttgcaatttactcataatatatgcataattccaatctgttgaaatattgattctgatttacgatttagtaaattaaggaatggttgggttgcatattaaactttggaagtgactcacaatatattacatttatattaccctttagagttgcacaaagtccttccataaatactgtctatgagcataatggggaaaagaatcatgtttaatttatctttaaatccttagggatataacccaatgctagcacatgaaagacacataatacagggtttttagtgaacaaccaatcaaagaggatgatagatgtgatagtcttaaaatctacccacaaattagttgatacttcttgtatttgttttctattgatgctgtgataaatgaccaccaagtaaatggcttaaagcaacacaaatttaatatctcacatttcctgaatttagaagtccaaaatggatcaaaaatcaaataagggctccagccttccagaggcttgagttgagaatctgtttccttgccttttccagcttctagaggctgccttgcctgggcttggcctcactctgacctcagcttttgtcatctcatctccttctctgactctgactctcctgctctctcttattagaaccttttgtgattacattaagcctgcctggattatccaggataatctctccatctcaagatccttaacttaatcatatctgcaaagtttcctttgccatgtaaagcatagcatagatctctgagattagaaagtggcatcttttgtggggggtgggaggcattatttagcctaccacactcaagatgttagtctaactcccctcctcttgaatatggactgaccttagtgaattgtctaaggaatagagtacaatttagtgacactacaggacttttcaggttaggttatttgagtcaatacagtttctacctggctctttttgtcttgggttttgaaaccctaagctacaatataagaagtctggtttcattgaagttactatgtgttagagaggccagctggagatcacatatacacatggtgagatcacacagagagatgatcaagagacaagaggtgttctagcccccagatgtttgagtcttctcattctagacactagatatgtgactgattgagtgaggaagacaatcactcacatgcctagtgtctaggataagaagattcatccttaagatgactccagtcccagccaccaactgactacaaccatagaaaagactcgagaaagactgctgcccgaggcttggcagaaaaaaatgtgtgaatgaaatcaattaaaggtattgttttaagctactgttttagggtaatttactatggagcaagagataatcagaaaaaatataaaatatttttccaactttaaagataagaaaacagaagtttaaagatgtcagcatatagaaacattcatgaagcaaacccaaattagagaagaattagagtaacatcgaaagtactgaacaggatcctggccagatctctgaagtccaggttctaacgtttgcttgtgtgactttaagtatgagtcttaatatctctgtgtctcaatctccttatctgccttatctgtagaatgataataataatagtacctacttcataggtatattctgactattaaatggtataatgtagataaacataaaagagtacctgaaattattaatgccaccaaattataagctattttttagtgtttcattatcaatttagtgcctttctcaggcttaccagtttccttccaaatagcactaaactcaactcatgaatgttcaagaatattttatgaagatgtcccagttgtctgggttctacctctattgtcccattcagaaatttgaaggggggtgggaaacttcccaaatgaatggcatctctgtctggaagcaactctaattcgaatatttattgggcataatttggagattcaaaagcttattactaatgtcctacactttttctaaaccaatagagagactatttcttatggaaaaccctcttgtcagcgaaccaattctcaattaccattgaactttctcccaccatctgcatatcttcaaatatctgttaactccttccatttgtcttcttaccttctacagttaagttatttatctatgatcaagaaaaagcatgtaaccaggttgctggcagtaaaggatctatggaatcctatttccccactgccctaaacatttatcagcaaacctcttacatatccccagttggttttacctcctatcacacttagctcttatttcaataattgtagtttcttaaaatccccaactgctccagcacttttcttttcgtctaataaatggtaccaacatctaagtcacagaaaaatataaaatccatgtactcttacatggtcttttttttcctcactgagaaactctcgtgtgtcacgtcaggcagtcattgttggcagacacattcaatatttaatcccagccaatatcttctcaggcagtcgtgacaaactcatgtctctctagggattttaactacatttaagagaagtttaattttctccttgtggtttaacccatcgttagaactcctccaaaaagggccgcagttacagaaagaaaaaaataggcatcagtccaagatttcttcatttttgtttttcttttgcttttcttctgagtttgcaatctcattacctctgcacccatcaacacacactcttcacagtcacagctccactttgtttggagctcaagactctgacctgtttcaaagcaataacctatttgtgcacagaatgaaaatcatattagtgaggttgggtgtttttcttcttaggtacttctttctgtgttccagagtctgataaatcatttcttctgacactaaactctttagtgagaattttttaaataaccagttgaccctggattttctcgtgtactctctaacttgaaccacacattctactatcaagacaaatccaagttggtagccaacacatcttcctgagaatttgagctagttaagttaagaacaaatgaatgttttcttgattcttggtattagtaagaatggaaacctgaagttgataaagtttttgattgagaaaagtagtgtaatgaggttttgcttttaccctatttctcctaagtgaagaacgacaaggcattgacag

SEQ ID NO: 1885379 - DNA, 4001 bp, Homo sapiens
aactgcatagaaatgacactggaatgtgaatgccaatgcccaaagtaaggtggctctggccagccatgctaacttgtcttgaagtctatttgcacagaagatacagctggaacatgtgctttcctccacttcatctcacctggggtcaagacccggttggccagctgactggccactgacatcccccttgactccatagggagctgcagttgaggtactttccaaatgaatcctgacttacacaggtactctcctcctcctggtagatgctgtcctaactgctaattacccctaaaagataactgattcctttcctattgtttctcccctaaactgcaaaagatgattgcaatgataaaaaaaaaaactgcttttattaaatgaacttttggaagaggaacatatataaataaattagtagtagtccataaaaacctgtccttcatgttcaacctaatgggcatcctagggcaactatttgccagatcatcgatctgttgagaaaggaataaaagcgaagtctcctctttcgtaaaaaaaaaatgcacaaaattttctataagtttcaggtggcttggagatactctgaagcattaagttaaacacagtttaaaaactgccttaaagtgatcatcattttaattatttccaaacccatgatctctcaaagccatttaattgctgtaaaaggcactttcaggaggaaaacaatctcaaattaccttccaccatcctccaccactcaagaagaagaaagatatacatcgtcagtcccccacaactttccaacatcaaaatttcaagcattttatttggccagatgcatgtagatcatttacagtttaatggaaatattgacatatgtctaccaaaatactctagatctattggagaaattttgccgatgttggtgtactctgacttgctaccatggccagcaaatagaggtgtctactcatcctcattcttatacaaggacagaacagcaatagtggcaaaaacatgtgtctataacctcactgacgttccccatccatgtctgttaagctgacctcagagtctgagagtgtcaattgaattttactcatctaataattttgatattcaatttgtgtagttaaaatatacattatagggtgaagtttcaagagttgtctcagacacttcccatcaagcatctatgtgcacacagaggtagactaagtatgtcacatcagctaaatatacatcctttagggatgactggaaaggaaactgctatgcagatggaaaaaaaaaaagctgtaaccatagatataaatatatgtaaatacacacagaagtttcaattttcacaggatgcctgaaacaggaatgcttgatctctttcacgaatattaggtttttagaatttcataaatggtgaggagaaaatataaaatggcacagaaggctgtggtagaagaactcaggtaacatataaagaaaccatcaggacaactcattgtctgattttgattactgtggagcaactgtgatctctatcatgaaaattccttaacaagctagaaaaaaaattaaaagaccatgcagtggcagaataatggaaatgcagaacatgttacattgtacatagggatctttgaaaaggaaaaagcacaaattgtatgtatctggttcataatcatatttgatccctgatacagtttagagatgtgtaattatctacatctctttcccattcattctggttgtaagttttaagttcagcaaatcaactgtgtgattaaagcaactgaattcagcctgaaaatctttgctctgccatctataggatagtctgtctggtagctacttggaggcactacagcattaagcatgtcattcatgcagaagggcccggggtctgacaagcctgtgaggaatggctagaagagctgaacaagcattctcacaaaaccaatcacttggtaattgctgagttgttatcacagcaattaccaagtgattgatcttgtgagggttagagaagtggtaaatccttggcatgttcttaaggacttttgtcaatgtcaagatctattctaactcccacttcttgcacaagaaaaaagagatgccttttgttcttgcctgggcaggaaacactgactctccagttacccaaccccctaactcctttttcctaagcctctctctagtcaattcctacggggctgatttctggaaagataattccactaaaattattaacatgaaaaccatatatcaatatcatagaattataaacacagatagattgtagttaactgcacctacaaataaacattattaatattaaagcttgtgcataatgatgtgggaaaattaatgcttattgtcagaaaatatttttgagtttattaatataaagaacactaagagaaaagctctcacatgttattactattttaaagaaacatgaattaaatggggaaccacaaaaaacaggagtatgatgttgcgtcaaataggaaaagtgagtatagctacccagggttaaatctggggtcttagtcataaatctttatttgacaatttaatgcaccgttctgttaaactaccattttgctttcattgttcctacctcaaatgacacaattaacaaattgtgagtgctgacggtgatatccaataaaaggtggaatatattaaaaaggtttattgaaattactttatcacatcttcagaaaattgttgaaaagtacaggtggatagatgaaaagccctaacatcttttctaccattagcaagggatgattttaaaaatgtaaataaatgcatttgctatatttgaagcataatttctacattgataatttagtttagaataaatgttgctattccaataatgaatgtctcttcatgggtactgctgtcataattacttaagaaaaaaatattaattggtcaccaaaccatctcagcagatggatctattggggaggtgtcaggttagtgttacattttagcacaaaattgttgtgtgttattttatagtattcaaataatcaaaatcatacaactctggacaggaattggcgaagtatactccaaatggaaaattcacacataaaactgaataaatagtatattttttctgggttgtagcctagataagagaacaaaatatttaaatgagaaaatttagaagtataatacatatggacagcaggaaatgtcatccaaaaaggtcatttttgctttatataaaaaattaaccattttatccccttcctaccatcccacacatacacatacatacatcttggcagcttcgaaattttggtttaagaataataagaataataatgcaaacctaaaagattctaattgtaatcatttctgctcttgagggagatttagctatacctttaaaaaaaaattactggcctgttcaggacaaaataaggattgaaatgttttaaaggattaagaaaatgtggcacatatacaccatggaatactatgcagccataaaaaatgatgagttcacgtcctttgcagggacatggatgaagctggaaaccatcattctcagcaaactatcgcaaggacaaaaaaccaaacaccgcatattctcactcataggtgggaattgaacaacgagaacacatggacacaggaaggggaacatcacacaccggggcctgttgtggggtggtgggaagggggagggatagcattaggagatatacctaatgctaaatgacgagttaatgggtgcagcacaccaacatggcacatgtatacatatgtaacaaacctgcatgttgtgcacatgtaccctaaaacttaaagtataataaaaaaaatcatctttacaaatagtttttctcaacattaaaaaggaaatttaaacccacttttcatgccttctatttagaagcaaaaaatacatttttatgagaaaagagtatgggcccttttagttggtatggtgccagttcctttagaaggagactttctaagcccggtttatt

SEQ ID NO: 1885380 - DNA, 4001 bp, Homo sapiens
tgcccctgcctggctgtgagtgtggcctattttcttgaacttctctaagcctcagtttctttacttgtaaaatgaggatgttaatggtaccatgaatagttagtgaaaggtctagtaacaggaatcttgggaaagtgacttaaattctctgagcctcactttctttatcatctgcaaaataaggtaaaaaatacccctgttacatgcattgttgtaaggatgaatgaaataatgtatgcaatcacttagcatatacctggttcacagtaaatcatcagtaaatgctagctgctgttgtggcgaccgttggaatgcaattacatttttaaagatacatgttggattgaaattgtttgcatcattgaatggttcaatacatggagcaggtgtctcactagaggaacaagaaagccatgcaaactcaccaggtagtaccacgttggaaatcagattgcttttatttatttatttgatagttaatgatagggagaggggtgatagaacaaatgggtattatcttttcttctttcctataattaattaaaatgaaattatggacctgtacaatttcaatagatatggatggataggataatattattaataatagtttttccaacttaagaccagttttttcaactcactggtgccctaacgtttctgattttgctatcaatcgtgaagaggagtttttaaattatatggttaaagagagaatgacttttgctgaagcatcttattttaaacaaagtaatattgagcttattgataaaataaaggtcagcccaagagtgtgtgggaataaggtacattttgaaagaaaagagaatgaggctttaaaaaaagttgttttctttctttttgttacagctaaaaatttccaatcaccattcacttcaaatataccaccttgattttactttttttactttgctttaggtaatttttatatgaatattctcaataaataattttcgtgtaagcatttattattttgagcattacagtttggaccccaaaatggagtactgtgaattttttgagagatgctagaagaacagaagaaacagtaaacttttaaggcaagacatctttctcctcccactctagcagcaaggagaagaggacatttgctctttaagagccttttaaaagtcacgtggaaaggcaagcactccaaggattttttgattccttttggctttggccaagaaaatgaaattattgagaacagccagactttcataagatattgctgttggagggactttttggtgggttaaatattataaaatcattgttttctggtcaatacagagcagggagaaaataaaaataattgttggataggagcattttggtgggttttgcacagacttgcatcttgtgtcagaatgtgacatcaaaggctcagtttgatggggtcacttttctaacgtgaccagatgatgtgttaaggcaaaagcaaagtattttctccccctcaggtttttggaaatagaccaaacacatagttctcaaaaccaccttcctttaaccccaacctttgataaagtgcaggtcaactagcttgccctaatcacttctaaactcatcagtggagtatctttccatgtttaagtctccttctggctgcttctctgaattctcattacggagcaagtgtaggaagacccaggaatgccggaatcatccagtcactgcatgggttcacttcatccatatcttctttttttcagaatactctttattcctgtcttatttcaaatcctggtgtcatcagggtgatgaagggcacttcttagacactcgacaacatggtggaggtgaagatctgttgtaaaatctgagggatatccttggtatccatggcaacgaaagaccgaccagctggtaaagttctctgaagcctgccaggatggaaagggaaaggaagttaccactgtaaatggggctcccttccacctcctgccctggcaaaccacagccccctaatggtttcttaggaaaggaagtttttactttctaataccttgctctctgcctaccattgaattagtcgtcattaaacaatgaaaggcttggaagagcaacaaggaaagacacagcaaaagcagggaactgaaagaaaggtcttttcagtgagaaagtcagtgaatttgaaaagaaaaaattttcttcctttctttactgccatttcttggtatttcatattcttttggtataacagagccatagggattcatatggaatcagctcacctcccgggtctagcaaatatgttgaccttacactgtatttcgaagtgcttttccttccttagaaaacaggcctctaaaaacgctgcgcagccaaaccctgagtggttctttctctctttctttgcctctctctcttttttttggtccacatcacacaatgtgaaatgcgatctggattgtccaattactgcttcaatgacactgaggttatacaggcttatgaaattttttccaactcatttttaagtgaattttaaaaaacttataatgggttttgatttgaattatccttaaaaataacatgtcattgaagttacgatacttttttaaatactaatttataatttggaacaaaaggccattttgaaggcaacaaaactgtaagacacagttctcttcaaaagaacgcctcctttcactgtgccagtgaagtctggctttggaatgacatttaataaaattcaaccatcctgtgtagtatcgtatatttggcatgcctggtaagccagctaattctgcaacatatcttttgccagtggatgttggaccatttccctaggaaaccacaagggtattattgtgctttcttaagtattcaaacaggatctgttcactagaaagacaaaatagccatttcatctcaactagtatttgttgagcttgttgtctgcctaatactgggctgatgctgaggaaaacctgggtggaaaaggcatagtttgtgtttgaggatgtggaggttctaaaagatgcaaagtgctaacttgtaaaaactaagaagaatgaaaagtcatgtcataaaatgactgtaactacatgatattaagtctgttctcaacctcgctctgcaaccttacagcaaggcaaagggaatagaaagagaaaaagctgctagcattttggatattaaaacatttccagtcacagagtatgaaaagtaaaaggggtggaataacaaaaacgtaggccctttgtgctttaggcagggatttttttttttttttttaagattactttcactggtgttttatgtttcttacaggtattttaaacacagaaaaaccatgagctctttctgtttgtaattcaaaaagataaatgttattgtgttcaagttatgaaagtgtttccagatctctcctttcagatcatacccactggtatttattgtctgatcataagattctctattgaatatttagtatattcagtgtagtatctaactatatgtatattatcttatgttgtcgccaagtgtttcacctgccttgtctctccagcaataagaagggatacatgtgagtgtgtctatatatatatacaggcatgcatatatgtaggtgatgtctctatggggatataatacatatgtgtgtatatatatgtctaatatgtacagacattcatacacacacactatctcctatgctaggaaaatagtagatgttcacgatttttaatatgatttgaacacaaaatgattagcctgagcttaggagcttgacataaagtgccaaatgtataaaatactacccggtttattagtgacaaatcaatttgtcaatgatttattagtggcttaaatataaactaaaaaataattaatttaaaattattattgttcatctaaacaaaagctagaacatatcccctcaactagattataaaccccttgaggctagtaactttagtttctgtttttcctccatctgcctcactgtccctcatggtgctaagcct

SEQ ID NO: 1885381 - DNA, 4001 bp, Homo sapiens
tgacttaaaacaatacctattcattttttcagtttccataggttaggattccaagtacatgctcatgtccaagaggctgcctgcacttccctgccatgaagccctttctgtagaaattttcacaacctctctgttttgttctttaaggtcagcaagagaagagctatacaacaatttattaaaatgaagtcttataagtgtattgtaatctaatcactgcagagataccccagcacgttttgtcatattccattaaatgcaagttccagttttgcccacattcaagggtatggtattatacaataggtgacttcctgggggttacactagagtgtgtccacccacagctcagattgactcacatatgtttatatttgaaaggttgcaatactaaggttgtttctggtatcatagaatacttaatagcatttactcagtatgactctttcaatatcccttgagtaagttactagtgagtactataaatctccaaaccacataacgtaaaggagtgctcagaatagtaaattacacatagtaaatatgtaataaatgtaatgtgtcaacattattattatttgtatgattactgatatatgcattgggtttgaagatcagtgtgataagccatacttgagtttcaatgggacctgcaatagatgcactacaacagaacaaataatatgattggagtgacagaaaaattaacaaccaaagatagatcaaaatctgagcttcctgatgaactagaaacattgtgaatgcttaggtttcttgtaattctgtagactctcaaacagtgcttgtttgtttaattagttaatgcagacttggtaggtggactggaaatgtagtgacaatgagtaaaagatgggtttttagagaaacatgtaggcggcattgggtatgtctttgggatatgtctatagtaggtgaaattttgcatcttttctacagacactagcggaaccaggagagaagataatttccctattatagctgatgtcagcttactattataagtagaaaggcatgactcaaagatagactagtagaagaggggtatctcattaattatgtccccaatagctataatcactcctacttaaaattttttatcctaacattactttttttctaagaagaaatgttgataggctgtgaaaataagacgatcacaagaaaaaaataactcaaaccatcaaatttactgtcttatttaatgtctagcaattcttgccattttcagggattctctcctactctgccttttacattgaagaatatttattctacgttgttagttcttggctactgagcttttagttttgaccatatttattcgtcgaatcattagttatcactggggtagtaagactggatattatataaacagtgaagagacatccctaacaaatatgcttgtagaactggggatagttaattatcagcaggttacaagtgagcttagtctttgaagaataaatgaagaaacaaaagtgaaaacattgaggaaagcattccagaaagatgaatacaaatgtgcaaaactttggaaacatgaaaatgcatgatgttttataaagagaattttagaagaagctttatgtctggaaggtaaatgagttttgaagatttggcagccatgtgaggctaaagggagaatctggggccaaaatattaacaacttgggggagctgaaagtttgcaaatatagaagtgacgaagatctacattttacagacatctcaggagatgaatttagggttggttttaaatgacaagagttcatttagaaagatggtacagtaatacaggtgaaaaaaataaaaatttaattaaaagaagcattcatcagtataagaaagagaaggctgatttggaagatatttgagggataatttttaacagaaattattgactaattagagtttggttcatatgatttagctctgtgtcaaaccatatcagccagactctaattagtcaccaaggtttaccaaatctcatgtcaaattgtaatccccagtcttagagaggggtgtccattgggaagtgactggatcatgagggtagagttctcaaaaatggttaggcaccactgcctcagtgccgttctctgatagtgagtcagttatcacaaagtctggttgttttaaaagtgtgtggcaccactcccctctctctcttccttctgcttcagccatgtgaagtgctgactccttgtttgccacccaccatggttgtaaatttcctaaggactccctagaaaccaagcagatgctgtcatacttcctacatacaaccttcacaaccataagccaattaaatctcttttttttaataaattacccagtctcaggcatttttttatagcaatgtgagaatgaactaatacactggctaaagaagcaacatttacctcaaactgcactgcccaataagatattcttgagcccgatgtggttatccacttttactttatattgattaataggtaaatttaattcctgagctggcatgaaggaatcctgagtctcagcaactcaggagattgaggcaagaatttgagacccccatctctaaaacaaaaaattatatctcagtagaaatagtcaattttaagtactcaatagcttcatgtggcttgtggctaccatattggaaagcacaaataaacaagattttcttccttattgaacgatctattggacagcagtaatatagagtcaattcctggtatcctttgtgtttatcagaagaaacttatgaaaaaatccaattgggaaataacataatgagataagtcataaatttattatgtttgcattaaatgtgggtatacaattgttttccaccactcttctgcttttaccaataatgcatcaagaatatctgtgttcttatagctttctattgagatgcaaaattgtaggcaaaattcctaagtgattatttattatctgcaagaacatgtaatatttaaaacaaataatgattgcaaagttctcctctaatttatattatctagttaaatgagaaatcttatttcccatgcaatagcttacaaaactatataatacaaaaaatagagattttccaatccaatctcagtgtaaaattgcatattttacttcatatgtatctgacaagtgattctaaatattattacatctttataagcaatttgtatagttttttaggtctgactttattatattttaagcttctttactccattggtattgatttgtatggcatttttatacatttagaatataaaattaatcacaaagttgtcttataagttaaaaatcccatttccccattatttatttcttcatttactttgtttatgatgtaagtgtagcccctttaaaatgttgttaaatatatcaatatttcctttatgatttgtggaatataactcttatttatgtataagatcactcttgccttctagtatcttgatagttcttatgttaaagtatgaatatttgatctcccatttatttttctataaatttattttaacctactaagtggtagaacattaaaaaattgtagctatatacaattgtatgaaaaaaagaaaagcactaagatttctttgttttgtttttgttgttgttaagtggcaaaaagtggctaaaaaatcccctagactttgtatgtttgcatgcaaaggataagcagtagaaatctaatgtttataataaaatattggaatgattccaaataaattaaagaaaaagtaagtaatatttttctcaatactatactcaggcattacaataagtcaaaaacagaataatttaagtttattttttttaaaaaaagcaaaatattcatgcttttaaatttgtggaagaccttataaaaataataacctaaaagaattaactgatacaatgttgacaattggattaatgtgattgaaacttatagagaaattaaaagataaacttggctttaagctgttggaaaaatacatagtttat

SEQ ID NO: 1885382 - DNA, 4001 bp, Homo sapiens
agacgcagtccctgattccattttccattcctagttctccattccgatccatgacagtttggaatcagtacacaattcaacaggttgtcttacatgtgcaatgtgagaaagctgccaaacaattatccacatttcttaggaaagggaggcgtgactgtcatggtcagtattttatattgctatacgctaagtattttaaaataagcatgtataacttctataatcagaaaaaagggtttaaaaacctttttgctttggtataattaaaaaataccttcatgggttgaaaagttaatgctgcttttgtaagtacaataaacactaggagattctgttgcaacactttaataaaacatcatttgcttgaacttaagctattgtctaaatacgagttaagcattttcttaaagtacaggtaaaaaaaaaaaaactaagactaaaagttatattacttacaggattactaggatataaatccaccagtttatgagaaagatagaaaagttctgttcaggaaaaagcagaaaaagaacaattgttcgtatcacatgtaatttaagacatgatttcattacaactcttcacaatcatataattctgctcttacagcaatgatttcatacttgtctttccttctagataaaaaattaactctctaactggagagttagatgaaggacacactgtgggcaaggtgggaacagacaccccctaagacagcacttcccgaatactgcagaggatacagcaaagcacctcacctctcttagaagctcatgcctgtcacaccaagggcccattatggaccatcataatcacccacaaccaatttggctgaacaaactttcaagtttatcagatcaatgatactatttaatcttgagaaatgtgtaaatcctggcatttcaagatgatgtttcctgcatgcagacttggattcagtagaccagagcagctggagatgctgcatttccaaccagcttccacaaatgcgatgttgctggtccacgaaccacactctgagcagcagggattcggtgagggttttccttcctgacagagctcaccattcagtttagaaaaatttaaggacaaatgcatccccaaacacaactaaatgtcaaatgttaaaaatacggaaaacatgagcaaacaatctgctcctttccaatttctaagtagttatcaactcttaccatatcagatttccagtggaatttacaaaaaaaaaaaagggggggggaggcagaactgacacccaacaatttaaagctaacaaaccttgaaacataaatgatatttgagaaaaggtagtaggaagcagtgataaagaactaattgttctgatgggaaaacaaaattggccatttgctactttcctaaacatttcctccccagttgttacttttatagtagggttccattatgttgttacctgcaatctcaactatccagaatttcagagacaaaatttcaagttacagaaaagatttgttttatgtctaagaattactttaatttaaaaaaaagtcttaccattggctttattcagctctacaagcgtccctatatgtacaggtaaacaacttgcatggaaaggatctttctccattactctgaaagttaaagcgacacattactacccccaaaccagcaggtgacagcactcacgacgatcggctatgtgtagacagtcattatggtatcacatatgatgctgtgggttgtaacacttcactttcttcactccattatcttcaggttgattcagttaaggccataattaagttacaaatgaaagaaaaaattctggtttatttgaaaggaataaaaataaacattatcacatacatttactttaagtcaacagaattgtaatacataaaataagtaggccgcttatttaaaagaatcaaaaccaacaggaaatcctattaggttggtgcaaaaataactgcagttttaccactacgttcaacagcaaaaactgcaattacttttgcaccaaactaataaataggttatgtgtatttgccaattaaaatttttgtaatttcaaggattttaaaccgaaccaagatctacaaaaaatagcatatgtcatttagctaaagtttaaattaggtacactggaaaactgatacatgtgggagatggcttagctactgcgtgcagcatattaaacacctagtatctacagtgtgagtctcataattgagaataaattttacaaaacaatgtgccaaaatggaattttcaaacttgcaaattatcaagatcagtaagagcaacatgtatatccctcccaagttaatgtaataaatctacaaatatgcacaaattcatgtctgtaaattgctcttttaagacagcaccctgttcagtgctctacaattggtaaagataacttaaattatcatctagttcaagattattcagagagcacgtccgtgaatcacctaggtaagatggagtgaactccatgttcctacagaaaaatggatggatatacttacacagaagtaagcttgtagcacattttaaaatcacagttataataatgtctctcagctaaagacactaccacatccagattctcttgcaagccatctacagattcagggatgaccgtttcactaggcttattatactgaaacacatagaaatgtaaacataaactcaatgagcaaaaacaaaataaaatgtggattcaatttgtgtttggcccaagtggttaaaacatttacaagaacaaatgtgagagcctctgaaaacttataactttaggttttataagtactcctctcagtaagtttaattcccttctcaattttagaacagaattccacagcgggacgtatttctcaaagtaaacattcaggaagcataacaaaaaaatcttcatttccatgcaacaccattccatttacatttacttggtaattcaatcttttagtataaggagtctttcagaggaaaaaggtatttttgaaagctttttttttttggaatcttatgtatcttaaacgctctattcttaaaaatgtgctaaatttaaaaagttttaattttgaaaacttaatataagactagatgccaaattttatggaataagatatttacataaagcaagtgctaactctttggttttacttacttttttcaatttgttctcaaatagaaaacgcagcaattcctgttcttcattacacagcttgctaaggggtagtgattcaagaagttctttttcttaaaaatggtgagaaaaaaaagaatatcctcataatatttatagaggggaaaaagccaacaactaaaaatatgattctacagttcttggtctaagtaaatcaaactcaaaagagaacataagatcaaaatgtgcaacagaagctgacacagtggctccaggcctgaagacgggaatcatctggtgggtggaggctactctttcagggctgaggcaggtccccaggtggctcttgtcacctaagaaccaccagcctccgcactcctgactgcgtggatcttgctctgctgggaacaggggagcctgtgtactgcaggtgctaagcaggacctctggccactaaccactagataccagcagcaacctctcaacctccctccctgcccctaagctgtgacaaacaacatctccagacattgccaactgttcccggggcagggggcggcaaaatcactctggttggttgagaaccactgcactaggctaaaatatgttagaatcccattaatccaaccactctattttctgtttcccttgttgacgcacctcacaccactgccaacatacttggactgattctcagtgcctgtggtacattaggatcacctgggagctttaaagcatctgctctggagttgggaactggacatggatgtttctctgtcttcccaaggatgtaaagagcaacacggttgagaatcactgcatgagatactgaaatcctggtttatactatctcaatcacttctca

SEQ ID NO: 1885383 - DNA, 4001 bp, Homo sapiens
aaaatgcttttcttctgcaaaatactgagtctatacctgcttcttctatatgtattgttgcacaagaatgataaaatgaaaggttttgaggtccagatcacagcatgcaaaaaacatcaaagggacagagtctgccttttggggacagacttaaatgatgtagactctagactgaaaagataaaaaaaactgtgaagctgaagaaagaatgattctgcaattatgaaggctaaggatatatttcaactgaattcagttaacaagaatctcctttgaaccaacagagaagaaaactgagggcaaataaaaagaaatattacttgacatagtataataattttatgaggtttggttttctagtcagaattgacacagtttgaatttggagtagtctgaaaaaaatcaacagtttgggcatgtactgcttaatttttagagtaatattcaggtagaagacagtacattcgacaatatatttcttgttgcttgtcagaggcaaaatgctgaagtggataatctacacggttggccaagtgcactaattcttatattttattatgaatataagaataaatgtgaaatcccatttattcacaaaaatctcctgaccaaatgaatgtgaagaacgtgctgccgatgtgtgttgagaaaatctttgctttaccatgagaaaatattgatcaaatatgtttctatagcatcaaaacaaaaactacccatcttaatatgtgtataaaacatgaaaatgcctattaattgcacatttctaaaatataatagttttacaagtgtgtcaaaaagttgactgaattatataaagtaattctggttcttccttttctttattagtccctatttttgtggacttgaagactaaaaaaatcagatctttttttctgtatagcttgtaattatggagaatgtttcaaaacaaattaaaatagcacttcacatatcaaggacatctcagaatcattttcaagtttaaatttttaattaacatggatctgatagtaaaccattagcataggtttaattctgaaataatcagcaattgagtacacatctcctgacaagaaaacataataaatttctgatttgtcactaagcagaaacttggttccatatagtaacgagaccatctgagtccttctcagtttccataggtatctgtctttgttctacctcattctgtaccccctgcatgtgatggagttgacagttattcctgtataaattttacaaggcttctttcatgataagtacaaagatttccactgtagttttcttgcctccaataattagcttggatttattgaactactatttatactagtataggttcaacccaatatatcttttcagtcaattatttttaagaaaatttttagttcattatctgttacacggttaattccttcctatgtccctatgcttttcaaatataagataatattagaattagtcataaaaatgaagaggtgaaaaacactttaaaatttacaaaacacttttatatcttttatatacgttagtcactgtgaccctaaacagaccactgggacaaacaccatttatatgtttattttagaactcaggatactgaggcttaccaaagtgtttactattatacaaccattaagtggtagagccagtcttccacctctaaaggctgggtggatacttaatgtccctttacaatgtatagcaaggatactgattagagagccatcatttttgatgaggttttatacatttttctacctgtaagttaatctcgtgttcatttatttatttggaaaacattaagattttaaaatatgcacaacactaaacattagggacactaaaaattatttctgttagtgaaaaaatagatataataatacaatgaaaagtggcagaatctagacgataatgagattgcttaggatcaggctggtacaaacataattgtgggttttaccattaaaagcaacggcaaaacccgcaattacttttgcactgacctaataattcacaaagaaccgagaacaattcagcttggagttttcgggaaacaatgcgctgaaaagtttaactgcacattatagataaattttttaaaatgcacaagaagagtatgtaaacagacattctaagaggaagaagcacatgttaaaaataaaaacttacatataatgtttagggacaaatatgtcataatgaagttccacagaatcatttaaaatcctgccaagaaacttgccctatattttatccttttagaagctgactttttttttttctgtttgcaatatgaccatattttttgttttttacattcaaccaagagttccttcctggcttatgaataggtgaatcaagccttagtcccagctctgtctgtacctccaactactgtagatattttgtgtgtctagacaaacaaaagaacgtggtgatatttcttcatccatactgtagggaatgtggagaaagtaaattaatattctgagttcttctgaaagtagtaatggcaagcttaatggcaaactctaggtgagtttctgagagcagccctgcctcaggtatccacgtgggtatctctcacttccttcagttatctactccaataccacctttcgagtaaccctgtccatatccctcaactaaaataacaacatcagcactccatctcatctcacaatttttatgcaaattaccttgcctaattcttctccacgtgtctcatcaatatctgacacatgatgtatttactggtttgttttctgccagtattctgtttccccgttagaatagaaactccatgaggacagagaattggtgagtcacaagatgtatctctagcaacgaagacatagccctgcacatactaatacttgataaatatgtataggatcattagataagtgaatggacataggtaaaatgtacatgaaaatgaaggatttttcttagtttggtggttaaatcattattctgtgtcatttcatcagagtttagcagtagactagccaccttgaatttcacattctttctctactccatgatgcaatgtattgtcaaagagagatgaagagcttgattaaattattatgtgctgatttgtgcataattgagtcaaatagaaaataactgatatattaatatttatatgaacatctgggaacttgtatataattctgtctaaacttgaaaccattcccctgaaatttacttgttaaaaaagccctttctaatgttttatttgttagtaactgcctttattgtcaagcctttaaatgctattgctatgttagcacattgatacacatagacatgaacagttttccggagggcagtttcacaagtagaattaattttagtcaatttcactttcaaagcttcaaacattatcatgaatcaagagaaatgcaatgcctgcaagaaaccaccacctacgacacagtatcgctgtgaattctgagcatatgcactctaaataccaggttttatgtcattgcatttcctgtctggctttgaatgaattctgccttacaggactattagcaaacaacaaaaatgatagcacttcacaagccaaggaataactaacctacttaaatatgtcttccttttggatagattaaaaatgccagcagttaagcagctgatgtatcagcacgtatggcaacggagggatttttgcaggcatatgcacttaatcaaatattacttttcccatcactgcctagaatctatgtaatttaattaacttatgcttcagtggcattttggaaatgaagtggatctgaagtaagcattggataggatctacttagcattccatcacggaaaagtgatgcataaatttaaatctttcgataatattatgctttgatttaaattggtttgaaagattttggactgtttagtaagtttgcaatccttaaataattagtcacagccacgttagaaaaaaatgggttttcattgagttttgatactggattaaattt

SEQ ID NO: 1885384 - DNA, 4001 bp, Homo sapiens
aggtggtttatctaccaggaaatgagttattttaactttatcaacattttgtagttttcattgatacgtaaaaaatgtgcatgttttctgggtacatgtgataattcgatacattcacataaccaaatcaggataatttgatatcatcttaaatatttattttttctttgtgctagagacatttgaattattcttttttagttattttgaaatgttcagtcgatgatgaatcagtcattgattaatcatcctccttatctgtcaaacaccatgtcttatttcttctgtttaactgtatgtctgctttaattgtgtgaagtacttgttcattttccccctaaggatagacattttttgaaatgtcaaaactctcattatttcccccaaggatataataccacttccatcatgcctaagtttccatgcccaagtgtgcctggttctgtactgtgtagtgtaatccacatgtcaatctatgtgtcactgtatcaataccacagtgtcttagtcactgtagctgtgtagtgagttttgataactggtgaggaaaaggcccctctctaccccattgaccttcacattttcacatttaatattaaattcagattttcgtctttaaaaaatgtgattttaattgagattatatttaaactgcatatctttttagatgaataaaaaactttgacatattgacatcttcaattttggaatataatatacttcatttacttagatactatttataactttaattattagtatattttcaggatttatgtcttatgatatgatagtattgatgtatatttctttttaatttattaacaaggtttcttttaattcttattctgtctcatttgtgtttttcttcatttgcatatttttaaatcatgaatggctattgaattctatctaactcttacttcaccaagtaggattatttaaaaattttgtttatcttctaatcatcttttaatcttttaatgttattaattgcttgataattttttctaatgttgccctatctgtattcttgaaatgaatgcagtagatgaaattgaggtcatcacttttgtagacattgcttgctaaatgtggtagtcattagtgctactcactgatatttgtttcttctcttctttcttccctaactttaattaggcatagccaattcatggtgaatggaagacctgtgtgtcacttctgggctgcaatatttaattacaagtctgaactgtccagaacgatcttcctccttccaaagagatcttggaagcacatgttgcaatagagcttgtgagcttctagttcactgaatgactcattgaatagagttctttcgacaaccagaaaatgggcataagggaaaataaactttttttttctgttaaacatatgagatttgggagctttttataccacagcattacctgacctatctaagtgatagagtgagagtcaataagaatcaatattcataaatcagactcgcctataattttcatttgtcaaactatccttttctagtgtcagataacgttgcactgttttcatagaataatatacattttcatatctttggatgaattttatgatcttggaatgatgtactccttttacatctgctaaatctcaagtgtaaatttttttttttttagtttgtgggaagattttagcaaatgttcatgttgaaggctttttctaactttcctaagttctttgaagagataatgctagtatttcatataaagaagatatgtagaaaagcgatttgagaatggagataaaaagaatcaaatgtttactcatgctgagaaatggcagatccttgggctgcagaaagagaggatgggatttgttcgttgttctctgaccttaccttaggaaatttgtaagacctcacacaaatattaggttggcacgaaagtaattgcagtttttaccattacttttaatggcaaaagccacaattacttttgtgccaacctaatatttggcatctatggggtttaccactgaagcatgacatcttctaaaagattatcattctcaaagcaaagaaaaagaaaaccagatgcataggatctgaaacagtcatgctggcttgtaccttgtgtattccagtggcaatcaatgtgcgcccacactgaaggatcagggggatttcctaaagcaaattgttctaattctctgtaggattctagaaacttgacataatttagaaaaactttttgattacaatagaaatataattttccataatttctgtgggtttactatcagatacaaataaagattgatttaaataaataaaaaatgtgatatttgcacacattaatttctaattgacatacttacatttagatttttattttaacagaaataatgtaaacaaactcctgggaattgctcttcaactttgttcttgaataaatacataagtcaaattcttagaagagaggcagacatatcaggcttcacactgcttagtggcttgtagcatctcttgatatcaatatagaaataatacaaaagcctttgaaatttttagtattcaacaatgaaaagcctgagttctccaggaaaaaaaaagaatctgtcccagagcagttgttgaagaggccagatgagggagcctgtacagagagtcatttcccattgagggaaactttgatgaaatggagggaggagatgagaagcaaatggaggataaattctctcttagaacgccccctgggtgaactgtgtggagatgcaggagttcatacagcttttctcatgatgtctagcaagaccgaaaaatcagatgtgcttcttaagaagtacataactaaaatggaaataaaagtggagtggttgttaagtcaattctctcatgacaatttacgcaacttcctctattttctattttcttacatccatatgatctgctttctctcatggctctcattttagaaacacctcttggcagtgtgcaatgacatttttgcttgttttgaaacaaccaaaaactcaggttgcttaactccctatctcatctagttccttaaattattcagtcttgtagaacttggcaaaggaaaaatgagaaaatggtcctgctcagtagaaatctgttgatttctatccactgaaatccattagtctttgaagttaactctttcttaatgtgtccttatgttacagtaagtatggtgattccatttatggatagatacacattattttgtttccagaaatattttagaaaaataatgtacacttcaatctatattggcaaccaataatccatggtattttgtcgtccgctttcagagaccttgcaatatttgagatttgttttctactaaatttaatttcttactaatatagaccttctgtgttagactcctatctgatttcatatatgagtttgaaacattatcacatgactgaatcaactttgtgagcaaattattccaaaaaaacaaatatttactcatattaatcaccttctcaaaaaattttgatagtttcatatcagagaaaaatttcctataaaccaaagtaaactcagtgtccaagaccccctaacatcaggttccaactaatctttcaagacttacttcatcaaactccattagaaaaacagtctggtcttacagctttttcaaaaactagcaatttagtttaattaattcccatttatgaattttttgttgcttatattttaaggtcttggtcatgattattattattattattttttgcctagacaaatgtcccaaagagtttttctaggctttcttctagtattttagtcattttaggtcctgcatgtgtttaatccatcttgagtgaatttttgtatggtaagaaataggggatcagtttgatgtttctgcatatagcaagcaatccaatttttccgaacaccatttattgaaaagggtgtcccttccccagtgtatgagtttgtcaactttgtcaaagatcagttggcttctgtacagcaaaagaaa

SEQ ID NO: 1885385 - DNA, 4001 bp, Homo sapiens
ctccacaccctcatcccccagcaggggttgtcattgtcgcccccatacccagccctacagagcctctgactctggccctgtgaggttatcttaaagactctaggtctaggatttttataaaatgaccatatcgctcaacagtccccaaaagttgagagcagctcctggtgccttgggtccctgacagcacaaggagctgagacagggaattaaatattcttaagtagactaaaaagatattgtaagatgaagagagagaccaccttaagcaaaaagacctgcattttcgcattttaactctgcactccttgtccgcacacacactgggttcggttcagtttcaatgcacatttaacccatggccaccttgctttcctgcttgcaggtgggggccccagtgagggccctggtggctggccgtgggagcaagtcagtgcagcatttgctcagcttgtgcttgtgagcaccatgtccttccaaggcacttggcgaaagagattctcctccacagacacacagatcctgcctttcacctgtgcctatggcctcgtccttcaggtccccatgatgcaccaaacgaccgaggtcaactacggtgagctctgcccctgctggtttgtctaaagggagaggaagcctgggcctgagggcaggagagaggaggccaggtccctgctcctaagggatcgggatgtgtttccgcagggtccatctgctggactgggcatgcatggcggaaggaaagactaaggtgcccggagactttagagaggagtgtgggacagtgtgctctgacaggacagtgaggacacagatgtggaagagaaactcagtttcatgcctgacatttccttctgcactagtagagtttggaccaaactgccaccctggcaggcacaataggccgggattgaatggctgctcctttaagatcgggtacagtagtaccctgtacccttatccatgattttgcttttttgaggtttcagttatccgcatcagaaaatattaaatggaaaatttcacaaataattctcaagttttaaactgcacgcccttctgaatagtgtggtgaaatttcctgacgtccttctctgttccacctgagatatgaaccatccctttgtccagcatccccaggctgtctacagtatgcccgttggtcacttagtagccatctcagtcatcagatcgagaaaacatagtatatgcagggctcgttaccatccacaggttcaggcctctactggggttcttggagcatatctgccaaggataagggggcactactctatgtggttctgcatgtgccatcgtccccccccccatacccagtcctagagaacctctaactctggtcctgtgagggtatcttaaagactctaggtctaggatttttataaaatgaccatatcgcccaacagtctttggcctgaaaccgcctcctgagggtgaggtggatgctcggttttattgtttccagtcctctgagccagcctctctcagggtccgacactggttcattctcctggctcctgggacagagctgacctctgatccactgtaccctcaggtcagttccaggacactgcaggccatcaggtgggggtgctggagcttccttacctgggaagtgcagtgagtctgttcctggtgctgccccgtgacaaagacacccccctgagccacatcgagccacacctcacagccagcaccatccacctctggaccaccagcctgaggagagccaggatggatgtgttcctgcccaggtgagcagctgagtccccctcacaggtgctgtgcagccagcagtcagaagagcgtggatttgcacacaggtggtctgcctccagggtctgtgcttagccactgggatgacttgtttaatatgtatccccagaagttagaccaagaggaagtgaccctagagtttgagttcatttcagagccactgctggctagctcacagcacagactgaaatgaactaacttcccagagtctttccaagacaagatattctgccttcactgggctggaatggagccccccaggaccccctgatccagccctaggctggaccagtttttggaaaggaaatgctcgtggttcccttgtaggaacgttgcccaaatcttatcccatcctaagagtatacaactgtcatttttccaaaaccaaagagataagatgacttacgtaattgagcaagtacagataaaattctgatcagacgccaaattaaggcataaaattttgacactttaagtctctgtgcagaaggttctcattctttctaaatggaggtgaactctcctttaagaagacccaataggtacaaatacaaatcaaaaagtgaagtggtggcattctatgttgctttttcaaaacaaaatctattagcaaaactcataactttacaaaaagactcctcttagggcttctttaaatgatgagcttctgtgatgtatttgaaatcagagtaaatttataaccattttttgaccagcattaagcaaggaatgttgtccagtagccactagatgccttggcctctctccactgcctgggcttccagtaggcaaaggcaaagtccttggcagtactcccttgaggagttaaaagtaaatctatgcactagaaggaaaaaatacaaagagagacccagtaagttaagggccaaggtctaaagtgagatctggcataacccagggcaaaaggtgcacttaactctaaggtaaagtgtatctctcaaaactaaatatttggaccccaaaccaaaacccaaatactggatatttcaacagatctctcagggagggagcagaagcaaccctaatcttcctattatatttgagagaaactcagcaagggaaggaagagcagcgttccgtgtcaaaagtagagagaaaaaggaggctggtgcgagaattcgccacaacctttttgggtttaagagacagatggtgggactcatcctcgagcagttcttccctggaagagaccccggggaaattcccagctccactgagaactctccaccgtcctgattctgcttttaggagtctcaaaccctcaagcagtttgaaaactgaaaaacactggcaggcagggaaggcaaggcaaggcagaaatcttagtaacacaactattagttagcacttaacctcattctgataattttttttaaatctccttaagactaccaagactgctgtccaaggaggatagaggtttttaggaaaatgaagttatttcacaagtaaaactaaccaagttttttttgtttgtttttaagctagctttaaatcctttggggaacaaaacaaaaaaagtaaaaactctcttaggtctagatttaggtataaactttggatcacggtagacacaaagtcagcttttaggcagggatttacctctcattctctcaaatcactcattcttcttttagtatgacttgctctgcagtcagcaggcatttttcgtttaacaagagcaaaaaaattttgcacactgtgggtagcaatgcaaaattgtgtgactatgagatgtgctttcaggttagacatcaccaagcagtgcactagtagattctggacgaattatggtgtctagcttccaaagtaaccttttatttataaataaataaaaaaagtgcatagggactgttaatcttcatgagggacgcttagcatactaaaggaataatcaagaaaaccaagaatgtgttaagggttgtttataaccacaatcatatgatgtcccacaagaaagactaataatgccaaatatgtatgtaatgaataaaacatttgattattaggtcaacatagaaggctgagcatgagcatgttttgatattagatataatatatatcttcttaaaatccaccagatcccacatattcaaaatgagttttgcccttcctcccaggagctgctgattatcatggtgtgtggtttatgcttttctaggagtgtttcttttttaaaaaatcaa

SEQ ID NO: 1885386 - DNA, 4001 bp, Homo sapiens
cttggaatggaatcatccaaaacttaaaagcagacagtttaactattttttaaaatagagggaaagaggtggagggagaaagtaattctagtgagccaagttccataacttcagagcatagaaatatttttgtcaccttacctatggtgaaattattttacatgaggtgtcttgctgacagaaaacaatgcttgttgcaataaaaccactgccttgaaacactactatacataactctttaacattcctgacagttgtttcccaacatggatgtaaagaacttcaatgaaattcatcagactcaaatattaagtaaataatttaatgatagaacactgaaatttctttagacacagtattttcaagttatatttctgcctggagtacagatatgaaatagcacaaactgtactctgaattaagcaaacagaatgaataaaaaaaaaatattctcccaacctaagtttccgttcctcatttccacttgcctcagactctttctattgaacatatctagttaaatctctaatggacggcctgtgggaagatttactgccaacagggatgactgacttctttccggacactgagcaggggactgtgggctctgaagcagtttacttcctgtggaaagccagtcccatttctattttacttcgatccaggcctattcagataaagcaccactcagtagctactgaccatttaagtatggagagaaaagcaaagtagaaaaatggttttcacttaaagaaaaagcaaatggaagaccagccataatagctccatggcacaagagacatgacagggatctcctccccagatgtcccctgatgtttgtcagcctctcatatccctggccctctggcttctggctctgtgattacagttgccacagaggattcatggacagcaaaaagcttaaggaacctggaggttttgtacaacatgtacattctgctgacagaaacacatacatggtatggactattattaaaattgatagcctgcttgcactcagtatacaggctgcttaggaacactttattgggagataccctgctggtgttggagcagcacaaaatgatgaggctaacttaagtagtgacaagaatgatcctcttataccatatggccaaagaacagctgtccatccccaagtctatgggggatcagatgaagtgtggagtttggttggttggtcagtgaatttttggtcagtgaatacatacatatggcatagtgaagtacaattgcttttcttttctttttttttttgagatgaagtctcgctgtgtcacccagtctggagtgcagtggcacaatctcagttcactgcaacctctgcctcccgggttcaagcgattctcctgcctcagcctcctgagtagctgggattacaggcacgtgccaccacgcccagctaatttttgtatttttagtagagatggggtttcaccatgttggtcaggctgttctcgaactcctgaccttgtgacccgcccgcctcagcctcccaaagtgctgggattataggcgtgagccactgcgcctggcctacaattgcttttcttatgttccattgctttataaactcatatcacatatacagtcatcattaagacttactgactgcaagtaccaaatgtagaagcctccaacactgtaaaagcatggcaagacaggcttcaggatgggtcagacctgacattactcactgtggagtacaagcactgagttctttctagttctctctgagagaggttcacccactgtcacacaatcaccaaacagggaagaaggcttctcttggctttggctctcactgttccttggaagggtttctgattggtggaggcagagcagacagtgagtggcccaaagtggattgatggccccaggccaggacccagagacaaaaggtaagcgctgttgctagccacatgggtcttcatcagagcacagcagcaccgcctaccactcagccccttcctcaatctaaagcccaagaagggaagttctttgggagagaagggaagctggtaaaggccatgctatttcccaaaggcctgaccctctgggccacccctagcaatatagtcagcgtggaatatgatcccacctagaaaatgaatggcactattttaagagtagagcatcttggggaaatctaggatacctactctgaagcttttactcaagtgtggaagccacaccagtatgcaggtatactgtcttacaaatctagaaggatattttagttttcaagcaccccatgaacactttttaaaaaattcaaccactggctgggcatggtggctcacaccagtaatcccagcactttgggaggccgaggtgggcggatcacttgaggtcaggagttcgagaccaacctggacaacatggtgaaacctcgtctctacaaaaaataccaaaaaaaattagctggacatggtggcgcgtacctgtaatcccagctactcaggaggctgaggtgagagaatcgcttgaacccaggaggcggaggttgcagtgagccgagatcgtgccactgcactccagtctgggtgacagagtgagactctgtatcaaaaaaataaaaaataatcaaccacttagaaaagtacacacattaagcagaccctacatctagaatgggttaagcaaccatttataagcatcttcatgagaaatgatcacctctgggtttttctgatatttgaaataaacaaggtaccaaactgtatttccctcaacacataactgtccaaattgcatgtacaagtggaggtttacgtaaaagccctgacagaactatattccaccttttgaattaggtgcataaggctactgaccactctatattttaccaagagcaagagcggtcacttttctatttcagtacaattatggacagaaatgatatgatgcaaaatagaggttcttccataaagtttaagatgtagggtagaagggaagacaaaaagcaaaattcccaagaaatcagaataacttcacactggtcttgtactccaagaaaccctgagatgaactgtagtcctcaaacacctgtgcttggctcaggcccaccaagacacttcagtatgcttccaactggttcatcatcaacttcctgctatattcgtaggccaaaaagagtgctccattggcagggaatgctcgaatcatagtaggtttcagtccagaatataaggccgttattcctagcaaataaaagggcggtcaaagactgcaacaatccctcctttggggatacccacgcagctgcatagcataggtatatttacacatgcaaacccagacaacagtgctaaaaaccaacaagtcatagaaggatgcattcccagcttttcctaaatagactaatggaaacaaggacaagtatcaggtctcctggcaaaactgactgatgctcaggtaacataccccaattccacgcttggttaactcttagtatatggatggggcagagctgaggcctgagatggccagacagaggcaaccatggagatagaggtggcagcagctttgcagcttcacctgggcagtggcaggaacaccaaccttgaagttggagacctgtgtatagtattagtactgcccagggtggttatgaagattgaattagataagggaggtgtaagtactttgtaaaactttacatgttatacaaatgtaagggaggattactatgagtaacagacaaggtatctgtcctctatttgggacacaaagtttctgtgttactgtcctctttctttttacaatcaaaacagagttcatatctcagattttttttttttttttttttttgagacagagtctcgctgttgcccaggctggagtgcagtggtgcaatctcagctcactgcaagctccgcctcccaggttgacgccattctcctgtctcagcctcccgagtagctgggactacaggtgcctgccaccacgcctggctgatttttttggtatttttagta

SEQ ID NO: 1885387 - DNA, 4001 bp, Homo sapiens
atttgagatggagtctcgctccgttgcctgggctagagtgcagtggcgcgatctcagctcactgcaacctccgccttctggattcaagcaattctcctgcctcagccacctgagtaactggggctacaggcgtgcgccactacgcccagctaatttttatatttttagtagagatggggtttcaccatgttggttgggcaggatggcctcgatcccttgacctcgtgatctgcccgcctcggccttccaaagtgccggtattacaggtgtgagccacagcgcccggcccatttgtttattttcttaatactcaacacttgaaggcaaataatgtacaataataatctgacaattattgaaaattatatattttttaaaaataaaaattttggtttcagaaagttttttaatgtgaggtactatattttcttaattataactcatagagaatctagccaattaagaatgttcataaatcaataaatattacttgaataatgatgctacatacaaagaccaaatgaaaactatgtgggcaaattgttggcagcagataggtttcctttagaaattcctttcacataacactatttggacagaatgttacctatttcaatcacttctaaaccatcttgagaatggaaagtcaaggagaattgcagagttttttaactatttgatgagaactttatcacctttcctttgatgtgtaactttctcttgagagaggcctagggcagctctgactgagattggcatctgaagaatctaagtgttgtaatgttgtgatcccttcattgtatttgtttgtgggtaaatattttataaaagccttcaaatataaaacttccctggtcatgatttttaacattctctctggtttaaccaagtttcttttcttattttgtcttaaggcaaactgtagtaagcagttttcaaacatcaaaatcaacaagctcatacttagtttgagattagttaaatactaatcctaaatcatttcaaacaaagctgactagtagttatcaaaaattaatttgttatgattggcattttattataatctttaataataataaagttgattgtgtttgatcaatttcaaaattttaacagagatctgtgagctctttatgaatgaacattacataaaacttgagtgtaggctctatgttcaaaaaatatccatacattttaaacttcagttattatgggattcatctttttgactaaggaaaatagttgaaataacatattctgtaaaaaagcagttctatcagaaaaatcttcaagtcatggcacacagtggctcatgcctgtaatcccagcactttgggaggccaaagcagagtggatcacttgaggtcagaagttcgagaccagcctggccaacacagtgaaaccctgtctctactttatttttttaattaatttattttttttgcctctgaacttcttattggcctcctgctccccaaagggtaccctgcgtctgctggcttaatgtctcagaactttggtgtcgttggtctcagacaccactttgtcatccactatcctgcaggtggtggacttttggttgtttccatggagctgctgctgtccagggcatcaccatgattgaagttcttcccgtcttccagtgggctgcagtaggtggcaatctcagcctccagcttgaccttgatgttcagcagggcttcgtactcctgggcctggcgctgtccctctgcccgagtctgtgccagctctgactccaggtgcagcaggatggcattgagctgccccatctgcagggcatagcagacctccacctccctcaggctgttctccaagctggccttcagatttctcatggagtccaagtcgatctccaaggactagactgtatgtctcagctccgtgagtgtcatctcagcagctccaacctcagcagactgtgtgatgaccactgtggtgctctcctcaatctgctgagaccagtacttgtccagcttctctcggttcttcccagccagctcatcgtattgggccgaatgtctgccatgatcttggtgaggtcctgcgatttgggggcttctatctccatggtcaacccagagctgtcaatctgggcttgtaagccttttacttcctcttcctagttcttcttcatgaagagcagctcctctttgagagcctcgatctctgtctccctgctacagctgagtgacattagtgtcatcaatgaccttgcagagcccatggatgtcactctccacagactgacgcatggccagctctgtctcatacttgactctaaggtcatcagcagtaagacgggcattgtctatctgcagaacgatgtgggcattgtccacaatatttgcgaagatctgagcgctcagttcctcgatggtcttgaagtaatggctccagtccctgtcctggggtcccttcttctccaggtgctcccggattttgctcttcaggattttgctcttcagcttcgggttctcagtctccaggctcctcactgtccaggtaggaggccaggcggtcattcatgctttgcatggtctcctcgttctagatgcctcccattcctgccaaatcccccgccatcctcatggccaggccccgagaccccatgccgcccaggaagctggtagagcgggacacggagatccgggaaccagggcccctggcggctgcatagacgatggccgcgctgctgcctggcagggcaccatagctggacacctggacagagcccagggaacggtagttggtggagagggtggagcgagtggtgaagctcatgctgtttggggaggagagcgagaggacaggactcaggctttgccaacgaccccctgtctctactttaaatacaaaaattagctgagcatggtggcgcatgcctgtaatcccagttactcgggaggctgagacaggagaatcgcttgaacctgggaagtggaggttgcagtgagcagaaatcccgccaatgcatgcactccagcctgggagacagagtgagactccatctccaaaaaccaaccaacccaacaaacaaaattttcaagtcaaccaaaaaattgtcgataggcctttgtttgtttgtttgttttacctgatttctcttaaattaatgttgctcttaactctgagataacaaaacaagggattggttcatatgtaggtatcagtagaagtaaagaggaagaggaactataggaaatgatatttcaatgtgagtgttttaacatggtattgtttaaacccagctatttcaaaagattttgtagtcttactgatgataatatgtcattgctacgggaagaaaggtacaaacacaagttgaagacaacatccttaatctaacttggaaacaacctgggtgctactcaatactcatattaacgaactctataatgttttgactgctgaataaagttactttaactaacttccaatatcttctaattcatgtatacttttaatatatctctcctttgtgtttgtatagatgtatacagcatgggtttgtgagaaatttttcttgagaatatattattattaagccataaactcaggacaattttggtttactaaagaccaaggctgctttcatctgttccaccaaaaatggtttaatggtaccactcaccacccttgcctctcctttccagctccagaacatttagttctctgtcctcagtaccttcatagtaccaaatgtatatttctgtcctaacacttgccacattgtgctgtcaggttttactatacttgtggacccaggagaaaaatgtgcagccctgatataggtttcttggtatagttgatactttgtcatttcataacctgtgctgaacataatttctggctcttgttggatctcaatgagaatttttgaaagaataaataaatagtaggagcaatgtgaatttctgcaagcaacttgcttttggaaacaaattaatccatttgtctttattcctattctctatggatag

SEQ ID NO: 1885388 - DNA, 4001 bp, Homo sapiens
tggggagcctgctctcaccaccctgtactcctctgcgtgctctcacacctcaccatcccttccccaggacagctctcagcacatcccatttcacttgcaggctaaccggcctgaatctcacaacagcctattagctccacggggactgtgattctccatcttgtcctgtttgtagacctggcctcctgtacgacctggcatatgcaagcactcaagaaacagttgcaaaatggataactgaatggacaaagacatagtgaggcatattgctgagttaaggcgtatggggttttcttagccaagactgtagttagttgggatatgaagacccaggtgatgggttactaatgaaggcggggtggaaggggtgagaggggttaaagcaaggaggctcccaaaggacatgcttgatacctacattcttcatggacatagcatcctcttctaatacaagaaccaggagttacaaagaagcaatgctgggaaactggtgaaaccacaaatggcagctcctcatagaagacagttatttgcaattccctgtgctctgtggaagctgcagcttttggtgtaagtatgaatatgcttacacttagttttactcatttgccttctatgcgtagtgcgctgtcctggggccagataaggaggctgtgacacagagaaatgactaatttcctatggccctgaaaagagtttggctgagataacaaaacaaacgtacattaaaaactaaacaagaagcacttcaggactgaacgagaggcatcttgttagacttaaaactgtagtcacgtgtcgcttaacaacagggcttcattctgagaaatgtgctgttgggtgactttgttgctgtgtacttacagaaacctagatgtgatcgcctactacacaccaaggctgcttggtgtagcctatggcgaccaggctacaaacctgtacagcaagtcactgtgctgaatactggaggcagctgtaacacaatggtagttgtgtatctaaacatagaaaagacatagcaaaaatatggcatcataatcttatgagaccactgtcatacatgcaatctgtcattgaccaaaacatattgttatgtggtgcatgactacaagagtgagcacaatacagagagaaaagacaccacagaggctgctgtcctcagcaaaagctttgtggcaaaactggggaaaaaccaaacaaagcccaaaaaaagaaaaccaaacaaagcccaccaccagaaccacacacaaactggcaacacattcaccacttggataagagatggggcaacgcgaggcccagaagaaaccatgctgcatatttgaaagccttggttccttggtaaagtcttaaaaataggaaccttagaaaactcagaagactgaatctaaccctgtcatgtgaagtgccacccatgatctttgtgtcgtgctataaaaacagtgtattgtatctttctgtgctgcttagcagtagtctcagtaggtattggaaaaaataataaactagagggaaaggagatgatcgcttgaacaaagtcccaggctagttttgcagctctcggtttcacttttcctttgtggtttctcacagtgaccagtgttgatggatgagatacttcaaacagtactatttcttctaggcagaacagaaggcagtttccatggcaatacgatcaggagacacaatacatcctgttgctcagttttgagaaccttttggcttaggggacagaagtttccaactatcggctgccctctgccccgtctcttcttcctctgtcttgctctagtcggctggagtcccaaaggccacacgccttgcctgtgcattccatgcaggggctaaaagggtcagggccacagctggtgttccagggactgattggggatggcaatgaggacagaaggtgcaaagacatctacagagtacatcgggaagctccagcacagcttaggatgcaacccaacagcccctgcaagggatgcttctactgtgtacagtctgacagacatgtgtcccaagtcttgtttactttaatgacatttcttttcagaggcctgacatacctagcacagctgatcttactgtgacataggtacaattttacaaacaggttcagttggtttcaacagcagctgcaaacccaagagagacaggttttccctttgtttcaacaaagcacggctcccagccagttccatctggggaggccctggaggtgcagggaagggactctggagagagccatgggatgcacatggctcagccatgcaccagggcgtccagtgggtctgtgccgccgctgccctccaggccccctgcacagagtggggtgagactctgggcagctgcgggggggcttgtggcaccaagcacgctgcgggctgagccacaggcctgcgtcctggctctcgtttgttttgaaaacgtgactgacccatcactcctcatggggaacttttcctccagggaccgtcaggaccagaggtgtcccaaccttttcctgtgttttggtttggttttggttttggtagagaatgagaatgctaaggctgctctgtgaggaggaggtggtggtgagagggtggcgtggggggaccacagggttccacagcccacagcccagctgcaggtcagggacatcagcgcaggaagagcatgccaaggccttgtcttgcagcttcctcactccctcgactgagtgacacacctgtaagcactgaacgctggtgacggtaagggccacacagcgaggactgagacagtggccttgaagacataagaatggaagtgcatctctcagagtgtggattatccatttctgcatcgtatattctgttttcccttccttcattcttttgtctgccaaatttggggtcattttttccttcccagcattggctctacacacaaattataaagtaaaagtcaaaattaaaattagttttggtacttgttacagtaaatgttttgacagaaacagaggtgaaactcctaattaaaaatgagactggggattactcaaggtttcccctcttcttacatttcctccgtggagagttcatccattttcatgtcttcagtgaccacctgagtctcattcccgcacttgcctatctgcgttcaccgtggcaggcggatgtccacttcccagctcatgtctggactcagctctcctctgtccatcaaacccagccaacgctgaaggactactgattttcccctgggagaggatctgcccgtttaggtccttgctgttgcactccgagattatgccaacaacttcttggatgacatgactgccagtaagatttccccaatccaatctgcatgccacggtcagtgagtgtgcacaagaagccctttcacaatgacactgcctcaaccaaaaaccctcgggcatcctgtctgagtctgtcctgttttgcaggtctgcccaaaccagccccatcgtaaattacttctctaaattacatcctaaattactatgtcggctcaaactgtccctgccacctaaagtgccctccctggtcccttccatttgcatagggcccaactcctgtttcccatctgtaagtggcttctttctctgcaacccaaaccctcctgttcccctgctctgctgaacttccacagaactcagccaagccgccaagtgaacagagaataaaaccctgagtctgggtttccccagctgtaaaatggaaagctggactagatagccttaagctagttatgagctgtctcttcccaatcattatattaaagaacatctggaaggccaaacagttctctctcaaaaaggagcctcaggccacctgccagagccgctgcaggaggagctcctggacagatgctgggttgacacccccatgtcacccggctcacactgctcatgaatgtcacctgtacaaccccctatctccaataagatatgagctccttgggcaactgtcctgtgagagccacagttgtggacagtgtccacgtgagggagc

SEQ ID NO: 1885389 - DNA, 4001 bp, Homo sapiens
tcaacagcaccctgcaggattccacaccatcttttcaaagcacttcactaatgagctgccatcatttgtgcaaacagccttgtgagaaggaggaggttgtagctgttccatttacaaatgagaagagtgaggtttgaggaaagtagacgagttttcccaactgtgcagtaaacccagatagggctcgaagctctgagctccctgcacttgatcccatgagctaggttactatttgaaatgagactccttcagacaacgaattcttagattctgatgtcactaaaatggggtagaatgaagagagaaattccacaaatggagatagacttaaagcatatgatatacaacatccatggacttacatccaaggcaaatatgcaattttttttcacatggctcatggacaaaggctttaagaaaaataatagcagtctcaggaatcatgttcttcctaacaaacatgagcggcacactattctatgtggatgtaggcccaaggagtatttctgtatgctattctgggtccagcacaggatatgagtttaattggaactgttttaattcacatctggaattttccaaagaatagctcattgactaattggccccttgagttaacaaatggttgctattttgatgactgagttttttttatctgtaacaactttttttactccgttcagttcaacatacatttattgggcaagcaacaatgctggatattgggcaaggcaaggaaggatagagaagttggggaacaaagataaataatatgcagtctgttgcctccagaaacataaagcctatttgcataaataactgatttaattataaggcaaatggaatttgatactataaaggaggcaaagatatgcgaaggcagaggaagaaataatgagtgttataaaaggtaatcaaaaggggcaagaggcagggaattacaaggcttcatgaaggaggcagcctctgagctaggccatgtagaatgcatacaatgtcaataggtgaaggagaaaagagaattctaggcagagggaacaggacagaaaagacacagatggaagtagaaaggctatgagtgactaagttggaagtgtaggttgaggtcaggttgtgaaggaccttgaattgagttctgcaggcagtaaggagtcaccaaagatttttgagtaagggagccaagtgctcccctgccagcctgaaacaactgggttacttctaagaagcaatgaactattagctgatgtaaatcatgctatttgggggcctctttgctgcatcagcttagccttaccctaaccaataaaaaggccctcattttacaaatgaggaacctgaagcttagaggagacaagtgacttaaccagcatcatgttaccataactctaccacgtagaaccagggccagacaggaaatctgggcctagatattccatagccccaaaagatgtgatgatggtggcggtggtggcagtggtgatggtaatatgatggtgatgatggagattttttgttttcgataaactggtgtttcaaggttttgtttttatacctcttctttacatttttctattttttaatgtaaaagcatggaacagattcgccatataatcattttaatcaattttctgcggtgataacttccctgcaacttaattggcaaagttgtttcccagactaaaagtactatggcatcatctaaaagtcacctcaaagagacagaacaattcattaaaaaccactaatgtctgcagggtttaaagatgttaagtgttcatttggagaatgagaaatcaacgcacattgacttttgccatccgggtttgtcacgctctgtgtccgtgggatgactcacattgctaaagcccaagtttaattaacatgcttattctgtgccgctacttccattctaacaaattaaatgtttaaacagccagtgcaaacatttagatctgagtcaaaattgtttgcactctgccagtttaggcatttaatttattataatcctttccataatatatactttgaaagtcattcttttgcactgaaaaatattgttagtatttcaactgatgctattgaatctgagactatcagaatgtgacgtgagaactaaattggactgcaaataaggccaataaatgagataataaatgaatcctcatctatcctaacttcctcaattgaccaagtaataataatgacaggtgccaactcaggcctgacttttgtcccataatctctgctcttgtggagagatgctataagatgagacaaggatcttgcaaagctcgtaaacatttcttcttaagagcctttcctggattctgacctcttcctccctgcagatgttttttcaacatacagaattttgctagctttcaacaacttccccttccctgggctaaagaaactgaaaatgcaatggaagagaaattataacaaaagcttcattgacgcaatgctgactgcactgataaagatctcaggcaagcagccaaagaagctagacagagagaggttcccaaggaatgaccctgtttggccccaggtgaccacaaggtggcagtgaaggtcttcttcaccctccccattggcaccaccctcccaggccccgacccccaggcactgtgcctcttccccactgtctcccagggaaacaaatggatacacccagatctaaaaagctgacacttttacatttttaataaagataacttgtgttttattgtgaataacatggaaactggaaaatgattgaaaatttcccccaatagcccttgcttgaagaaaatggagcatggcgttggaaccaagaggaaaatattgtagagtaatagatgctggtcatgcaaactcattagatctcagcttcctcatctacagaatgagaggttaggttcctctcatccctgaggtttcttccagtacccttccagagacaatagcatggatcaaactcatcaaccaagggagaggggtcagtttcaggagacaccaattggtttgttactgtgtgctaatcaaggtcacgtgccactgaaaacctgaatgcattcactctctgattcttcaggcttccatctcctgctcagaaatcattcaaggtcttccacaaaacattccagattgtttatactttgagattgaattatatagagtcaagcttggtcagattttataatgaagctatatctacccaaaaattggctggtgaaggaaaggaggaaatcgttgaatctagccaatttgttgtttctgaaagcaatcaactcagatcaatccagctttgtttgtttttccaaataatgtaggtcatttagacacacgatagggctttctcctagagccacctcaaggaactacccattcaaaagggctttgttaaatgagaatggatgcctgcacctcaacacacgctcactatttaaatgccaggagggttaactgagaagtaacagacaaaagtcttcccactgaatatctatgctgaggcatttttaaatgtttttaatgtctaagggttgtaattaagtgaggcattaattagcttttctaaaccactttttaaaaagttaatcataattagcattaattaaatactatgttccagacaatgtgttaagcacattatatgtattacctcatcaattcttattccaaccctataaagaaggaactgatacttccccaattttatagatgcagaaactgaggtttcaggagatgaggtcacctatccaggttcacacggctgaaaaccaggtatgcatgcctgattgcaaagtcccagctctctctttttttttttttcagacagagtttcgctctgtcgcccaggctggagtgtggtggcaggatctcggctcactgaaagctccacctcccaggttcacgccattctcctgcctcagcctcctgagtagctgggactataggtgcccgccaccatgcctggctaatttttttttttttttttttttttttttttttggattttt

SEQ ID NO: 1885390 - DNA, 4001 bp, Homo sapiens
tgctctcctataccagtgcatgaagacagttgatttttctagtctttttacgcttaatctggagtgtttgcaagaagatgggttcttcctgggctccagagtgctatgatgctgtcttgtgcctttgccctgccctaagcttccagtcgggtgtgcgggtctccagtgctgcagatttggtttgctctgaatggcactgtgtttgggagaaacttgatttgctttggaccaagggtgcccgggctccaggccatgtttcgtgggggcggtcttgtgaggaatgctcatcccacatgccctgcagggtcctcatttaaaaaatgggtagaacctactgttcctgcctcctggggttgccgttaggatgaaaggagattaacccacgggaagaggtgaggatagtgcccggctcccggcaggaagtacccagcatccatggtccatgttcttaacctgcattttatcatcttcccctagtgggggaagatgctggtgtatttccatctcacgatacagacctggggaacagcaggtgtcaacactgttattgttcaaggagattgctctttatggagacacttgcatgctttaggattttcactgagtaagcatgcatataatgctgactctatatggcttccagaattcaccttaaaagggtcttacttgatttaatgttaagttctaggtaccatcaatttctctgaagtaagatttcaaaaggaaaaaatttagtaagctaattcatctctaataagtcaaattcttagctttctttattctatctctctctttcttttaaaaaattcaatgagtagctggcttaggcacaatttaaatggctcatctatgccgaatcttgtacccgaggtcaaccaatgagccagggtcacttgggatccaggccaagatccccattctctgttcgtcactatgagcctaagataaaaattcgtgagtcctgtctaagcaacaaggcttgtagtcctcctatgtatcaaaagtgctcttatcatattacaaacaactaacatgctgagattataaacatccacaaacgcggacttcctccagtattctatgtgatgtcatctggcccttctttcatatccgcttttattatgctcctgtcctttcaaaacagactgtgtgccacagtacaacaaaagccaggaaacgtcggccctctggcagcgagacagagctggaaacaaggagaaactgataaagcagaaacacctccagatggagaagtaaagaatcaatcctgacacagcaactcagcctggcgtctttaaagccggtatccccttacgcacacctaaggaaggctcctgctctgctcctctcaaagtggagttgttactgagttgttttcatcagtgcaggtggacattccccagaaaacgtcctctagcaaacacttctgagagtctgctaagtgctaagatctaaaagccaataggcaggccccttgtccttgggagaagacaagccagtggcagaaatcaacagccctgaacagtaaatccttaacaacacctaatcagccacaaactatgtacacccaacctaaggctcgtgagtgagtcccacagccacccttagtcactgctccataggggctggacggccagcagctgggatttctggctatgggtgggaacatgacagaaagcagggaacacagagctttgtgcagggcggtgttggtctgacactctactggggagaagcccgtcgtcccgatgacgccacgcgcttggatgtgttttaaaatggggttctgatgcgaaggcagcgctggccaccgacctgctcagtgaacaccggaagtggcgggcgggcttctttcccttctctgtcgtgattcagtgcttcctgtcacccccagcacacccctccccacccctggggaagccactgccaggaaccagctccctgacataccataaacagtcaaacactgacgacgctccctgctgccaggtcactgaaatcttttcccttaatagacaatactcctcctcctgttgggagcaatccacagacgccggaacacgagtcagaaaggaacagagtcctctgaagtccccagaatcgcatggctgaaaacgccccgagagtacccaagggtcacactcacacatgcagagcctgaagcaagcgagaagctggggtttgctctcggggaacttaacagccaaggacatagagtgagctcgagaccctaaagactctctgtccctgtgcagttctttgtgcttcgtaatgtcttcatgagctacaggactgctctcctttcttccgcagctgccccaaaagactggatctttctgcccctgggctaggagaagtacccttcagaagatgctgccaaaggaactccccaaggtggggaggggatgaaccttaaacattttctttctacacttccactcttctcaagtcttctcatcctcttcctttatctctttttgttcttttacatctttagaatgaagtctttggaaaggtggatttgctgtatttgtagtcagcttacatgaggaccatggccatatctgtggctagagtaaattgtccttggctgggcgcggtggctcacgaggtcaggacgtcaacaccagcctggccaagatggtgaaaccgcatctctactaaaaatacaaaaattagccgggtgtggtggcgtgcacctataatctcagctaccagggaggctgaggcagggaactgcttgaacccaggaggcggaggctgcagtgagctgagatcaggcactccaacctgggcaacagaacaagactacatctgaaaaaaaaaattgtcctcttagactggactctgcaggggcaccaggtgcccattgggtgagaggttctcaggctctgtgaaccaggaggcccatttattatccactctacctgtcacccaccctcaaggattcaagccattctggcaatgtcataaaccgccaggatgaaccttcttccttccaatcagtgtaaacagtgttactgttctatactgggttagttacaggatacattatgagtttatacagcttcatggagtgccattgttccatttctggaatgcttctgaagtgccacagactgtcattatttggatggtccaggttagcaactcctcggcaccgagcacctctattttgactccttctttgattttttcctcccaccaagtttactgagcatctattatggtcccaggtattgtgctaagactgaggataccaggttcaaagatcagatttccagaactggaaaagatgagcaagatgattaattctgggagatcccagtcttttattaatgaagacctacttttgactctgtttttgttttttttcccctatatctgaggcttgtagagaaaggggctgtgctgctggaggctgaggctgacatgcactccctctggctcagtcctcacaattgggtcggaggcagtaaactcgtttgagactgaccggccaggcttccaaggtcagggaagcccctgctcccacgacattcttcccacgaaaactgggtgctacagagattttagggaacttccctaagatgaagccccaaatatgcaagcaccagtgattccctccatccaggaatctcatcacgatgctattgtgataacatgctgcccctcccacacctactgtccatcagaattcagtcctcttttctctaaacgaaggctttctgcacaaaaggtaaaagaaatccaactgtttggcccatttaaaatcaagtcactgaagtttctctgagctcaatcacactcttcatctctgaggttcatctctgttcttaccacatgataacgtgaaaaaatagtttcttaaagagctggccccatcatctccagaaatgatgttagggaaggtccgtggaaggcacaggcctgcagtactgaaggcagaggcataactgccaaccacaagtcactgattacaatccaagagcaccattttc

SEQ ID NO: 1885391 - DNA, 4001 bp, Homo sapiens
cacatatcatggaactcataaatgaaaattttcaaagatagaaatgacaattaaagagtgaggattttaatatggaaacccacaaggtgtcatatttcaaacccgcatgtttcaaaaagagactcttaataatttagcacaaaatcaaattatataaacttggtatattccagaaaatattgctttaaacacttatgccatgatcaaaattcctttggtagcttttaatcaaaatgaaacatgctattatgtaaaatataaagtacttttaaatgttatctcaaaagtatctttgtcatagttacccttctaacatcactactgaactttcctttcactgttcaacctcatgtatatatacacaacacaaaaccaggtaccaacaaaatccttttaatctttccacaaaataacctctgcttcacaacatcaagactttaagtctccataaactttttacagtttacagcagagaacaaggatcgtccctgcgcatgactgtaaaaaccaaaccaaactttattattgcaatcacacaaatactgcaattaaaaaaaatcaaagagcagttaccccaatgcaaaaaaacagggactgccagactcaatcttagaatggaaacacaaacacactagccccaaaccctaaaacagagattcacaaggaactcagctgacgaacagacgcagcagggcggacaccatggccttggcacctcagggagctcacttagaaacctgacttacgaaaaatcagccatcaaagtttacaacttttggaaatacatgaaacagagaggggccagtggctagggtgcgtcatccattcgccagctttgaaccctggctctttctaatgttcacccatgaagggcccttgttttcactctaaatgctgatcatctgagcgagctgtcttcagggatacctaaggaatcttcagagctaaaaaatgcagcatctagggtcttcttcattgtgcactcatgatcacacacgagaacaaaccaaacttgcagctttttgacacaagaacaagaccttttaaaggaacttctctttagtaacatcttcttgtccaatctcaaagttattttgcacagagtaacagaaacaatttaaatgcctaaaagaactagaggaaaaactggagggaaaaagatacatctgcaggttgaagtcttgagccttgtgaaagatgacccaggagccacctcccttccttcgccttccaatgtccacagctggatcaatcagagtcccagaaatggcacaggtgtgcttcctgctctgagggtacattctagtgtttcatgaaggggaaccgtctgcagatgcgtcaggccacgtagtggtactgattcggattgtctttgtctctctccatatagtctctgtctatcagagattcaattctctttttcaaatctccaggctaaaaaagaagaataaaacccccctaattacaatggcattaaatttacaaacatttacatacaaggggtatatgcatgaagtatgtaactatacttatagaaatatatatacaaatagatatttatatgaaaatcatttataattatacacatatttatgaaatgaacaaaactttctattttaaagacaaagttaacgttatctcttgataaaaaaagcgtccatgtgagtttatggtcagagtgtggtttcctgagggaaacgtgaaacttgtgaaatgtacatacatcatctgccatcagtaagggcacgtataagcgaggcagatccgacatctgccatcagcaagggcacgtataagtgaggcagacccgacatctgccatcagcaagggcacgtataagcgaggcagacccgacatctgccatcagcaagggcacgtataagcgaggcagacccgacatctgccatcagcaagggcacgtataagcgaggcagacccgacatctgccatcagcaagggcacgtataagcgaggcagatccgacatctgccatcagcaagggcacgtataagcgaggcagatccgacatctgccatcagcaagggcacgtataagcgaggcagatccgacatctgccatcagcaagggcacgtataagcgaggcagatccgacatctgccatcagcaagggcacgtataagtgaggcagacccgatcacgtgacacatttttatttgaaaggaaaatctcaacatgtcttactggggcaacttttatcctttgaaaggatgcttctgcctaagtagtgtattttattttgtttatttattttgagatggggtctcattttgtcgcccaggctggagtgcagtggtgcgatctcagctcactgcagcctccacctcctggactcaagcaatcttcgtgcttcagcctccccagtagctgggatcacaggctgcacaccaccatgcctggctaattttattttttgtagagaaggggtctcactatgttgcccaggctggtctcaaattcctgggctcaatcaatccgcctgcctcagctcccaaagtgctgggatcgctggcgtgaggcagtgcgcctggcctgtagttttattctcgtgtatttacatagttattgcatgccatgtccacgtaagtgaaactacaatccccagtgttcctgcactaagagtaggtgactgaggagacgaatccacagccacagcctgtctctgcccagagggaacagccactccagctctgctgtattaggaagaaaatctgtgtgagcacttacgtgcaaggctctccctatacaagggagaccctctattttccaaacaaacttcaccttctattcagtgataagccacacattttacaagatgtggctgaggctgggcgcggtggctcacgcctgtaatcccagcactttgggaggttgaggcaggcggatcacgaggtcaggagtttgagaccagcctgaccacacggtaaaaccctgtctctactaaaaatacaaaaattagctgggtgtggtggcgcgtgcctgtaagcccagctactcaggaggctgaggcaggagaactgcttgaacccgagaggcagaggttacagtgagccgagatcgtgccactgcactccatcctgggggacagcaagactccatctcaaagaaaaaaaaaacccaactacccgagagcagagcgggcgccctggtctgccacactctacccctgagagcagagtgggcgccctggtctgccactctctacccgagagcagagcaggtgccctggtctgccacactccactcttgctcacctctgcttcgcgctgggcctgattgtttgcagtggcaacaggagacttgctccagctggtgggaggaaggggcagtgaacctgatggtgcttttggagcttcccagggccctgaggacggcacctcacctctgcagggaagggggcaaatgtgggctgatggacagtggcacttccaccagactcttaagtgttcgactatttagtgcatctcaactttattcccttgatggaatgggaggctcaaactgcacaacatggaatctggggactttccctccaaagcacgtgtggccggtcctgtccctgagaggccaggcgtcatcagagttcagtatttcctgggttgataaatacatgtaaaaaacgtttcataatactttcccggcttatcctgcatcccacacgtggcaggacagtaaatctcagttctgaaaacaacgcgggttgacaggcctgggctgactttcataagcaacagcaacagtagactattaccgtggtggaaaacgcggtgtaggctgtaaacgctgagtaagttagttattgttatcatttccttaaaatcttgtgatgtaaccttgaccgctactactatgagaaaagtgttcagctttccatgtcccatctacctcttcccttcctgaaaatatgaacaagcgcgcaccatccctgggaaggagagttttagggctctatcatttctgcagtggcaatgagcaacacctgg

SEQ ID NO: 1885392 - DNA, 4001 bp, Homo sapiens
ttttcttttttcttttattttgttattattatactttaagttttagggtacatgtgcacaacgtgcaggtttgttacatatgtatacatgtgccatgttggtgtgctgcacccattaactcatcatttagcattaggtatatctcctaatgctatccctcccccctacccccaccccacaaccatccctggtgtgtgatgttccccttcctgtgtccatgtgttctcattgttcaattcccacctatgactgagaacatgcggtgtttggttttttgcccttgtgatagtttgctgagaatgatggtttccagcttcatccatgtccctacaaaggacatgaactcatcattttttatggctgcatagtataccatggtgtatatctgccacattttcttaatccagtctattgttgttggacatttgggttggttccaagtctttgctattgtgaatagtgccgcaataaatatatgtgtgcatgtgtccttatagcagcataatttataatcctttgggtatatacccagtaatgggatggctgggtcaaatggtatttctagttctacatccctgaggaatcgccacaccgacttccacaatggttgaactagcttacagtcccaccaacagtgtaaaagtgttcctatttttccacatcctctccagcacccgttgtttcctgactttttaatgatcgccattctaactggtgtgagatggtatctcactgcgattttgatttgcatttctctgatggccagtgatgatgaacattttttcatgtgctttttggctgcatgaatatcttcttttgagaagtgtctgttcatataggcatgggcaaggacttcatgtctaaaacaccaaaagcaatggcaacaaaagccaaaattgacaaatgggatctgattaaactaaagagcttctgcacagcaaaagaaactaccatcagagtgaacaggcaacctacagaatgggagaaaatttttgcaacctactcatctgacaaagggctaatatccagaatctacaatgaactcaaacaaatttacaagaaaaaaacaaacaaccccaccatcaaaaagtgggcgaaggatatgaacaggatccctgctttctttctcctcttttttgagatgtttcttcattttctgggtttgagctataagctttctaaagatgacataggtggagttcagcaaagagagggaggaaatgagtgttcactggttggttgctgcttcctctgtacctgtggcccggccgcctgcatgtggtgcctcttctcatccccaagaaaaccctgcaagagtggtgggcccttagcctttgctgttttgtacatgatgtcccttttgtctgtgatgttccttttgtccatgatgttccttttatctgaaattctttttgatttctccctccactcaccttccaaatttctactccttttcaaagcccagttcaattactatttcttttgtggcatctgcctgaattccccaagccccattaatccctttgtctgaatttcatggcacgaatgtcatccttctattagattatttaccacattacagtacacagtgtagtttgctaatttccctccctgtcccctaaggttgtctttggggtgctagaggacaagatgaggtcttatctctctcggcatcctgacatctatcacagtgcctaacccatagcaggtgtttcacaaacattcctttatcgtgtaatagctagcgtttgttagctcagcgcattatctcaggcagtcctccatataaccctatggagttggtcattatctgatgaggagagtgagctttgaagaagttaaataaattgcccaggaccacacaggcagaatcaggacgttaaccagcacagactgaatctcgagtccacactgtgctgcatggccaccctctggaggcctgtgatgtcccctctgactgctgccctacagccagcagagacgatcactgaacccaggcacttgcacagcccaatgctgaagaaggcaggtgtggatgcatgaatgaaaggtgaaggagcaagtgagtaaacccactctctgagtctttcatacaatccagctttcattcctgctcattcaccctaccctctgctcctcccttttagtcccctaagtacccctccagccctgacctcccttgtctcacactgacttcctgcagcacctcattggtgggttcctcaacccacagcctcttttttcctgtctccctccctgtgccccacaacacatacaacacctaaaaattaattctcaagccctgttgtcagatccacactccaggattgattttggcttctgactcattgttgagtaaaatctcagcactcaaggctaactgtcatttccctacatgtatctatcactctaaaccaagcagcgttgttgactgcccctggcctgtgatttgcctgtgttgcctccagatcttttcctgagctattcttctgtgttttgaacacctgtcccatatcaggaaatgagctgggttctgggaatacagagattaaaacttcagtctctgatgctcctagattagtgcaagacagctgaaagagcaataacaaagtcccatcactatggcaggtgattcagaggaaagcccaggttgctatggaagcacctaggtcatctaccttccccatctccaataacatcagccctcagagccttctccgtctgacccgacttacctctcctggggggctttctgtgcctgacgcttcatctgctcctctcatttatgccaaattttcagaatatatctgtatttgttgatttattcatctgcaacaatatatttgctgaacgtgcctcctcaactggtgaactgtaatgggggaggagaagacaaaagaaggccaactggaagaaatgaaaatggtgtgtctccttaaggaggttggatcccagagaaggaagataatgggagagagagaggtgtggcttttgttgggcttcctcctaactatccattttggtgatggctgagtgtgtcctgaagagaaaggattacatgtaactcaaacctgatccacaaaacttctgtagtccaagcaacttcgtgtgagaccctttaaaagagcagaccacaaagttaggatgcagtggctatacagccgagctgaccactgagcacaggagacagagccttggaactctcagagatactggggcggggaggggctcgtattgtgaagggaggaccaaagtcccacaggggcatgcagctgggcaagcaaaatctggtctgcagtcgtccgtctcacttgggtctaaggctaatgaggcctggggaacactcacaaggagtctagttatggctctgtagtagtttacccattgactgaagcaaaacagtctccacaagagatcccaggagaaacagaacagctggccaggctcacctagctggtcccataacttttcccaccatcctgccaggcaaaccttgtcatctcagcacctggatccaagacactttgctgccatgtttcctcacatctcatcctctctcccttcctagtcagaattccacatttgtcactttctgacctgcatttgacaacactcaatgttgtcttatccaaacaacatctatgattcagccttcttgccctcaagtccagcatgttcccctctggctccaagcccctttccctccagccttttacaaccacatcactccatgtaagtcacttgtcctttgaaccagctgatctgtgggctgaggaaagggtgctgggagctgagctgtagatgttctctttgctgtctgtcattctaggggcttgccaacattgggcagagtctcctgctggctgaaactctctcaccacaaaggatttcattttatgtcagcagtttcataggctgagggagtgatagagataagagaaacatgaagagaatatgccacaatgactaaactcaagatagatttggggcagagatgtaga

SEQ ID NO: 1885393 - DNA, 4001 bp, Homo sapiens
ggagaaaagccatttaagtctttgttattaaaacatatttgacttacattttagaatatttaagaaatcatccagcaggcttcctatcacactgttccagtttttaaaaaaattgctagtgtatctccccaaaagcacaccattttgcaaactaccagaccatgctgtattatgaaactttttttttttttttttttttttttttgcgtttaagtcttggtcttgcgcccaggctggagtgcagtggcaggatctcagctcactgaaacctccacctcccaggttcaggtgattctcctgcctcagcctccagagtagctgggattacaggtgcacgccactgcacccggctaattttttatatttttagtagagacagcgtttcaccatgtcggccaggttggtctcgaactcctgacctcaggtaatccgtctgcctcagcctccccaagtgctaggattataggtgtgagccaccgtgtccagccggaactttttaagcatagtttgaaagccacgtttgtcactaaataaccaaaaagacacaattattaggtctccttcaattcaaaaagcttaagaactctgctaatgtacaatttgatttccattttataaatcactgttcatttcacatcctgaaaatttatgttttcatcaactccagaatgatagaattcttacctttctattcaggaatccaaggctaagttccttaaatttcttaaagaacacattagaggtgaaaacttttgttagacttcagacaatatttttaaaagctgatttctagatttattgggtggtctaacctagtgttatggaagtttatttcttattactaagatagcctcttttactccaaaatacaatgacatttctcaaaacttatctttcaaacatcaagtttgcctgtacttcagcttgggcccaattttaccacttggtccttttaaatctattattcaggtatcccacattattctacacaaatacacataggctagagacaaaaacacatgaagaaaagagagaaggcagaaatgctgggtaaaacactaactgccacttcttagtttccacttcagtgactttaagtcaaataagcctggaatcaactatcactgttgccaaagtctggcttacgtagggagtagggaacataaatgttaactacagacttagaaataaatgaatatctgaatctcaccccaccgctgcactcttggcatttgggaagagtgtacacatacatttaactgttactctatttagcatttgttctttttctaactcccatttttttaagttgcagatgctaaaagcagtctgaggaccttggtcatttatagcttataaatcactgacaatcagaaagaaaaactagtatacaagcatttaacagttacacttcagttactcatgtattggtaaactggtacttgcttaatagaaacaaattgtaccccaaccctaaattccatgcttaaaaaaactcatctttacacattgctttaaacagagcggcattctctctaaatttaaatacttgagtaatatatgagcaacataaattaacttttagattaagtaaaatatcctggaataacactaactccaaagaaagcaaaaagatatactctaactttacagatgatcatcaggtatacagtatgtttagtcatatcgcaatacttaacagccaaataaatctaacaacaaaaaatatagccagaatttatactgccaaatctgacacgcaaccccaaaagtgaaatgtttttgaatgaaaacaagacaagatgtatttacacaaaaagttacacattttctttaatatttcatgtatcttgtacatttaacagtggaagtcgaaatcttcagtaatatttaattttcaaaatcttctggtcacaatccccaccaaactcaacaggccgggacaagtgcaataccatacagaaacacagcattgcaaccgatcccaacctgtgtagaaaggggtttgagtttcccttacttttctacagacttttcactaccacagtcagttttgcatggatttgcacagcagaatatcacacagctggatgcaaacctgcaaaactaaccatagaacagtgttcagtaacaggacagtttgattgggcgacaggccgaagctggagttctacagctagcagtactttaagtgctcataatgcagtagataactaaacactacctgcactataagcactttagtgctacagaagctgtcacatcagatagaccaggcagattctacatcgacacaataaaagtacacaaaattagtaaaaatcattcatttgaaggaaatagcaggccaccatcagttttgcatagatttgcacaactacattcttcttgtagtgcaactatgcaaaactaacagaggactgcaaacaaaaactattaaaacacctatatacttgcttggcttgaattattggatgaatacataacttcttatgccagaaggagcacttagggcagtagatgctaatctacttcactatctgcactagatgcaccttagaacaaaaagcactcaacatcagcaggccctgcactttaaagcccaacttggcttcccgaggcagctgtcaccataatgctacaagtgccttcactgcagtagatgcacatatcactacctgcactgtaagcactttgacattattctgactggtcacaatcttcagttttacaaggtgatgttctcttttttcctgctaaatttgaaatagataattagaattaacacctcaaactctaacaactataaaccatacaaattcagcataatccctaatggggaagaaaaaattagtttaattatctcaaagatatgaggtccatttagacacgtatttatgccttaagaattctttacagaaggcaatcataaccaaccatccaactagcactggaagtggtggctcttccaatggctggcctctcccaaatggattgacacatagagaaaaaaaacaaaacaaaatgagactgcaaataaatgagaactaattttggaacatttaaaggcaatttagtccatgtgtaccttttagaggaaatcttcacatccacgtggcaaaacattttcctcctcttctggcttccacttagcaaatacttgttgaaatgattaacaaaattactgttcagactacacttcaagtgttatcagtcaattgtagcagaacgtaaatatcctgtttaaatctatcatctcaggttatatctactttatcacccaacttaaaagagggtctaaaattatatttcgtaaactgcataagccagtttccaaaaatgtacaggaatatttacactgtaattttactaccttaaaattagcaaatccgtacttaatgagttagtttttcagaaaaggtacattgtctaaagaaagaaacacctacttttactctctaagaaaccaatcctatttattcaactttaatagcaagaaaaatttgtttttaagaaaagttcaagaaaatcagaatacacttacccattccagaaaacttccttttcagcaagtattctcagaaaagctactggtgcagttaggtccacgtgtatgactggaatagggaaaaataaggaaaaaaaagataaaacattatttgctcaaaattactaccaccgtccaaatctatatttgctattttccaacctcctaacagcaattaattccatccatttgtgagagtaagagtcgagcaatactagcaggatttaaaagcccaataatttacagttgaaaaatacgtaagagaataaagttgaaaaatccttagctatcagatacatgtctaaataagctcctaaaatacttgattatgatcagcagcaatcaccgactccactgtacagctccagtaaaaggaaaaaaaaaaagcagcccacagactattcttcaccacccctcccccaatcaagacctcgtggctgcaagccgggataaa

SEQ ID NO: 1885394 - DNA, 4001 bp, Homo sapiens
cataggtaacatagctactgtactcgggaggatgagggacaagaaccacttgaacccaggagacagaggttgcagtgagccgagatcgtgccactgcactccagcctgggacacagagcaagactctgtctcaaaaataattaataataataataataataataataataaataaagttggccggggacggtggcttacgcctgtaatcccagcactttgggaggctgaggggggcagatcacctgaggtcaggagttcgagaccagtctgaccaacatggagaaaccccatctccactaaaaatacaaaattagccaggtgtggtggtgcatgcctgtagtcccatctatttgggaggctgatgcaggagaatctcttgaacatgggaggcagaggttgcggtgagtcaagatcagcctgggcagtaagagcgaaactccggctctaaataaatagttaatactaaaggtatttttacagaaaggtggtaatcaggggaatgaatctcacatataatctttactaccgtgttttctttcaagactgctatcataccacagaaagcaatctacattataggaaaaccatgtataaataactccataacactaatataataaaattctaaacctaacctcccacctgagtttgtttccactgacagcatcgcatcagtacttcaaatgcaacaccttcaaaacgacattcaagacgtcccctttcagactgactttccatttttcacacttctatattaaaatgcccctgacataaacagattttttttgtttgttttctaaaaactataacatatgtaaaaatctttctcaaccccggatctgcattcttctgctaacattaaggataccaactccaacgcagccagttgaaatctttgctctctctgaccaccctaccattatcccatgatgtcacatccccttaattctacctgggcaatttttctcctccattcagctggtccttcccatcttcactgctactaatctgcttcagcactgtacttaaccaaactggcttctgagtgttatgcatggaagttacacagtggaattaggctttcataacaataaagtactcggaggataaatagcaaaaccaagtatgctgcaacatcttttctttcctggctaatttcaaccagtggtccttcagatttcatcagacttttcttccagaaaggatatcctgagtcgcccctgcaatggttaggtgtccctatttgctcctctagcaattacttgttgcatgaatagtgtactctgtgcttccatacactatctcagcaattacttcactacacagcacttgtattgtctacttgctggaactacaccctccgtgacgacaagactgtcttacttggggtttatgaccagtactggcacgctgtaaagttttccaataatgaacgaaagaataaacgaaggaaacagaaatgagactatcaaataaatcttgggaagcaaaagctaaaacaacttcgcttttggagcttggataaactgacaggagttgatgacaagacgaatgaggcacagcgaccagcttgtaatcggagcactgttttccaggcacgctatgatcttgggcaagtcatcttatctttctgggatttttcttttctcagatgtaaagcaatagattctaaaacccagcaggtaataccttcgaccccgggaagtcggaggataactgaatgtacagcacggggcacggggatgcccgaggacctgcggggccaagagcgctgaactgcggtacctgaccgttccatgccgagcagcgagtagcaaaattgcagccgctgatgtctccgggcttccacaggacaaagggtggcaggaaagggtgctaagaggtagaaacaccgagactctaccaacaccgcggaaacacaaagccaaccaggagcgcaactgtaacagtgcgtccccatgccaaacacatcccccgcgctctcctccgtttccggtctggcttgttcccctccctttgctttccggtgggcaacaggggtgggtaactgtgttccggactcgcccgcgggccgggcggagccagctacctccaggcgaccctacccaccccgcgattctattcctggagactgagtcctcgccagtgttcagcaaggttcgctggcctaggaggatcctaaaccgccgagaccgccgaacgagatagtggagggcgtgatcagttgtgcaaaaactacagacgcagtccgtttttaagttgtttttttctgagacggagtctccctctgtcgcccaggctggagcgcagtggtgcgatctcagctcactgcaacctccgcctcccgggttcaagcaattctcctgcctcagcctcctgagtagctaggattactggcgtgcgccaccacgcgcggctaattttttttttttaatttttttgtacttttagtagagacggggtttcaccatgttggccaggctggtctcgaacttctgacttcgtgatctgcctgcctaagcctcccaaagtgctgggattacaggagtgagccaccgcgtccagccgatcagtctgttctttaacagacacttactgtgcgttgtttggagggaaagggtctatagcgttcatcacgttctcaaaccaaagaggtttaaaaaaattaccataggacctgctgcccgatgaaatagcgtttcttttcagtctttattcttgatgtagagtcaaaataacacttaagtttcatttttcacaagtgattttaggccgggcgcggtggctcacgcctgtaatttcagcactttggaaggccgaggcgagtggatcacctgaggtcaagagttccagaccagcttggtcaacacggtgaaaccccgtctctactaaaaatgcaaaaattagccgggcgtggtggcgcacgcctgtaaatccagctactcagattccccgcgggcgcgcgggaggccgccagcccaggccgggggagttcggccagagccaggtgcagggaaccggctctgcgggagcgtgggtaaaagctgacgcgctctcgcgagttcccacttagggaacttaaaggagagttttaatttgtcctccctgccgttcgggggcgcgtgtgcctgtgctgcccgactagcccaggatgtagtgagccccgcggctgccgctgcccgcttagacccaatcagagggtgagtgggaggtgacaccggtcagcctttcccgcccctctgtctcctgctgccgtcgggaaggcagaagccgcgaggcaggccagtggtacatggtgctcccggcttaactgcaccctgcatggctccaagggctggccaggctttcgtgtcgcaggttcccgctaagtgcaggattcagatcttaccatggttctttttaatagtgaggagttgtggccgcgcgcggtggctcacgcctgtaatcccagcactctgagaggccgaggcgggcggatcacgaagtcaggagattgagaccgtcctggctaacacagtgaaaccccgtctctactaaaaatacaaaaaattagccgggcgtggtggcgggcgcttgtagtcccagctactagggaggctgaggcaggagaatggcgtgaactcgggaggcggggctggcagtgagccgagatcgcgccactgcactccagcctgggcgacagaggaagactccgtctcaaaaaaaaaaaaaaaaaatagtgaggagttgcctctgtgctatgtggagattaggagggtgttgtattactcttgataatggagcttgtgctttcgacctgtgaggactcaaaagttacgttttaatttgatcatgaacatacacaaagcaaagtcttatggatattaaaggattatttatatattctaattttcatcatagtttaaaaatagtcataaagagggccgggcgcggtggctgacgcctgtaatcccagcactttgggaggccgaggtgggcggatcacgaggtcaggagattg

SEQ ID NO: 1885395 - DNA, 4001 bp, Homo sapiens
cacctcctgggactcatgggactcttctgaaacttagttcttccatctgtctgtcttttctgaaaccactcatgatcatttgtgtaagcaccgaataaattagaatcacgccaagggccgatgaaaggttttttgctctcctgaactgtgtagcaaccctccaaacagtgtgtggggtgggggcgggggaagcgggggcctgtgtttttacagtgtgccatggcctaagtgacacctgtaatggagcagaaagaaaagatatttccttttttaaaccagtgatttatttttccaacagattgaaaggttttggacaaagattccatgaaaacctcctataaacaggaattggacaattaaatactgttgtaatcagcctttctcctggtgggttcatagctctgagcttcaagtaaatacggtttgatcaagaatggcctttaaatgggagtgagccattgtgcaccacgtccgttctcacactgcgatgcagctttcctaatgccatgggtctgctgtaggttttgctcagtgatatttgttttagtggatgaagttctcatttaccataagagagagaagtcaggataattgtttgatgaaattatagtatgcagaatgggaaaccacccttttttaaaacaaatatatcctcacgtgtcaacttcacagtcaggcttcctttcttggggagagccctttctccattcagatcaaaggttagcctgtgaattctcccccagagaaatgtgggagcccagaggtggctgaatatgaccagctagaagcaatgtcttcttaactgggccaccaaggagcttcaagaccagtgcacattttctagttcagtggttttcaaatgccaagttttgatgcattattagcttgtgaaataaatgtagtggcctctaactagcgttttgtaaaacaaagtaaaatagaggaaacatttttaaaccagatttttccaaatggaaggggaagttttgtttttgtgaaactttggttttgggtatggttgtgtgtgggtgtgtgcactgtgatattgtgtacaatggtgatttttacagtggatcactgacagagaatttggataaacaccgttgtagtgcatccaggagagatttgcaatcatagggagaggtcgttttagacaattactcctgcaagtcatacatttgaagttaaaacaacagccacaatgacaataacaaaaacagtaaacctggtaggcaggcaggtgaggggtaggggagggggtcaggaaacatgaaaatgaagaatcctggactggactggctgcactacttgcgattaaactgctagacgtgttcctgcagctgggaggcagcagcccttcccaggagcaccacattgcctgagcagaaggtccaagttataatctggtgggcaaccttatgtttaaaaacagacacacagacctgccagcctcacctggtattggcgagagaatcctaaggtgttcgttgctagtcttgcttgggggaggtgaacacaaaacaacagtgcattagaaagagcctcgcctttggagtcagacagacctgggtctcactgttagctctgccatttattagcccttgggcaaaacgtttcatatttctcttagcctcagtttccacatctgtcaattgggcataaaaagatatacttcataaggtggctctgagggttaagtagagtagcctatctcggacagcctaataagtattcgttccctccacttaccttgtgtaccgtagctccccctgccactgggaaacagaccacctcgtagggaggacgcttttcttttcctttgccgtcatcgctcatagcggtgcaagcgcgtggacaagcagtgggaaggggatggtccaggagccacactcaggactctaaagaggtacctcaggcagtgatcccctgcctggagttggacccccctacaaagagccaggttgtggcagtgacctccccgtgattccgagggctgccacatcaccaccaaagtccagctctcctgcttcggcacaaggctgtgacttgtcattgatgttttgggtcacggaccttttccactcacggaattccacttctgttctccaagcagctctctgtctaaccagtaactgcgactctcctccaggtggaagatctcaccgccagccatgatgctgctctcctagagatggaaaataaccacacagttgccatcacaatcctgcaggatgaccacgaccacaaagtccaaggtagctcccagcctcgtgtgcagcaggcaggggtgggtggtgcaatccgagcctttcctgctgcagatgtgtggagccccccttcctctcttgtccctcctttcctgtctttccctcctggtgcattttttcctgttggctcctgggaaaagaagagataggaattaaggatccaggtagttagctgcttctttcctccaatgcagttatcctcaaccttgatgaatactggaattccccgtcccctggggagcggtaacaaaagaccaatgccagcctcagtcccaccccagggattctgatgtccttggtccatagtgcagtgtaaacatcaagatttcttaagactccttaggggattctaatgtgtagccacacttgagggccactgtctaaagcaggcatggaaatcgtgcacttttttttttcctctttttttttttttttttttttgagacagagtctcactttgttgcccaggctggagtgcagtggtgcgatctcagctcactgaaacttctgcctcctgggttcaagcgattctccagccccagctggagcctccagcccgagtagctgggattacaggtgcccactaccacacccggctaggctttatgatgtttattgccttataaaaacaaatggaagccccggcatggatacactttcttcatatttatgatgttctccgggccactgcagcatctggttggatcggggtatccagagcttacactcatagaccacattcaccgtgggtgtgcgttaagtctccagatctttctttctacatttttgtaactttgaattatctttgggttttacgtgggtcataacagcatcattactaagttccagtgagattttcctttgtgaaagaggcagcattttacactttcacatgcatttacattaatatgtacagtttatttttcaactttctctcgctttacttttccctcccagtcagctggttgttaaagtgtgtattaaaggccgggagccgtggctcacacccgtaatcccagcactttgggaggctgaggcaggtggatcacctgaggtcaggagttcaagaccagcctggcaaacatggcaaaaccccgtctctaccaaaaatacaaaaattagccaggcgcggtgggctggctacacgggaggttgaggcaggagaatcgcctgaaccctgggaggcagaggttgcagtgagtcaagattgcgccattgcactccagcaacaagagcgaaactccgcctcaaaaaaaaagtgtgtattaaaagcaatgacagttaacaatacattgataaacttttacaatttgagaattagcatcagagtttttattattgttaaaatgttctctgtgaacaagacccagtgtgccataaccaaggtctgtgttattgtcaccctcaagcaccacccccactacctctgggaactattagtaagtgaccaagctggaggcaagggatggtattttcctggggactagttaaatggattgcctcggtcctggtagtgtgtttcacactgagagtactggtctctaccctcggctacacattggaaccacctggaagtttttaaaaatatactgatgtgtggctcttacctctgatattccaatttaattgctctggggtgcagcccaggcatcagaaggctttaaaactccctaggtgattctaatacgcaggaaaacttgaggaccattgtgttaaacaccgtattaagcgtga

SEQ ID NO: 1885396 - DNA, 4001 bp, Homo sapiens
taacctcataacctttactctgtgcaattctttgttatttgagcttgctggtatcaatgctaagtccagcacagtgataaaagtgatccagctgaatcaggttcctgcctcttttctactcaaccaggttgatctggattccaggcacattggctgggtaacaagtgaacttccaggaggggataatcacatcataaaaattgaattaaaaggcccagaaaatacactgagagttcgacaagtcaaagtcctgggctggaaagatggtgaaagcacaaaaatagctggccagatttcagccagtgtggcccagcagaggaactgtgaagctgagactctgcgagtattcagactgattacgtctcaagtgagtgtccttacaacatattctagcacaggataattgatgtaatatattttaagagtgtaacaaaatattttgtgaaacttattacagaaatttctggctataaatgttgcccattttttcttttcatagccctaaacacctgagttccatgttgcatttgtaattaagaaaaatagtggtgtatattagcaagagtagcatattataaaacctgcggaatcagctaatgagtcctctggccaatatagtgttaatgcctgtcattaattccttctcacatgcatatcttcatcaggtatttggaaagctcatctctggagatgctgaacctacaccagaacaagaggaaaaagcactattgtcatcacctgaaggagaagaaaaagtatacaatgtatttatttgtattctaaagatatttatttcccttttttattctttttttcagtgaaataattcatttattgctgtatattttgatggatatgtaataacagttttatgcagttcatatttgttcttagaaagatgaaggaactatctaaaagaaattcattattcatgtataatctagctagtattttaagtaacagcaaatttgctctataccttgggtttttgcattcatttgtaatcatttctgtgctataccccatcagttatcttctccctcctccattgtccctgtccttcacagttcagctcaaaagtactgtcttcttcatgaaacttttttacgatttatcctcttcatgaaatttgtttatgatttccccaaacaaaagcagttttctctctgctggagttcataataatctgtatgtgtctcttcttcatttttctcttatgtttatctacatggatgttttctctcttctactgaaccatagcttcttaaagaccaagtccatgtctaatttgtctttgtatccatcatggtagcatcacacacatgtttagtaaatttttattagaataactactctttgttactgttcttgaaatttcttgcaaaaatacagttgctttactttttcggtcctgactaaaacactatacctaaaacttttgtacttcatccatttgcaaaaagagaagtcaactctgactagtctcaatattctagtgtctttaaatgctacaaataatcaccttggcagccctttgaaagataaatttcaaggatttcccttgtctcaccctgtgtttcttaatacagtagtatctaatcattgtcctgtttttgtttgaggtctgaaaaaaataagatttcttaaatgctggtaacttctttcaacatcttttggagatttcatttgaatgactacaagactgtgtaactacctgttaagtcaattgaattttagcagatgtcaactctgtactaaacaattgtgagaatggcaagccctcaaaaagcttgcattctgttcttggttatgaaccctctgcattcccctcaccccccccaaaaagaaatcaacaaagatactatatagtataaaagcaagttattaaatgtgtgaaaaaaattgcagatgacattggctttcagagtaccttgagatcattgtgccctggagtggtcagagaaggcttcttaggggatattggactggagttagatctgaaagagaatgaagggattcaaatgagattagtagagagaatgggagcaaggactgatcagagagactggcctaagggtgggagagtgtatgctgaggagttaaggttgagtaggaaaggttatactgtcatgtgtgtgcccatgaaataacatgatttttaagagaatctttttttaagttagattattgaagcacaatttacatacagaaattcctcattttaaactgtatcattcaatgaatttttacttgtgtacactagtgaaatcattatcacaatcaagtttgttttgttttgttttgcttgagaccgggtctctctctgtcatccaggatagagtgcagtggtatgatcacggctcactgcaacctcaacctcccgggctcaatggatcctcctgtctcagcctcccaagtagctggaactacaggtgcacgtcaccgtgcccagctgattttaatatatctgcagagatgtggttttgccatgttgcccaggctggtctcagactcctgggctcaagcagtctgccagcattggcctcccaaagtgctgagattacagatatgagccaccatgcccagcccacaaccaagttttaaaacacatcactccccaaatttctctcatgttcctttgcaggcaatcccccaacctcacacttagagcctagcaactactgaactatattctgccagtgttgtgttgccttttcctggatgtcatataaatggaaccactcagaatgtagcctttttgtcttgtttctttcactttagtgtaatgcttttgagatttatccatgttgtagcatgtagccatggttcattcttttggttgctgagaagtgttccattatatggatttaccgtaatttgtttatcctttcattttttgatggatatttgggttgtttctgctgtttggctactattagtaaagctgctgtgaacactcacatacagatctttgcaggtcttttaccaattatgtgttttcaaatattttctcctagtctgtgtcttatctttcagagaacagaagtttttaagtttgataaagtccagttttttcttgtttttttgattcatgatttttatgtatggtctagaacccaaggtcacacagatattctcttcttttcctttagaaatgttatagttttagttcttttctttagaactgtatacattttaatttttatgtgcagtgtaagaattgaggcttatcttttgcatatagatgttcaattgttctactacgattcattgagaagactatcatttatcaatagtcaatttaccataaatggtaggtctgtttctggactctattctgctccattgatccatcaaagtgtcttacttactgtagctttataaaaagtcttgatatcaggttctaactttgttctttatctaagttattttggctattctagatctcttgcatttccatataaagcttagaatcagcttgaccgtttctttaaaaaaaaaaggggggggggcggtggggatggaattttgactggaattaacaccaaattgatagtttagggagaatcgccatgtcaataatattgagtcttcgtatctgtgaacatgatatgtatcaggggttttcttacatctgtttaaaatttctctcagcagtgttttgtaattcattgtacacatcttgtacatattttattaaatttattcctaaacatttaacatttgtaaagctattgtaaatggtattttttatttcactttccaattgttcatttctagtgtataaaaatagaattgacttttgtatattagatttctaccctgtgatcttaaattcacttactaatttcagaaactttttatagactctttggggttttcttagataatcatgtagtcttcaataaatttgggttttttcctttctaaactatatgccttaaatttcttttcttatattattgtgttattgcattgattaagcccttaagcgccatgct

SEQ ID NO: 1885397 - DNA, 4001 bp, Homo sapiens
ggtccaaaattagtcttatactgagcagaagaaggcaatagattctctaccaatatttttaattaaaaaattattctggaaactaagaaatgtgaaggaaaataatattaaagaaatgataagtgccagactggcttcaggtattttaagtacatcaatgagtgccacatttagaaagtggcttgattgcaggtacaaaagctgaggatcacgcaagtattttctctcacaaataaaagaagacaaaggcgtctgggaataactgatgggaagactcagaccaactattcctgagggcctcccgcagggctgggaaaagcatgtttgtttagtctaattagaggcgtgggagaaccatcatgatgctgaaatgctgggaagcagttgaagacctgggagtggggtgcaaggtgagccgaagcaaggaagcccacacttgaagcttggctcatggggacataagggtacccacattgttcagagaaggcagctaagaagtcaagttgtgcttctgactgccttctcaaattacagggcaagaaactgagtcgtggccccaccaaggccttggggtggggccttcaagtgttcttcccaagagtcagagtgaaccagaaccaagaaccatgttgagttgcccagatgtaaccaggcctacaggtacctgggagaaacacgtgtacattttccccaaagggcagtaatagcatcctaggcttcaaaacattcatagaaaccatttttcaaatgcaaagtccaacacagttagaaataaccaggcataggagcacacaaaataagataaaaaattaaaagcagagacggcagccaattgcaatatgtccacagggattcaaaaggttggaattcaaagacacatgccttaaaataagtatgtttactcagccccccacgaaataaaacaacgagaatttcagcagaaataggaaactataaggaaatcgtcaaatggaaattctgaaattggaaaatgcagtaataaaattgagtacaacagaggataaagttaaatttaattagatatagttgtttaaaaacaaaacaaataaaaaataactggagaagtggaagataactcagaaaatccccagaatgaaacagattgaagcaaaagggaagaatggaaactccagacaatggtttagagatataaagggcaatgaggaggatgattgaagtcttagggaaagaagagggagcgcatgagcagaagaaagacttggtgagaaatgttagagcatctcccaatgctgacgaaagagcaccaggaaacagatttaagttggcagatttttataacattcaacatacattcttcacgggatccagcaatctgactcctcagtatcttcccaagagaaatgacagcagtgtccacacaaacacctgtatgcaaatgcatatggtgacattattcataatcacataaaactggaaataaattcagtgtctttcaactgatgactggcttgtattagtgatccatcactgtgcaaaatattactcccaaaacttggaggcttatataagaaatggttattatttcatagtttctgtgggccaggaagctgtgtgtggcttagcagggtgcctttggtttaaggtcccccatgagacagcaatcaagctgtcagccaagaccacagtcatcttgagacttgagtgaaggctgatccattttcaaggtcactcacgtggctattggcaggccacagaaggttcacatccaagtcaactcacatgggcagcctcccagcacagcagctctccccacatccctgagcaagcaatccaagagagagcaccccagatggaggctgcagtcttcacataacccagtcttgaaaatgacaccccagcactctgtcacgtttgattgagtcactaaatccaggccacactcaatgggtggggagtccgtgagtgcctggaggtgggctcaccagcatctcacaggctgaactagcacatggatgaagcctgcaataaataagagtgatcaactataatgagcatcataaaaaaaagggatggctaaagcattgtgttgaggttaaaaaaaaaaaatcaaaagactaagtgtgatcctgcttatgtaacatttggggaaaagcaaagctggagacagaaaacagctgagtggttgctggaggctgggcgtaatggcaggagatgaagttcagaaggacatgtggtgttatagacaacctggagtgctcatgtctgcagatgcacagatgtgtatgtctaaaaaaggtgaatctcactgtctctaaattacaccataatcaatccaacgtttgtaaaaatgaaacagaaacctttgcaaagcctaagtaggatacataaaactttcctaggtgtatcatagtaaaacacctataaaataaagaccgagaattaattttaaaagcagttagaggtaaaaatatgtactatcttcgaaaagtagcaactgaagtccaaagacaatgaaataacatagttaacatgctcaaataaaataactgccccccaaaaattcctgtaataatgaaagggagttaaggatatttttaggaaaaaaaataaaaatgaaaggaattaaacactgacagactcagaatgcttagagataaaggaaagaataaagaataactaaaaaggcagtaaaatttggaggggtaaaataatatttaatattatacactgataaacctaccttgccagttgtaacctcaaaggtaacccctgaaagaatattagtggggtagataatatccaaactagtaaagagagaaaaataaaatcataaaaagtcaactcaaaagatgcaaaaaggggataaaataggaaaaatagggcaaggagaaagttctgagacagtagatatgaaaacacatgtgaaaataaactttatttaattataataaactttaaaaggcttatttaatgtaaacttatatgaaaaatgattagcagaatattttaaaaactaagttttctgaaaacagtaaaacataaggattctgaaagagtaaatgtaaagggatagaaaagaaaaagatacaatgtgcaaatattaaaaagcagcaaaaacagtgctcatatatttgaacgtcaaaaattacatctctaggccaggcgcggtggctcacgcctgcaatcccagcactttgggaggccgaggcaggcagatcacctgaggtcaggagttcgagaccagcctggccaacatggtgaaacccccatctctactaaaaatacaaaaatcagctgggcttggtggtatatgcctttaatcccggcgactcggaaagctgaggtaggagaattgcttgaacccaggaggcggagtttgcagtgagccctgatcgcgccactgcactccagcctgggtgacagagccagactttgtctaaaaaaataagataaaataaaatctctaagtaatcaatgtattcaagaagaaatcacaaaataaattaaaaagcaaaatattttaactaatgacaatgcaaatatgacaacagaacttttaggacatgtctaatgtcttttgtgtatgagtggaaggggctcgggtacagtgtcggtatggtcaatatgtggctgtatggcatcgtggccatggctgggcttttagtgtccacatcaactgaatagtatatattgtcctgattaagtcgtttcatatgcttcattccatcccatcctcccaccttgccacccttctgagtctccagtgtctattattccacactctgtgcccaagtgtacacgttatttagctcccacttataagtgagaacatgtagcatttttctttctgtgtcttagttatttcacctaagataatggcctccagttccatccatgttactgcaaaagatctcttaagaaatggaaatgtatggcttcaaacctttgcatcacaagagaacaaatacgatgagtgttaaaagggtctagaaattagaaacagaacaaaaactaaatac

SEQ ID NO: 1885398 - DNA, 4001 bp, Homo sapiens
gccgactacttaatgagctcctacagtactacaggcactgtttagattttgtggacacagctgtgaacaaaataaacatgtcctcatttatcctatattctatttcaggaatactgccaacgaatcagtagtaacatcaactactagtactacagtgaaagtgacatctcaggtgagacctaaacattaagaaaatgctaggcataggaagagtagacgagaagagcattccaagcagaaataacagttagagcttttagcaaggacaagcttatcatatctgaagaacagttcaaagaggccagtatagatggactgtagtaaatgcagactggtataagacagggtcagagaagcagccaaggactagattatgtagtgtctaagcagtgagtgattttacgtattttaaaaagaatttatagactactctagctgctctgtggataaaattgtaaggtggcaaaaataaaagtggggagactactatgtccacatgagaaatgatgagaccacatagggaaagctaagagtaagaacagaagattgtctagaactgaaatttgaagaattctaaaattcaaggaccaagaggagaaggcagcaaaggagacagaaataaccacagagatctgaacaaaaaccatgatgtcaaggaagccaagtaaagtattttaaggaaaaactgatcaaaagttaaatgcttgctgagtagtcaaataagaagagcagtgaataatgcccgtaaatacagaggaatattctggagaccttaatcaatttagaggaatgatagggacagaaactaaaatggagttggttcaatattatcagaagtgagggagaaaaagaaaatgaatgtagactactcttcagaaagaagtttggctataaatgagctgtgtcaagaaagagggacttttaaatcggaagacttgatcatgtttaactgttgatgggtcagactcagcaaagaaggcgaggttgaagttagagagaaggaataattgacaatgtataaaatttcctgagaaggaaagagatgcaattcagagcacaggtgaaggcattcaataaacaaacgagagaggatggacacaaatggaggtggaactcagactgcctaactcttgtaataatgtgttcttcccagtaaaatcatgctaagaatattttgaaaagtgtccaaaacaggtcaacaaaattaactgaaagaaagttactgaattactgaggttgaaaagccaaataatgacccaatatatattattttcagataaataacgaaaaatcatgtaaagatatccatcagtaccagctattcttgattgctgaatacagataaatatgtgaaaaaagatgcaagcatttgtgtgttttctttttttaagttacacgtaggatcacagttctttgggaaaagggttctaaaaagtgattatgaactttttgttgaaccattttaagactgggacaaatacctggagtattcttctcagacagtctagaaattcttctgtaaagtgttaaagcgaaaaaccttaaaagaaatagataatcaaaagcctcaactttgctctactaatctgtattctaggatttaatttcttgatcataaaccacaaatctaaagactactggtgaggttaaaatggaagaaaaggctctgatatggcactggatacaccaagttaaatgggtgatccttcttctctggtggtctggaaatcctttccccagcaagtatcaaatacaactgattcatgctccatctccacgtttcctatacaggttgagcacccataatccaagaagctccaaaatcctgaactttttgagcattgattgacatgatgctcaaagaaaatgttcaccggagcactttggatttccaggttagatatgctcaatcagtaggtattctgcaaatattccaaaatccaaaagaaaatctgaactccaaaacacttctggtctcaagcatttcagataggggtactcaacttttattacaaactgccctgtaacgttgctcttctttgattactgcttccttcgtatcaaaagtttgttgactgttttagggagaagactgtgcctaatatcgaataaaacagttactgattcttagtaaagaataaagctcctaggacacagtagtgatccaaagataacaagatccctggttttaattttcaaaatgtctagcccattactcttatcacatttcctataaatacttcaatttacttatattctagataaatgtcttaactgcatctctgccaagggttacattgaactatattcctataatctcaatacccttatgtactgcttaccagtttcctgaattgaaaactatcttaatctattcataaaaccaatgacatttcttttctaaacaaaaattccaacttttctattctaaacaaaaactccaactctaacatttagaacaatgaagaaaaaacacaaactactcttaaggaattaagagaaaccaaacaagacccagttcttcaatttttttaagttgactaaaacaaaataaagcaaatacccaacagtaagaattctgtacttcaagattttccttgtaaaatttaagttatttacaaagcaaacttaagtaactgtctcttttactgttctttcagaaaattaatttaaaattccataaaagaataaaaagttcctattatagagaaaaagctcctttaattcttcaaatattcggaaaatttatgtaatttccatgatgtctactactaacatacttacgtaacaagtggacataaaagaaaagtaagtaaaaccacttacaagtagtattgacttattttaggaaatactgcctgaaaattaattagggttaaaaaaatccaacttaacataatttagcaatccatttattgaacactatacatttcaaatgctaattaaaataataaaatattaaaattaatttaaagccttacagtacaacagtatatgtaaataattcaatggaaaaaaatgttcctaaaatatgattatcaagtctattgatgtttaatttacagaaaacatttaaacattaaatagtataaactctatcaattttttttttttttttttttgagatggagtctcactctgttgctcaggctggagtgcatggcaccatcttggctcactgcaacctctgccacccaggttcaagcgattctcctacctcagcctcctgagtagctaggattacaggcacatgccaccacgcccagctaatttttgtatctttagtaaagacagggtttcaccacgttggccaggctggtctccaacgcctcacctcaggtgatctacccacccggcctccgaaaatgctgggattacaggcgtgagccactgcacctggcccaactcttttcaattttgacttttaaaaacagaattataaatggcctcttgaagatttcttcatttaactttcctgataaatcaacataccttataaccttaaaaaataaagataccataaagatggaatcaactcttcactggaatttctttttaaccttggaaaaacaccaaattaaaaaaaaaaaagataactatgtggttaaaaaaaaataatacagggttacagtagatacatgtctaacatagatttgaatcacagttttatctcttactagagaaatcatgttaggtaagtcgtttaacctaaatttttgtttcctctttctaaagccattgtagaattgtgaaaattaatgactgtaacaatcacatttagatgggggcctagcactgatgggcattaaataagcagcagttatttaaatggatactattaagactttttgctacaaaattcctactgtttgttgcagcggcattgcaccatataaggaaccacttgtaaaaatttaactcaaaatagttatcagctttccttcaaaatcattcagttaagggcaaccagcaaccatgacataatagtgaattatgtaaca

SEQ ID NO: 1885399 - DNA, 4001 bp, Homo sapiens
ccattcatggcaagtgccctgtgcagatggaccatgtttaatcttttatatggtatttttgttgtactttttctatgtttcgatacgtaaatacttaccattgttataattgcctccaggattcaatacagtcacatgctgtagaggtttgtggcctaggagcataggctataccatatgtaggtatatataggctataccattgaacctaggtgtgtgataggctataccatctaggtttgtgtaagtgtatgatgtttgcacgtgaagaaattgcctaatgatgcatttctcaacatatccccatcagtacgcaacacatgatgatatactatatatatatataagattgtatatgcacatggtccccaacttatgatggtttgacttaggattttttgactttacaatggtgcaaaagtgaaatgcgttcagtagaaactgtagtttgagtactcatacaaccattctgtttttcaataaattacatgagatagtaagtactttattataaaataggctttgtgttacatgatttttgcccacctataggctaacgtaagtgttgagcacatttaaggtaggctaggctaagctataatgtttggtagtttaggtgtattaaatgcattttcgacttacaatatcttcaaattatggtggtttattgggatgcaaccccaccaaagttgaggaacatctctctatatacaatcttactggttttagaaagaatgtctgaggcacttttgctctttgattttcctctggagaattgcatgatgcatagaatgctcatgttcaacacacactcgtgggattccctgcatttaggtgacaataatttataatcaccgcagctatttgttaatgcttcagtaatagtctgtccttactggttgaaacatcaataaaatagagttatgcacagttcacccacagcagcctgctctttctctgcaacttttattcaaaaagcatgtcagcatatttaaaaagtagtgaccaatcattagttttgtcaagtcaatcatctccaactgatagtgacgcaactccagtttagtgttctttagaattacctggagaagtaattattgggaacatacaggctcctaggctacaaccctaagagcttcccatttatagcatttcaggtagcccaagaatctgcattttagcaagtactctaggaaatatgaagctatttggaaaaccttatcttagagatactttattgttaatacaacttccagaggtattagctagaagtgcccaatcaaggctctggatggtgggggtgaagaaaaggaagaaaagaaagtcatatgctccttccaaaactagttcctcttggctaaccagttgttatgggctgaattgtgtcttccccaacccccaaattcctatattgaagccctaacgcccagtacctcagaatgcgactgtatttggagacagggcctttaaagaggtaattaatttaaaatgaaaccatgagggttagccctaacacaatctgactggtgtccttataagaaaaggaaatttggacacaaagagagataccagggatgtgtgcacacagaggaaagaccacgtgaggacacattgagaaggcagccatctgcaagccaagcagagaagcctcagaagaaaccaggcctgctgacaccttgaaagaatacgtttctgttgtttacgctcccctgtctgtggtattttgctacagcagccatagaaaactaatacaccagctgaaatgagtcagttctcacactgctataaagaactacctgagactgggtaatttataatgaaaagaggtttaattgactcaccgttccacaggccacacaggaagcatggctgggaaggcctcaggaaacgtacaatcatggcagaaagcaaaggggaagcagcacttcttaccagggcaggagcaggaggaagagcgaaggggaaggtgccgcccacttttaaacaaccaggtcttgcgagaactcactccctatcacaggaacagccaggaggaagtccgcccccatgattccatcccctcccaccaggccactcctccaacactggggattacaatctgacagagatttgggtggggacacagaaccaaaccatatcaccagctctctgtgcctgcctctcacagttggctcacagcctgcagagctggtgtgcaatgtgtcatcatgatttaactctcttcattttcccacctaggatgccagaaatcagggccgcaaagcccactaatgttcctttgtgggtgagtcacaggtttgtgggagagagaaactggaaatcagctcatcaaccactgagctaaaacaattgtgccaatgagggtctgacctaacctctcactcttgcgtaaatgatggaagagagagacacctgaggttttgaggctcagctatcagaagctgactcagctcgataaagcctcttcatcagcagttacatgcagcaggtcatacaactgattgatctaactggaatccctcaagtattccacaggcaccaatgatatactagccaataaccccactgcgagacagagtccatggattcaaagtcttattgccaaagttaggatctgtaatccctttctacttattttgaaatatgctgctgcacttcagcgaaatctgataacattctggcaggtattataaaattagttgaataatattagcttaattagattaattgcttgctgtgattatctagggaatttcatccttatcttcattctcctttctcagctctttccttccctcatgcttccctatgggtggtatattcaagattgcaggacactgagtgaatgggagagggaacaattgctgagatgagtgtcactaaagacattcacctgcgctctcgctctccttcatacccctctgggctactgtgccccacctccaagggagccagcatcaccactgggagagacatggggactcatatgaagctggaaatgaaggagaggctcgtctgggatgaaggtgaatgagacagtaagatacagctgtgtaaaaagaaaagggaatggtaaagaatggagtagaagagaagaaagtttcatcagagggtaagagaaggaggaaagaagagttttgtggacggattgaagacatgttgaagtcttaacccccagaacctgcgaatgcgccctcatttggagatagggtctttgcagatggaatcaagttaaaatgaggctatactggatgagggcgggcccttatccaacacgactgctgtccttctaagaagagaaaaatttgaacacagacacacacagagggaaggtcacgtaaagatagaggcagaggttggagtgatgctgctacaagccggggagtgctgtgggccaccacaagctggaagaggcaaagaaggacccttccctagagctcgaaaggacaacagccctgccaacaccttgatttcaaactctagcctccaggactagagacagtaagtttctgtggttttacgactcccagcctgtggtacttggttatggagtctgagcaaactaacaaggagaaagtgtgtggagaagagggaagcttcctgaaggctgtttgcttctcatgctgcctggaacatggtggcactcagtaaggaagtgtggattaatagactaggtgacacgtacataaggcactgacgacagacgtgtgagaggaaataaagtgcaaaccgatgtctatcacatgtctttttccctcattggctagctcagtgccttacagaaaacaggtgcttaacaaatgtgttgatgaactgattaaatcatttccatagttatctaacatttataaacgcgggtgcacagttctgcagtgagatctttttttaagaggtggaacagcaattcgtcttgaaaaaactgagcatctcatcatggacagttttatctcttcatggtttgcaaaggaatgaggagaaggacaaggaagcagaaagagaag

SEQ ID NO: 1885400 - DNA, 4001 bp, Homo sapiens
aatagaaagaatctgttactctatcaggattcaagatgtctgcttttggtcagatctttgatttttacttttatgttctcagtgctgcattgggtgtaagaaatggtctctgccctgagcagccatctatttgagaaacagatgaacacatgaatgattaatgaaaacacatatgcatataaaattaagttctaaataaatcttatagatcgtaagtgatataaggatctaatttcagtttgctgatactggctgttgttttggtcatcgagaggcaataccatttggagtgaaattgtgagagtgagcgtttgtaccagtaataccaataaaatggcatatgtttattggcttagaaactaaaatacattaagatcaaaacaaggcaagtttaacaatatttaagtatgagatatcactgcctcttattgttagcacagtaatgctttatgctattagacatgtcaaaacggcacaaataggaagagttgatgaatgctttaaaaagaactatgaggaaggcttacattttttagttgtcaatctctcaaagagtttctgtttttattctatcttgctattttaaccagttgattaggctcacccagtggcagtcttcatttcaaggatctcctctggacattcatgaaggaaataaatggggctccagatccctttccttcccttcagggcgctccactgtaagatcatttagggaaaatgtggtgttatgttaaaaacatagctgggccacatcaagcagcatcatagtttttagggtatagaacgttggtcttcaggttaaaaggtacttttcgctgctctgtcatactcttctacttgctagagaaatatgctttatgccgtgtcatgtgtggttaaccagacagtgagatactactaacagtgctcccaagtgattccttgctgttaaatcaattggaattattgagtattaccacaaaataatcctatctgatttcattactttcttctaacgtccttccagtaacctagaactctagagacctctttctttgagagttgtctggagagtccgttggatttttaaatctcttattaccaaaaagtggaaaaaagagtttaaaaagtaaccaaagagctagtgcctgtagtctcagctactccagaggctgaggcaggtggatagcttgggccgaggagttcgaggctacagtgagccatgactgcgcctgctaacagccactgcactccagtctgggcaatatagtgagaccccatctctaaaaaaacaacaaacaaaaacaaaaattaccccacagaagaatttcagggcagtggaaatactctgtaggatactataatgatggatacctgccattacacatttgttctaactcgaggagtatacaacaacctgagtgaaccctgaggtaactatggactttgagtgatgatgaggtgtcaatgcaggttcatcagtcgtaacacatgtaccactctgaggggggatgttgataatggtggggggttatgcatgcgtaggagccaagtgtatatgggatatctctgtaacttctcaatttttctgtaaactctaactactctatattagtctttaaaaaatcgcttatcttacgaatgattttgaataagcgttttgggaatgttctagagatgaatctcctccccatgtcctacgctgggtgaggaagtgtcgggtacccgggcgacctgtcctcaggtgttctaggaacgcggccccatcccttgtcagcctctgtctctgtgtggtgagaaggcgcactggctcgtgcctgcgcgaaactcgcgcacacagaaaagaccaatcaaggacgggtcattcccgccccccgcgcgccttttgcgaccgcccactcgacaggttgacaacctagacagctcccccggacttgccttacttttccatctcctcccacccagctataccctcccactggcggcgcggatggcacgccggcggagccagcgagtctgcgcgagcggtccgagcatgctcaatagcgcgcgcggcgccccggagcttctccgcggaaccgcgaccaacgcggaggtctcggcggccgctgcgggagccacaggaagtgaagagcttccgccgggagaccgcggctgcaggaacggaggcggaaggggccctgcggcgacgacgtcgtcgacgggggtggccgtgggagctgagcacggagaagactccctctctcggaagccggatcccgagccgggcaggatggatcaccaccagccggggactgggcgctaccaggtggtgagttcccggcctcctgtgcctcccgggactgcctcccgccgcggcgtcccgagagtccctttcctcaggttattcccggaggaaaagctgtggcttttttttgttgtgttttgttttgtttttttggatcttctggctggagctgcttcactcgcctcacctgcgcactcctgcctaggactccttcgaaacccttctctctcgccccaagtctgcttagctcctcacccgcacccttagccccgctgtgagacgccctccctccacacaccttacaacttgtatccgttttaatttctcactttatcattttcttattctctgactcagtcactcctgagacattctagtcgattgtctactggaaatggggctgacttcacatacctgcccggaaggtgatcgccgtcataaatggggtgggtgagtaggtgggtggaggtgtaagtactgcgtggggtgggatgtggatttggcaaaaatgtgggttaggaattgtggaactgtagagaaagactagccataatgctgatcttgtctctctgctcgttaaccttgtcattttgtccttttccattatgttagtattaaaaatgactgtattttttggtaatccccactttttctttctttctttctttcttttttttttttttttttttttttttggttagaggggaaacagaggtagttttagtagaacaaattctaatcttgtttgaaaaattatttttcgttaaatacaaggttttccagcttaactgtgtaaactttggtaactatgttgaaaaaagtgaaatgtgttcctctatattttcagtgtcaatttttaaatatatttttctttgtgtattctggtggtgacgttggagattcctgttgtaaaccttagttaaagatggactgagcaatagttgactctgctgttgtgctgttgcagctaggtagcatgtcattctacaaactttcagcccatttactgagggagaggagaaaaacaatacatagcactggtgatgcagtttatggtttataaaattttacaaatttaggtatgttagtcccaggtttcaactttcaaatctatttgcacatgtaagacaggttataagccaagactttctattaataagtacattttggcaaatatgaaggaactgtaagatgagatcctaaagtatgtaattttgcatttttctaagataaaagctcatgaggcttccattttcaattggtttgcattccttaaaacctacaaaaggtccatattccgaattctttgaaaatttatcagcttttctcaacaacttgggaaatactgtttctcccagtatggaaagcgtttttcaagttgtcagtgtacacccttttgatggtttgaaaggcatttctaggtttgtaaatgttagcaaaaataaaatgatataaatattgaataatatcagcagtgaaacttgtttcatttttcctacagacgtcactacccaaaacactgttaatttatgtagctctcagttttaagatatttgttttcccaacaactcctttcaaaataaatgggcatattttattgctgccccctcccctcgtttttttcaaactgacgatgtgtcctacatagactttgaatgttccttgagaacagagggcaaaaatcagttcttctaaagataaagcctaccagtccctctaaaggtagtacttt

SEQ ID NO: 1885401 - DNA, 4001 bp, Homo sapiens; identical to SEQ ID NO: 917344

SEQ ID NO: 1885402 - DNA, 4001 bp, Homo sapiens; identical to SEQ ID NO: 917347

SEQ ID NO: 1885403 - DNA, 4001 bp, Homo sapiens
gggtgatgcaacccccgtgacgaggggacagagagctagcccctcttcacccctggctcttaggacccacatagcacctgggggaggcacccccgcgaggcggggattgagagccagcccctctttccccccagactcttaggacccccatcgcgggggggggaggcacccctcgcgaagcggggactgagagccagcccctcgtctccccctggctcttaggaccaccatcgcagaaggcggaggtaccacccacgagggagggactgacagccatcccctcttcccccctggctcttaggacccccatcgcaggggggggggaggcacccccccgcgaggcggggactgagagccagcccctcgtccctccctggcttgggacccccatcgcggatcctatgaactttaggacccacctggaggactgtgggtattaggtgtccaagaagaaagctcaaatctgctgacggcaggtaccttacttgggatttactatccgacaggggtccgaaggcacccaggaacagaaagaaagcaggtcatttgcaatctacctcagcctaagggcagaaagcatgtgagagaatacttaggggctgtgggattttgtagactgtgcatcccaaactttgaagtattagccaagcctttgtatgagatcacaaagtgggcggggactgggaacctatggaatcgggatcccaacaacagcaagtctttcttgagttaaaggaaaaacttctggaggccccagccctgaggctaccggatctgacaaagccttttccattcaatgcgtcagatagagaaaacatggcagctggacttttaacccaaactgtggggccctggatgaggccggtggcctacgtctctaaacacctagacagggtatctaaaggatggcccccctgtttgagggccatggcagcaactgccctgatagtagaagaagcaaataagctgactcttgggcaaaacctgaacataaaggccgcccattttggggtgggtgagagccagcccctcttccccccctgccttaggacccccatcgcggatcccaagatctttaggacctacctggaggactgtgggtattaggtgtccaagaagaaagctcaaatctgcccagggcaggtaccttacttgggatttccgatccgacaggggtccgaagccacccgggaacagaaagaaagcatgttatttgcaatctaccagagcctaagggccgaaggcaggcgagagaattctcaggagctgtggggttttgtagactgtggatcccaaactttgcagtataagccaagactttgtatgaggtcacaaaggggtcggggaccgggaacctttggaagggggatcctaacaacagcaagtctttcatgagttaaaggaaaaacttctggcagcttcagccctggggttacccgatctgacaaagccttttccattgtatgtgtcagagagagaaaagatggcaggtggacttttaacccaaactgtggggccctggatgaggtcggtggcctatgtctctaaacaactagacagggtttctaaaggatggcccccatgtttgagggccttggcagcaactcccctgctagtgaggcggggactgagagccagcccttcttccccccctggctcttgggacccccatcacaggggggggatgcaacccccgcgacgaggggacagagagccagcccctcttcaccccctggctcttaggacccccatcgcacctgggggaggcaccccccgcgaggcgggtactgaaagccagcccctcttcccccccagactcttggaaccaccatcgtaggggcgggaggcaccccccgggaggcggggactgacagccagcccctcttccccccctggctcttaggacacccatcgcaggggtggtcaggccccccccgccgcgaggcgggaactgagagccagcaccaattcaccaatacacaatcagtaaatataccgattgtattatgtgccgtgaacattccaaagtaaccacatgaaagagaagactcagaactacaggtgtttttcttctgaattttttcagattttctttttccctttgaaattctgcaagtttgagtatgttatgctcatgtttcgatttttaaaatgttttaaaatgtttaaccgtcttagtgttttattagtttagtggacctatggctttgagtcatattcacagttgaacattttcagtcattattacctcaagtatttcttctgttttttgttttttttttcctctctcttctccttctgatgtttaattttgcatttgtggtaccttttctaactggcccgctgttctcacatattctgttcatttgtttaattctttcattttattctctgtttatcagtctgagaaattttattagacataccttaattattttttccttagccatgttctgttccctgatgagtctgtcaaaggcattgtttatttctgatacagtgtttttgacttctagcatctccctttgatccgttcttagacttttcatttctctttatttcattacccatctgttcctgtgtgttgttctctttttctgttagagcttttaacatattaatcatagttattttaaattacctgtctgataactccaaaatctaatttgagtctgtttctgatacttgctttatcgcttcattatgtgttttcttttgcctcataatgtgcttgtaatttgtggttgaaagctaaacatgatgtgttggtaaaaggaactgaagcaaatagatctttagtgtgaggttttatgtttatctaagagttaggctgtgtttactgtttgttgttgctgtaagtgtcaaaggctaacatttccttttagtgccttttgtttcttgtcctgaagtttctctagagacatttaaaaagtctgagtctcagttattccaactcagatcccctgttattagacagaagtctgattaatgttgtggtaagttgtaaggtttctctattagggtagagaaaatcattttataaattgttatctccaagtgttaggggatgtcttgactttttccattcaggaagctctatctggggtattagttgcagttgtagttaggtattagttaatttcactctaaactactattattatttcagatctatctctctcagaggcaaaaccatgagagagtagaggcatctagtagaggggactggaaaaagaattgtcttgtgctgctgcatatcccatcagtcagaacatattccccttttgccacatgatttcaccacaggctattcacagatacatctgttcatgacaaggaaacttactttcccctcaatactatgtcaaaaatttgcatattttcttcaaggtaaatatatttaaatgttcagaaattgcctagtttatttcctattgtatcttttgtttttatctatttctaaatctaattgatttataatacacttgctatttacccatcccctattaggatgtcagttttcctaaaaatagaattcaagacttgatatctttaggtgtgacattaaatgtgacacctgaactcagtaaatgatttagaagtcagtctttatgtgagttagaaatgagtatttattgaactaggacactacatttcaagctttatttgttacatcttactggtattaccttaacccattacttacttctctacttttatatttttcctaaaattaacaagctttgttggtgtaagtataagcacttagataacacattgacattactttctatctgtccttttcaaaaatttatacttctcagctctcttttctacaacctgctgcctccaactttaatctctccagctatcaactttttatggctttatttgctccttgctaaacctgaagtctagctatattataaaattactcagtccttagactttttttttgtataactgagctgctcatccttaagtgtgtgaacctctaactg

SEQ ID NO: 1885404 - DNA, 4001 bp, Homo sapiens
tcacaatgcatgtacaccctctgatattatccgttatatcctcaggggatgttactcctaatgtcacagagggtgtactccctgtcatattattcataatatcctagggggatgttacttttaatatcaccgggggtgtatatcatgcatattcaacacctgtgatactattcctaatatcctaggggcatgttcctcctaatgtcacatggggtgtacaccatgtgtgtacacctgctgtgatattattcataatatcctaggggaatggtactcctgatggcacaggcagtgtacaccatgtgtgtaagccgcctgtgtcattattcgtaatatcctaaggggatgtttcttttaatgtcacaaacggtgtacaaaatgtcacagaagatgtataccttgtgacgtcatctgtaataccctagaaggacgttactcctaatatgtcactggggtgtataccctttgataatctttgtaatctcataaagagatattacttcaaatatcacagtggatgtacacacatagtgtataccctgtgatattatttgtaatatcctagggagatacaactcctgatatcacagtgtgtgtaccccgtgtgtgtacacccttgatattagtcataatatccagggtaaatattactcctcatatcacacagtatgcacaccctgtgatatttttcctcatactttagggagatattgcttctactatcacagtgggtgtaccccatgtgtgtatactccgtcacggtattttttatatcccagggaggtattactcctaatatcacagtgggtgttcacctgtgatatcattcttatttgacctttctgccttttttaacccacactacaaaaggaatggaacagataagaagatattgagattagactgtgctgccgtgcggccgccgcaggacacttttaatatccctgtttctcaggctgtagatgaaggggttcggcatgggggtgaccaccgtgtacatcactgaggccactgcaccatttctgggggaagatgacacatcatctgaactgaggtaacctccaacgcctgttccataaactcagcaaacaactgacaggtgagacccacaggtggagaaggctttatacttcccacctgatgatgaaaccctcagaatggaggaaacaattttagagtaagagaaaagggtccctgagatgggaagaaaaccaaatatggcagcagggaaatacatgattatcttattggtgaaggtgtcacaacatgcaagatgggggagttgagaagggtcacagaagaaattaggaatttccacatccttgaagcaggtcacttgtaaggcaatcaagttgtgcagctgggagtctaaaagactgaggacagaaaaaaaaagacaacaaaactaggaagccacagaaacacgggttcatgatggctgaatgatatagagggtgacagatggctacaaaccggtcataggccatcacactcaggagcatgtctctcttccatgcctccaaaaatggcaaagagagacatctgagtcaggcagcctgcataggagatgactctgctgtgagactggatgtccacaatcatcttggggaccgtggtggaggtgaaaccgatgtcaggcaaggacaggttggagaggaagaagtacatggggatgtggaggtgggagtcagggctgatggccaggatgatgagcaggttccccagcaccatgaccaggcacatggacaggaacagcccagtgaggaccggctgccgttctggatcctctgtagttctaggaggaggaatacagagacatctgttagattctgtgggtctgtagagattggacaccttttgcctagaaaagaggttgagaaatcggaaacaagtaaaccaacacccagcattgtgtctgcattttggatataagcaattcacaaggcatgttttcagatttcagagcaatccacactcagcaataatttgcagttctgacaatacaatattgtaactgatgttattggtaatatcccagggagatattacccttaatgtcaccgtgggtgtacaccatgtgtgtatgaactgagatgttactcgtgacatcctagggagaaattacatgggtgatgttattggtaatatcccagtgtacacccactgtgatactgggagcaatatctctctaggatagtacaagtaatatcacagagtgtacacacactgtgatatcaggagaaatatctctctgggatatcacgaatgatatcacagagtgtacacacgtggtgtacatccactttgatattaggagtaatatcttcccaggacattacaaataacctcacagagtgtacacccaccgtaatagtaggaatcgtatcaccctaggggatcaccaataatatcacagggtgtacacccactgtgatattaggagtaatatcttcctagggtattatgaataatttcacagtctgtacacacatggtgtacactcactgtgatattaggattaatatctacctagtagataacaaataacatcacagggtgtacacccactttgatattagctgtaatatttttctaagttgttacaaataagatcacagggtgtgcaaacatggtgtacactcactgtgatatcaggagtcatatctccgtaatatattatgaataataccatagggtgtacacccactgtattattaggagtaatatctctgtaggatattacaattaatatcacaggacagggtgtacagccactgtgatattaggagcaatatctttctaggatattacaaataatatcacagggtgtacgcccactctgctgtcaggagcaatatctccctaggatatcaaaaatcctatcacagggtgtccaatgtctgccttccaggttctaagggattctcctgcttcagcctcccgagtagctagggttacccgccaccatgcccggctaatttctttttattttcactggagaagcggtttcaccacgttggccaagctggtctggaactcctgacctcaggtgatccatcagcctcggccgcccaaagtgctgggattacaggtgtgtgccatggcgctcggccaggagttatatattcaattcatttggaaacacagctcccatatttgagtgtgcatgtacttttatgaagaaatgatgtcaggaaacctaaggatgataataaatatgaaaagtaactggcatgtgaaaaggtcttccaatgaagaactcttaagtttcgagttcatttttagataatgcggtcctagctcttgtatcatccttctacatattccacatcaaaggaatttgtagcacggtgtcagaataaaatagagtgtatttcacggcttcttaatttcttccaattagactgagatctttttcttcaagagaagaacattttcattgcattctattttttctgaaaagagtgggccgtattttactgagatcacggatttgttatatatgatgttttggtcttctaaccttcttcagtggattttctctaaagtagtatgtacagaaagagttgaatagcaaaaaagtaaaacatgtaacaattctgagatttttggatttgtcacaactgagaaacattgctggcggtgtatggtctgcaagtgtgaaaatgttccttgtgaattgcttgcattcagcatgaagggctgctttttgtcttttatttttccaatcttctttccttctcaaggtgtccaagtcacacagagccacggagtctcacaggtgtctgagaattcctcctcctgggactctcaggggatccagaactgcagccggtccttgctttgctgtccctgtccctgtccatgtatctggtcacggtgctgaggaacctgctcatcatcctggctgtcaaccctgactcccacctccacacccccatgtacttcttcctctccaacctgtgctgggctaacctcagtttcacctcggccacggttcc

SEQ ID NO: 1885405 - DNA, 4001 bp, Homo sapiens
aaactgcttttaaacagaaagccataatacaatgttattaccttcgaatttggctagagaacatcaccaagcttaccagtttgtgatctagactccacttttccccatttttttcagtgtgctacttttgcttatatccattcttctgtgactttgtttgccacaattccttaaatacttccacccctccttttcataacagcgatctgccgtttgtgaacctcttttacagagaaaaactagaatgttacttttcctttcatagcaattctttaaaatttctgaaagcctttaaaagggtattagcgcaaacatcagagatcgctgaggttaaaactatcttttaaaaatgaatttcaccgtctcaaaaaaaataaaaatgaatttcaaatcaaggctaggctgattggagaaaagcaacctagtatatttataaaggtcttccagtgctgtctaagcagtgttgtcccaggtggcatcctatttttcataatttaccgaaggcccttggtaatataaatacagagaataacaggtgctgcactgagcagggggtctgtctaaatcaacctttttggctccattttttgacaaagggccaagaggttagcgtaatcggtccagtagttctcattaccttcgaggggaaggggaaagaggagaggggcgaagaaaggaaacggggagaggaagtgtggcaaatagaagatattcttcaggtagagccagggctcgggccgcgtccccaggtggcccctccaaacgaccgtttaccttgtcaattttctcttttcaatgaaaaaaaaaaaaaagacatctggctttttaagtaagagaatatacaaataaggaaggtatcaggtctcgtgagaattcggcgccagatccgcgtccggaaccccaccgagagccgccggtccaaccgccgatagctcgcggatgcccccgggggcccgacgccggccaggcttcccctagcgctcccgctacccataagccctcgcgtctcagcgcgcacgcgcagcggcgacggccgtctcaggaagaggaaaatggaataaacaactcggaggaaccagagcgcgagagagcgagtggaggcagaatttaaaaataaaccggcccctccgccttccccacccgcttgccgctgccgctccctcttcccctgcccgcgccctcgaagtccccgtctgggcccgcgcgctcaccccgtcgtcccgcgcggcccctttaagaaaagagaacgagagagtgagtgagagaatcccaactctccccctaccctccctccttctaccccctcctccctcccctctcccctcccccttctccccgggcggctccggctcccgcagcgggacagacccacccgcccaggcttttatccggcaccggcagcgtcttcctttcctcccccgtctatggtggtggcggcggcggctcctcgggcggcggcggaagacgaggctgcggcgttgccatgaacagtggcggcggcctcccgcccccctcggccgccgcctccccttcctcctcctcgctggcggcggcggtggcggtggtggccccgccgggggtcgggggtgtccccggcggggcggcggtaggagtgaagctgaagtactgccgctactacgctaaggataagacttgcttctacggggaggagtgtcagttcctgcatgaggaccctgccgccggggctgccccgggcctcggcctccatagcaacagcgtccccctggctctggctggtgcacccgtggccggctttccgccgggagccgtcgcgggcgggggagctgggccgccccccgggcccaagaagccggacctgggggacccggggaccggagccgcagccggcggaggaggcagtagcgggggactcgatggaccgcggctggcaagtgagtgtttttcgggcggggcgggccgcggcggcggagggcaggcctgggccggatgaggccctgctgccgacgggagctgagcacggcccgcgggctccccccctcacctcccaaggcggtctgagaggcctaggccgggcctgagccctccttccttcttcctgcttcccctccccactgccttcggcaagtcggagagcgcggggaggttgggttcccgggaacgtgggtgggaggactggggtgatgtgaagggggggcggggaggaagggggatgggctgtggcgtgcggagtgtgagaaagggggtgtcgtttccggggggtgtggaaaggggctgggtttgcaggcacatgtgttttgcgtgtccttgtggagtggcgtctgcagagtgttgaggttccctagtggggaggggtgtgtttgtgtgtgtgtgtgtgtgtgtgtgtgtgtgtgtgtgtagggggcgggaggtgaggggcgggcttaaggcttcgtggagtaggttgaaagaacggaaaaagtttgtagaaggcttgcgggagaaaggttttgcaggcaggaaatgctttctaaggattaggagggagcggactgtcgcgttcaaagtgtgctcaggtttaatcgagagtttagagtagggatttcacaaagacgcatttcatctgagtttccctgaaagctagaataagtttgctggtgtcagctgggatcctgtcttctatagctttgtatcaagcaaactcagcattgtgtcttgaatgcatgtcatgtgcagcctgcgtttatgtgcgactgagcacttgggtggggacatcttaaggctgtttatatttctttttcatgtgttgttgttgttgttgttgttgttgttttggagagagtctcgccctgtcgctcaggctggagtgcagttgcgcgatctcagctcactgcaacctccgcctcccgagttcaagcgattctgttgcctctgcctacggagtagctgggactacaggcgcgcgccaccacggccagataattttttgtagttttagttgagatagtagtctcgttgtgttggccaggctggtctcaaactgctggcctcaagtgatctgtcctcctcagcctctcagtgtgttgttatctattgacctgaagcttgttagttgttagtggagtttacaattgaatgtgagcgtaatctgttagagaatgttgcctttacgaatagagccggtgccagatgtccctgttttgtttcttagtatattgagcgtttctaaaccaaataggagtcctactttcttgggaattctggagaactagatcttaaaataatctgataggcagttcaatttgtacatgagaacattttgtctttttcttaaacactgttaatgaacctgataggaagttttagcatttaattggtctatgaggattatttaatatcttccccggggttttgctttcttgctttttctttcgagacgggatcttcctatgttgcccaagctggcctggaactcctgggctcaagcgatcttcctgcctgggcctcccaaagtgctgggattacaggagtgaggcaccatgctgggccaagtgttgttctgttctgttcttttctcctttctctcttctttctttttcttttatagaagtgtttcatttgttgtgatgggcttgactttaatgaagatatatttgctaaggctgataatgctaagaaaattaattttgtaaattcagatgttttgtaaaacaaatggttacttatgggtggaattttatcactttcgagcatcaactttgcattttcaggttaaagttttgctggatgtgtgagtcgtgactcagtagtaatgtttgattagtaaccaatgacactgaacaatagttttcttactgacagaaagagacactttttttttttttttttttgagacggaggcttgcttgtcgtccaggctgaagtgcagtggtgcgatctcggctcacagcaacctccacctcccaggttcaagcaattctcctgcctcagcctcccaagtagctgggttttacaggcatgcgccaccacgaccggcttatttt

SEQ ID NO: 1885406 - DNA, 4001 bp, Homo sapiens
ggacgttacctaaaaacacaataatcccacttattctctgacagataatcatcagtcatagccccactactcacttttattaaagaaatagctgggcccttttaggtaaagccctttatatactgggaaaaaaggtcatgttatccattcctcaaatcccaggtaaactcctgctggttactcaaaaataaaaaccaaaatgaaagcccattcatcacagggatgcctaatcttgtaatgagggaatcactgagtgtggcacagggaagactcctgagagattctgatggggtacaagtgtgctgaccaacgtcctagatacagtgggcccttgaacaatatgggggctagggatatcaaccctgtgcagtcagaaatctacggataccttctgactctcccagaatgtaactgctagtagcctactgctgaccagaagtcctaccaataacatacagtcatttagcacgtatttggtatgttacatgattatatactgtattcctgcaataaagtaagctagagaaagtgttaggaaaatcataacgacaaaatatatttattattcattaagtggaagtggatcatcttaaagatcttgatcttcattgtcttcacgttgagttggctgaggaggagggggcttgatcttgctgtctcaagagcagcggagtcataagaaaatgcacatttaagtggccccatgcagttcaaatccatgttgctcaaggctcaactgtacaccgaactgaaaaatgattccatttttagtaggaaatggcctactctaagtcctactgcttccctttgcacttgatggcaagggtctttaactgtgtcagtggagctggtttggctccactgatagagactccctgaccatctgataggccacttttgttagaggagaaggtacccccttgcctacctgttcttttcttacttcatgggtcttgattcctgactcaggagcacccattacagaaaagccctgggactagatctaattttatttaatgaaaaacctatggagcatttactcttgcttctaataaattaacaagtcagggctttcttctgaataggagggtctcttgactctttgatatttgacttttgaaccagactagatgaggcagagcttcagcacatattttaccagtgtcttcagcaaatgcctttctctttgcaaagctccatattactaccaaaaattaacccaactaaattgtaatttctactcacccacatttattgagtactgtgtttccttgaaagatctcaaacaaggcaccttcttgcaagatcttcaccaccagaccttcatgatagtcacctcctcattaggctgagacgcatacacagtgattacgttcagacacagggactcctgtgtcttaagaccttgtgtgacccttgtaattaaagcattacactttgcaaaggctgacagtggtataggggctgtctgaaactattcagccatagcctggtctctgctttctttttacaaatgggaggttggctaaggcagacacagggatggctaagagggataaaggacgtgacttccatagaaccttttgttcctagaggaacctctccatgaaacacacagtgaaactagattaaaccaaaaaacgccctcagctccagcagatcctgagctacaaagcacctcttccctaccgagccttctcacccatgcgcactgagtttctgagtatcagaaagtcaggtttctgaatccctagagaaagtaaaaatttccttggacacaatgggttttctttgcttcctgcatgacagtcacgaaggggaatctgaaatagagaacttgaatatgcggcttgctgaagggaagtgtactgtacagtagccccccttctccacgggggatccatgtcaaaatccccaggggatgcctaagactgcggatgggaccgaaccctgtatacgcttgcctttaatgccttttccatttcagctcggcacttagcccacactgtggctgtaacttttgtagttttaggtacagcagcaaaactagcacaaatttctttgtcctttttcacaatttcatggatagaagattgattcttactgtagatcttagcaatctcagcatacttttttttttcttgagaactttcaccttttaactaaaggaaggacttcatggctggtttttggcatatccagattgccagcatcatactcttggaactttgaggccattgtgaagtcaaataatagttcctgccaggcacagtggctcacacctgtaatcccagcattttgggagtccaaggcaggtggatcacttgagctcgggagtttgagactagcctgggcaacatggcaaaactctgcctctacaaaaaacacaaaaattcaccggtcacggtggcacatacctgtagtcccagctactcggcaggctgaggtgggagcatggcttaagcccaggaggtggaggttacagcgagccaagatcatgccactgcactccagcctgggcgacagagccagcctctgtctcaaaaataaaaaaggaacctaagcactgagaccccctgacagtagatctggtaactgagatggccactaagtgactggttggtggtgggggtgtctacagcgtggagatgctggaccccgagagagagggtttatgacccaggcaggatggagcaggacagcacaagatctcctcacactactcagaatgactcacaatttaaaacttatacattgtttatttctggaattttccatataatgtttctggaccatggttgaccacaggtaaatgaaaccttggaaagctaaaaccttggataaggggggactactgtaatataaagtttacagttcctggggtgaaagctcaggcagaccctatctatgcattattacaacgtaccatcaattcaaaaccataaatttgcagaaacatcgttgctttaattcctaaaatattgaatatgaataataaaaataatatatgctttgtcttagaagcacctttttaatatgattgatgtgtattgatctgtttcttcattctaacatgaacatttctgtaacagtcatttcccctgaaatatctaacctgtgggtacctgagacagcttgtcagttaggaagaacagtggtggcgatagccacgtagggctggtttggtcgtgagtgcaagtgtggttgcagcagctagagcagaggactgtgtggagaacatgggtcaggtcagaaggcagtagccaggagggatgcagagtcgagagagaatttgttgattggaatgactcaggttgactttcaggatgaagagaaggggccaatagagagggaagagaggacagttgatgaggcaggctccaagagaggagggcaaagcgagatcaggggctccagtgaaatgcctgagtgtgatgagaagagcgctgtcttgtgaggctagagagggaaccaaggatgggtgggcctgggaaggctggagaggtagcctgtcagggagctgctaacccacttagaaatactcttattgacataacaaggttttttgttttggttttttgtttgtttgttttgagagagcgttcgctcgttccccaagctgaaatgcaatggtgcagtctcagctcactgaaacctccacctcctgggttcaagcgattctcctgcctcagcctcccgagttgctgggattacaggtgcatgccacgggtgcagtggctcacgcctgtaatcccagcactttgggaggtcggggcgggcggatcatttgaggtcaggagttcaagaccagcctggctaacatggatataacaaaattttctatttcaaaagttcagtcgtgggcacaagttgattttgccttacagtcttgatagtgaaggtgcatactatttttaaagctgtattccttagatactaccatattatctaatgtttctaataatggaattagcaaaaaatgactacatcatccaaatttg

SEQ ID NO: 1885407 - DNA, 4001 bp, Homo sapiens
tttcttgcttcctgcatccttagctgttgaccccttatttacatcactccaacctcttgcttcatgtctcctaccactcttctatagtcaaatcttcctctgcctccatgctataaagatacatatgactacaagtatattccacccttacaatccagaataattccctcatctcaagattcttaatcacatctacaaagtcccttttgtcatataaggtagcatttacaggttgtagggatgaggagtcattatttaatttagcacatcctctgaattgctctgctgaaaccaaagctggtttctttagcaaatcaaggttttacagcctccaagtttctctgttgttttttctgtccagaatatgattagtctcatcctttaagtctctgctcaaagccacttcctcaaaaatatcttctctgactctgtttctaaaatcttcctttcttcccactctttagttttgtattattttcttcatagttcatataacactaatattttattttttttactatcttattgccttcaccacactaaggtcacagcacttgccctgttcattgaatcatttcctggattcacagtactggcaaggacacagtaatctcataaatatatattgagtaaaataatatactattccaattatacaggcaaacggcctaacaggtgttaattaaattatttaatgtcatgcaactattagtgacagaactattttgtctcagatatgtctgacctcaaaaacctacattctttatattatctcttttactaatggactgtaactttatccatggcctttataatgtatcaacataagccacaagaagaaagaaccaaaaccaaaaaaccaaaaactagggaatcctggagaatgatatttttgataagcagtcttggaaaccatttttgtttcttttctgacattgtgccattttggaatccattccatgactctgaggtggatacaggcacagggagtgacttctttaagtttttgaatatgttatacaatatagtccttaatatgcaaattatcttcagatcaccataaaaatgattatggaatgttaaatatattcattctttgggtagtttttcattgaaatatttaggaagtctttaggttttaattcagtattgaaaatataaatttatacataaaattgttactttttatttattatttctttaaagataagcattaatgtatcaccaaatgattgcgatcaatatgcaaaaaaaactatcattcttttttaaaaaaattaggaataaccttcttctataatgccatgtagtttgtgagttatttcggcaccatttattgcatcaagctgtttgtctatcagccatattcttgaatcactgcattcatgtagagtagttgttggatgtgtgagaaactagaattttatcatgttgactttgttttgaaacatgcctacttttatcatttcctttgtaatttttattagctaaacagataatctcacaaacttgtattacagtttttaaaagtttttggccgggcgcggtggctcacgcctgtaatcccagcactttgggaggccgagacgggcggatcacgaggtcaggagatcgagaccatcctggctaacacggtgaaaccccgtctctactaaaaatacaaaaattagccgggcatggtggcgcgcgcctgtagtcccagctacacgggaggctgaggcaggagaatggcgtgaacccgggaggcggagcttgcagtgagtcgagatcgcgccactgcactccagcctgggcgacagagcgaaactccgtctcaaaaaaaaaaaaaaaaaaaagtttttataacactatgctattagtgttaattacagttcatacaatacgatttacaacaagttcttaatattaccccaatacggtaagaaaaacatacctgttcgagagaagaagaagaagaaaaaatatatatacatatatatatttttttcctgtggtcattcagtggcagactaaataaaatgagaacattctagaaccacttttctcttttacattcttaaagaatgctaatacatttagaattaatttaaattaaaattttaaaatgacatgctatttctgttaacaatacggacatcttaaacctttcgaaatattttattcttgcatagtttaaccctgattcacaatttagcacctatgctggtaagagaaataccctgcagcttgagatacctggcactgggacacgaaaacagctacaaaatctctcctgttatgaggatagagtcttttagacagatttaagactttcactagggacatttctggaatacgctccattgtctcaccttgatcattttgttgagttgaaaattgaattttaatgttctacatctgatgattggacttatatgtatgtgtgtgtgtatatatatatatgtgtgtgtgtatatatatatgtgtgtgtgcatatatatatatatatatatatatatatatatatatatatatatatcagagtttcgctcttgttgcccaggttggagtgcaatggcattatctgggctgactgcaacatctgtctcctgggttcaagcaattctcctgcctcagcctaccgggtagctggattacaggtgcctgccaccatgccagactaatttttgtatttttagtagagacggggtttcaccacattggccaggctggtctcaaactcctgacctcaggtgtttcacctgccttggcctcccaaagtgctgggattacaggcatgagccaccgcgctgggccttaatattgtttttaacatttaactatatatatatatatatatatatatatatatatatatatatatatactttcaaacaaatgagggcaaaattttaaaattggctctagctgtctttggcaaatcaataaggataaatttacaaattattttgaaaatatattagttaagacaagtatttctaaaatagatttaaattatttaagtagatttaatatgcttaaaggagattccatttttctatgaaggagaaaaactttttaaaatgctctttattgagatgattaattttgactgtacagtaagttatgaaagaaatttttgatacaaaataagtagggctctataaaacaagtttagatttcattcaattttggaatctatatagtactttcctaagtagactgctttataaatattagatgttttataagtttaggttgaatggatgaacacatttgatgtgacaactacatagaaaaggaaacaaaaaacttgacatttttactaactaatatagtgtcaaaaaatcagttttgtttactagaacaagcctttttatggtctgaaaataaaatgtacaataaacattgtggacaattgtatgagttctatattgaattatttagaatatttaatttatagcaccaatgctgagatgaaccaaatatacattttgaggacaggacaagtttttagccgtatctcaaaaaccaataaattttcctgaaaaacccatacattatcattcacaattaaacttatataaagatgtcctaggagagccatttgcaaattatcatcttcatcctatactgtgaaatgtctacttttaaaactctgtctatttttgcctgcatgttcatgatatatattagtgtctgcatatatatactgcaaattcaatattttgaagtaattatctttatattatctttataatataatttatctttatattttatactgttagtgtagttcagtacatgtttattaccttcttctctctttcctaaaaaaattgcgcatgactcaagatgctgcctttattagatacattatatgaaaatggtgtggtcatcaaaaaggcaattcttacactttaatatttatggacagctaaaaatgtataaatgcatatatttataaaaaagtagaactgctttttttctgtttggcctctaaaaataaattctctaatatg

SEQ ID NO: 1885408 - DNA, 4001 bp, Homo sapiens
ccatgtagatttacagactttggataaaatatgaaggagtttcaaatgtcttttattttctcaatgaaatgtgatgcaaggtttcattggaatttatacaagggcattcagttactaaagtaatggaaaaacataattatgagaaggtttgcctaggctccatctttgcatgcattccaggttgataaccctcaaagaagtgaaaactccaaggtttttgtttcatttttgtcttggatttcacctctttgctctgatactgatattttttctgaactcaacacttataacttgtcgaaacaaaacaaaacgtcatgtctttctttgctacccaaatatggatattcaacattagaataaaagataattttgtgttgttccttataaataaaatgtatgttctttataaatacaaatgtataagatttttggccttcataactttatataacagtacatatatatctatgtaactgtatgtaaatatatacatgattttggccttaataacttcatacatatgcatatataaatatacatatatacatacattcatattcatatatatacacacatatatacatacatttatgtacatatatatgaagttaaggccaaaaatcatatacatttatatacagttacatatgtatatttatgtattcttatgaaacaacatattatacaattatatataatatatatattcttatagaagatagtagcataaactaagaaaagaagcaatccatatataaatccttacataaatctctgatctataattcacatacttctacaaaagaagtctgaataattatattttgtagtctatgtagaaaaactaaaataggagcatatgtgaatgtctcataataaattttactttttaatcacatatatctgcacaataggtacctttaagaaacttgtaaaatagcatactaaggaatagtatctatttttcttgcagtcatgcagaaattgcaattgcttttattttgcagatggataatcctaagcaaggagaaaaatcagtgtttgttttttttttgtatttggtttgcagagttactttaccctaaataccttacaagatctatctgaaaattatcatttaaattggctcctgaatttcagcatctgaacataattctcccattttcttatggtcagtgacagcaacaataacagcaacaacaacaaaactccaaactaacaagaattaaaatgcaagacaataacaaactatcaataacctgaaactataccttgaaaacatcatttctcttatctggtaaattaatcttttatatgtctaattaaacaattgaacattttagtgtttcttttcacttacgaaagggctttaaagtgttttaagggatacaacaggtatgaaaaaatatttagcaaattttcacttaacattattaacatctgtctgcattatgtgcttcctctaaacattatatttttgcctttaaaatcggcattcctttaattgccttgtagctattttctatgcgaaatctggtgggatagagcatttccactgaggagatcagattttaccagaagcaccatttcccagcactcttttctggtagaagctgggttcctggtggaaatgatgctgcttttaggatgatctgaagtactctggagagataccttctgctcagttaccattcaagctggaacctgctatgacagttgtcaacagtgccctttctgatgtcgcccagttgtgttccatttagaataagtacttaaagagacacctgctcggaaagccagaatagagaagctgcatgattctggcaaacatatgtagacaataatatccctttcctaccttgggcaataacttaataaagcctttaagacaacagaatcttaagtagtcatcctttttgttgttgatgagaaggagggatatggataccagcatcaaaactttctttatgtgcctacagctgtgatctgggcactaccacgttatcctgctgctatgactctccagccatatgctgccgtttatagtacagcctatgattcaggctgcaatgcttgtgaaattggcataaaggctgtcatcaccgtactctaaacaccctgcaagccagatttttcttcttcctttgaaaattagacgagatcccccaaatgtcaagcatatagatggtatatattctaaacatataaaggtgtaccattcaaaaagagcaaaatattatttattaattatcacagagggagaagtataaagataatctattaacagaatgagaaataaaatgacccaacccaaacctattaaaggtctctggtaagtaaggaaaagcatttaaagatgacagactaagtctttggatcactggggtgcagagcagtggtctgcttttcaacattagtgtttaaatggaaaacaaaaatctaaaattagtttcaaatttcagaagcctgattttatgattttatctttaccctcaggaattatacaatgaaaaaatgataataaaggtggtcctatggataaaaacaaaggtaaaataaactctctgcactttcccaaacatcagatttatccttatttttcttacttgattacagataaagtgtaatatcctggactagatacaggtcatacaaatgacaaattacagtttgtatctgtttttcccatctaccctgacttccacctaaaggcgcttgttctgatcctagctctacctgccttgcctaagtattgacttctgttgttcatattggtcttgagccttgttgggtttatggaattgctactcccagtaaaatattgtatgtatggtaataagacatgtgtcttatggagggtgatctacagtttatttatgaaaagtcatttgaaactcaaagagttattttactggaaaaaattcaggtactgaaagattccatagagaaaatgagtttcacccaaagggctcagataatcctcaaaccatacccatatgaaagttgcccagtataactttaaatacatctccagtttatgtgttctttagattgactactttacatagactactaccatatcttctatacatttctattaattacttaaaatgaataatcaatatttttcctccaatatttaaaactaaaataaataaataactgcatgcaactgaaaagtagtttgccaatgaggggattttagaattgaagaatatcagttagatggattggatgagacagtaggcagcagacactttgtgtatttttttcctcaaaggacagagggaccgtctcctgtcttactttgtacatgccctatctttcaacagaaatattttcttgaaggccctatttttctctaccaatttcaccttcttatcctttctttaaaaacgtagcaaaattcacctcttatagactgttttctgtgattaactgtatctcactgattactgaattgctcttccacaggtttatttagaaatgtattactttccactcattgtaaagttcctcttggagggggatgatattatagcacttggtgtataaatatattgcctcttaccatattttatggcaattatttctatttcctctactatacggagatcttcccaaggtcaagtacattatttttgtatttctggcacctagttatctggttcctggcacatagtgggcgcttaataaaggtttgctgaatgagagcattaatgatacagtaatgactgttgaaagattcttccgtctccttgtcccctgttccacctccctctctttctctttgctctaaaaaatgtttagcattgactccatgttttgaatttctcagaaatgatttcatttcactagctgggtgcacttgggaaaattacttaatgtatctgtgcttttgttttcctaactatcaaatggaaacaataataactatctacctagcgggatggtttttagtttaaataacttcataagcataagccatttatgacaatgtc

SEQ ID NO: 1885409 - DNA, 4001 bp, Homo sapiens
agtgacgcaacactttcactctttatctctgatttacatgctaataaagacaactgatagacaatatgatatactttggccctagaagatccttaatgaggaaattctgtggcctgttttctcttctgtgctattttttgtcttctaaggcaggcatttttatcagttcagtttgttgctgtgactagttcaaacttgttcagggctttatgcctgaaataagtaatcaattagcctatatatataaatatataaccaaccattacaattatctaagaatgtcagggagttgtgaagtggaaacaaattaaagagttgcaaaattaaaagagctcgtcttccaacagaagtgtgctgacatatattaaagaataaatgaattaaagtcaccaaagaggaacaggagttaaaaagaagaccattgtttagatggagtcaggctggtgcactgccaaggaaagcaaacaggatttctgaaggcttggtatgaatttcagcttgcatcattccgctggagggggtgatttccccaatatcatgttagatccatagcttgttcttgacagagtggcagtacctttcctccactgcactctcaccactagcatagatgtaaaacacagtaagtactcagaaactacttgaagagtgcagttatcagtagagatgatcgaaacatttgtttttctagggaatatctttgcctttcttcttccagaatcctctggttataatgtgctcactgctaggtcaccagtcataaaacattatgtagaggttactggtcattatcctaatatatttatcaaaaaatctggagtatatgaaactgcctttcattgtaacattagacaaaaacatttattctatcaaatacagacttaaaactgccaccaaattggaagaatatgatcttaaatttaaaaaaaacccatatacttaaacacaataatctatctttatctaccttcctaaacattaatgcatgagacttctcttaatatcatgaatatgcactatgatttttatgttacatctttttcttgtttccatttatgctagtgaaatttattagtatccttcattgaaacactattattttccatggaggaaaatattttatttcctttatgaaaagggtgctttacttctgaaatacagaattcattttgtttcggattctgtttgtttgttttcacatcaacttcattctaaatgttcattcaaaattatttttcagacttgagttcaggtgaaaatgttaatggaattaaaaagtagttagtcaaatgaaatttcaatatataagtcaaatttgaagaaaactgaattaataaaggattctaagtttataaagaaatcaaaattatgctttcaaaaatattatgtaactggagaaagtaattttattttgagatctctcatgattctttaatatatattttttcttattagtatgcaaccttttggtaacatatataggagacagttaattttggtaagactacataattcatacattcttcatcttgacatacatgatcaaatactttataacgtccactagccttgctcttgtccactgcaatggaaaaaaaaaatgtgtctcatctactcttctctatttatagtttttagatagtaatggattgatcttacaaaattgggtttacacctgctgatgtcttggagctccctcttaatcctgtcatatatagagataagttatgcactgttgacagattcaggacactgtatcacagaaaaataacaagaaaatatattaccgactctggtccagatgagatgtgtaactggcaagttggagtcaaggacgtatttttttctaaaaacccgctaatattaaaaatatattcagatgagccttctggaaaagaaaattaacattaaacaataataaggaaaccaaacttgagagataatgcccaggtcccattttcatggatattttatgtaataagcgtattgttgactagaaaaagttatctgttataaacaacatggagcatttttgtcaaagtttggataagtaggagttggaagatggaaatatattgattatctgctggatgatgattacatcaaattaagtaaacataaatattattattactagaaattcagtgtggaaacatctactttaccctcttcagagatgtgaatttttgaagtgagaaattgctatcaattgtgcttgtcactgaattatatatatatgtatatttatgtatacatgtttttatatatatgtgtttatatgtatatatttgttttatatatgtgtatatatgtttttatatataaaagaatatacatattctgtatatatgagtatatacaagaatatgatatactaatgatatattcttttacatataaaaaagaatatgatatattaagcaaatgtaagaacctaacctatatgtatatgtatatgtatcttcttacatttgcttaatatattcttttagagtatgaaaaatgttatattcttttgagcaaaggaaagagagggagatgatgaactgtattaacaagtactgtcactcaagttttcaccaatccaggcatagctaatgcttggagtttgttgcttataattgtttaaaatattccaagttgtagaactttattctgtttagcactcaagatataaagacatacaagatgattatttaggcttcatccagtttagcctttagattaatggggtcattcactggactattattaaaatttgctaaggctttaaaaattttgcagataattacagaaaaacaaaacgaagaaacccaaaacattttttcttccatcttaaatatctttgttagttacaaagagttaatgatacatttattatactgctatgcactgaaaattttgttatcagtctttgaaatgtgctgttacagagtgcttatttgtttcttctaagaaaatggcctaggcacttagcagaatagtaattcttaattgttctacagtgcaggtaaaaatgctgttagtgtgaggaaatatacctttttgttcaattttttatgttcccgttttgctaatacctcaccctgttctttaatattctctgagagtctgaggaagtggctgctataccaagtgcatattcaattagacattctgtcacataaagtgagaatgtaaattttaacaataatttagatatctaaaataattcacaagtacacaggatcgttagttcattattcatgaataaagtgatttagagctgaagctgagatgaaagtcttcctggtaaagaggttgagtgaaaaaaagacttgggatcatggagtaatttcataaagtgctatttctacaatcaggaagtgacattcattacttgataaaattagttgaggaatacattttattctgtttctcaaataattgtatttgtatgagcataggaagcaaatcgttggaaagatgaaattaaattttagtacatttaatggctacaatctctgtgtgaaggaacttttctattcctaatagtgatgtgactttctaacttcataaggtcatttgggattttggtgggccagatgtggaaaatatttctagctaatttaatgagtgataaccataaacttatctataaaatgacttttaaaatattccacatcccagctactccacattatattaattgaaatcacaatgaattcatgatttgtaacatatataatatttattccaatacttattcaccatggttgggaatggagtgtaaatctttaattcctgcccccaaaatcccttctcttagactcacctattctgttagtagtcccagttgtcacttagtgtatatgttgtgctccaaacaagtttgctgcatgtgagtatctataacatgaatatctctaatatgaaatttctaacatatgaaagaaattacatctccttcatgtgttagcaactttgcacatcatctggttgtcttcattggctttccatag

SEQ ID NO: 1885410 - DNA, 4001 bp, Homo sapiens
accccagaagtacttgcagcacatccacaagtaaaaacacacaacgaatgccagagtttcgtgtgttttttaaccgacatctttgtggctgtgaacaaacttcataaataaaatagaatcaaatgcttctgacctagagagctgggtctgcaaactttttttttatcgtattccgcaacagttaaataaaaaattaaaaactcaacatgtctccttgtaaactacatcaattaacaaacacactatgtccattatcaaatataatagaaaaaatataggaaaatagaaaatagaaaaatataggaaaatagaaacttttaagccacggtgaaaatgtttctataaatgagtggttctaatgttttcgtgagcgcccattttggggagcaccgccagctgcccgttcaggagtgtgcagcaaactcagctgagagagaaaattggaacaaaagcaggtgctcgcgggtacctgggcctagcctcttagtgcggccagccaggccaatcacggcccccggctgaaccacgtggggccccgcggagcctatggtgcggcggccggcccgccggtccgcgctggctgtgggttccctctgagatcagtgcggagctgtcaaagcgagcaggggtggcgccgggagtgggaacgccacacagtgccaaatccccggctccagctcccgactcccggctcccggctcccggctcccggtgcccaatcccgggccgcagccatgaacggcgaggagcagtactacgcggccacgcagctttacaaggacccatgcgcgttccagcgaggcccggcgccggagttcagcgccagcccccctgcgtgcctgtacatgggccgccagcccccgccgccgccgccgcacccgttccctggcgccctgggcgcgctggagcagggcagccccccggacatctccccgtacgaggtgccccccctcgccgacgaccccgcggtggcgcaccttcaccaccacctcccggctcagctcgcgctcccccacccgcccgccgggcccttcccggagggagccgagccgggcgtcctggaggagcccaaccgcgtccagctgcctttcccatggatgaagtctaccaaagctcacgcgtggaaaggccagtgggcaggtaagcctggctccccacccctttctcctttccggttctcacccggccgccttacctccaagcgctcccaggagccttctctctgttcccggcgccttggattatcccgggtcggactaaactacatcagggagctaccgagcccatccctcacagcagtgcttctctagtccagtttgaagcatctttcccacccagctctcctgggagtgtacactccttccttccctgttcgctgagcccatcttcgccccaggagcccgcgctcccagcgccatccttagagagccgaggctgagtcctgctcagggcttcggacactacagatcctcctccagcaggggatccgggaacccaggactccttggtagtgcacatcgaggaagccgagtagggacatgggtgcctcggacccaggccccagatcgccttcggagccccggagcccctcacttcccgcgcttcgttaaggaagggcaggcatctaggggcgccaggtaggtgcagaaaggcagggagggaaaggaaactgcacccaacccagcagtgtccggctgccctggttgtggaaacaggataggagtaaagaggaaggggctggggcaaggcgggggctcaccgcgaggctgaaagccggcctctcaacgtcagagcctggcagctaggagagcaatctgagaagcgaattcgtttttcaccaaccgaaagcaattgaagctgtctccccgcaccgcttcccaggaagtaatttttcaggagatgggcgctccctgcctagctggtggggaggcgagaggcctggttcctgcggccctccgcgccggcagagaacagaaggtctttcccggagccgggagccggaggcacggggtagcccccgggtcctttgcggccccgcgcgagcggcaagttccggcgcggcctgtgtcgtcgccgctactcactgtcatcgctgccgtgcctcagccacttctggtcacacctgcaccgcaaatagttgccttttcctttcaactggcagccgggagtagggggaagcagctcgagccggcgtcccccggcccaccccgaaaatcctcagcgcccatctgcggggtctggccagccctgcctgacactgaccccaggcgcagccaggaggggctttgtgcgggagagggagggggaccccagcttgcctggggtccacgggactctcttcttcctagttcactttcttgctaaggcgaaggtcctgaggcaggacgagggctgaactgcgctgcaatcgtccccacctccagcgaaacccagttgacaggggcgccagaagctgccgcggcgcctctgcaaatttatccagctcgcgcagcccgggccaaaggccttgaagtctccggaaatgcggggttcttaggaggcgggaggacagtccctcgaacaaaggtggggggctcctcgtcctcacccagttttcttccagggctgcctcccctccagacctctcttctggcctcctaggccctcggagctcctgctttcccaccctgggccttcctcaggaaatgggcgacatcagggtcccgaaagaggatttgtgaggtggagtaacttccctatcccaacccaaggggtgatacctctgctctggaggacttgggcttaggctgacccaagaagccagaaagtaaaaccagaaggcaaatcagcagccttggcgagggttcggggacccaaggagggcgacactctcgggctggagttggccccaggcctttgctggcgccctctaacccgctgcatgctcgactctcggggaaggagacgacctcccctctcttcccctggaagccgtctgcggggccggctgctatccccgcgttcctctaggggaaacttcgatggagccgaaattcaaaaattgcaaacccacctgcccctgggaagagcgaagtgacaaaagggctctcactggcagtacgaatctgaatgctaatgacaacagaggttttgaaaaacattgacccccaaatgcttcagcagcgctgtccagctggcacctaaactgcatcactctgcgccttggggaagggcccaggcttggcgaccttgaccttttcccaccatcctcaacctccacccctgccgcgtcgcgctgagcacaggtcccccgggaatagtgcaccccaggaagtctctccctgagcagtctctcgcagggacttcacgaagccctctcgcagggactatacgaagcccgcagcctaaggcaggaacccagagacatgtcggtttaatgtaaaaactttggagagcctttcaaaatgtttattgaaggcccgtctcgcttctctcccaggcgtgggatgccaggtagattcggggatgcccccagggagtagaactctccctggactagggtttgagcctctgcttcagcttctggcgcctcttctcgacctggggggaaacccagtagggttccatcgcgaaattaaacccgcccccaacacacacacactcgcctttcaattccttaaggcttagccaacattcacaggagaaatgtcccctgcctttgctctaagacaagcctctccccggaactttggtggaacttcccgcgccagcgtccacagcctgggtgcagtcagtattttccacagaaaagaaaagattgggacctggctgagcgcagcggcaaacagtgaatgtgggtctccaacctcctgggccagggcgtcctgttgcctcttggagacacgagaggcttgtttctgcaccactaccacctcctccgtagggctgtcggttctgcagctgggctagggcccctgtgtctcccctcaacacctctgagggcatttgggatccagggcgta

SEQ ID NO: 1885411 - DNA, 4001 bp, Homo sapiens; identical to SEQ ID NO: 917400

SEQ ID NO: 1885412 - DNA, 4001 bp, Homo sapiens
ttcatttgatttctcctttgatgtttggggggcactttgcataaagggccttttcatggaacaacttattttaaggaactcaaaatagtttaggatggctggagcaaagactgaaaggagtttctaggcaaaaaggaaggtgtctgatttatgaaagtccctttataggatgttaaataatgtgttttattctaaagataatgtggaagttgaagattttaagcaagaaagtgacatgattagatcaaaattttagaattactgctattaaaggcaatgatgatgagggcaactgaagatgaactgagatggaggtcagcataaaaggcaaagatattaaaaggcttttgctattatttaggaagaataaaagactttaaataagacagtgacagtggtatgagagatggatgggcaaagtttgagcagtcagggaaagaagtagaagcgttctctgtggaaaataaagtgaacaaatgtttggagaaagggagggtgagcaaatcagtttatctggggtatacagtatttgatagaagctttggaaggctgaagtggagagccagagtaatggagtagctggtgataaggttgaaaatattggtggcgtcagcctgtggcaaggctacaacaaacagactaaacaaatataattttaactttcggcagtattaaatttataaacaatttttattgtaaaatacatataaaacctaccgttttcattaagtatatggtccactgcattaagtacattcatattgtgcaacccacacaacaccactcatctccagaatctaaatcatcctaaactgaaactctattatccactgaaatataactcctcatttccccttctcctgggcaccctctccacccctgctcttgctaccattccaccttctgtctctaggagttttgactactctaggtacttaatgtaagtggaatcataatatttgtcctttcatgtctggtttatttcactcagctaaatcactttaatcaacaccctggttattcagtagctggattctaatttgtattctactctatatgctgtattttaaaacaaatgtcttgctttgtagttcataatctttccacctaatccttaaagacacttcactctagcaaattataaactcaagagttcctaagaacaatttagcctatcggtgtctctcataaagagcttttattgatctacttactgaaaatgtctttagattgtgaatattttcattccattacagttcatggaacgtagaccctttgtaaaattccacctagtatctaaatagaactcaagcaggaatcaaacttatttgatcacccaggaaaatagtttatttatttgggttgctaatatgaagactctctcttttgatactatataatttcccgatctgagatagggctgaatttgctctaaataaagagaattttaaaaataacaaaacttatctttagctgggggaaagtgcaggctggaaactacctgagagacgtgaaggttctctcacctttcccttgtgggcagccctcagtcattagggctctaccagcaagtcaagtactgttggacaagacactaatcctctggcggtctcattgggctccattagaccagcctgtgtttacaaacctcgttcacatcacagcatacacagaatatgatactggtagggcacttaggtaaactgaggaggtagtgtgctcggcacctggaacctacgggccgcctggtgtcgcgcacgcgggagtgtacgctctcaaagagcgatccatccggcaggaccgttccagctgacaggccacggccgtcttaccggggacgagctggggttcccgctgtttctgaagtcagcggtcttttcctccttgtaagaaataaggtctttatatcataaaggtaagcaaagaataaaaaggcacaaaggccgcaagcaacgcacacacgcaaaaatcgaactacagcactcgacccgcgcattctccgccgaccttacgtctctcccagcaggctccgggagccaccgcgagacttcatcaattctcgcgagatttaccggcagccatcttcttgggggtgctgggagccgggaagaccccctgaatcgttcccattgagctgcccttcgccttcgctttctttacttttgccttttcgacgtagccaacaagcacctggtcccgaggctgagagaaggctcgggtctaagcgcgtgtcgcgcttccggtctgggtagatttgctggggaagagggaagggggagggcccgggcaaaccgttgctgtttcagcccgggctgggggccggggacggggagctcctggcaccccgtgcacttgtggcctgcggcggtccttgcagagctgttcgccgaccggggcccgcgggaacctgccaccggcgcctcccaccgcggcccacgcgggcggcgcgcggaggagggggcgggggcagcggcggctgtagcggccgcgacctgggcgggcggaggagtgtgacgggccttagggccgctgtggatggtttctaaaatgatcattgaaaacttcgaggcactcaagtcctggctcagcaagactctcgagcccatgtgagtatccgggggatatctctttgcagggatggcagtgggagataggcggacccagagatctgtgcagtttccccaagtgcctgcggtggaggccgaagcggtgaacggaggtcccagggttctgtggcttctcctcctcgtccacctcgcttccagattcaggatacccccgagagcctgagtcgagctttattttattgctgagctgctctcgttttcccgttatatatagaccgtctccaacccccacccgcaatattttccgggggcctcaaaatcggtttattttagtgaaaccgactgtattttacttcctacagattattttaccttgtttttctaaatgaagtagacggcctttattggggattcgggcagttctagcttaaatcactcacgtttcacctaaatataattcctgaaagcaaggccacgtctcccatgtgctgtctggctcatctgcacctctcttcactgattgaagatgtaacaggtgctgaggtggccagtaaaattcccctttcccgcctacgcgttcgttagcttggagaggaggaagaaaattgaatcttcatccatatggaatatttagcagttttaagtgggatgctatagatagattttgtgttgggggctgcggttagagtgctgaaatagtcttagattggaaaatttaaggagtgttttgacgacttgttaatacaaaatatgacatggaccaaagtgcttaatcagaattggttgatttacaataatgcaatggggaaaattcacgtatttaataaagttattaggtacctactgtatactacgggaggctttggggatagagcttttaaattctaaaatcgacaagacataaataaatccagatattaatagagttgtgactattgtaataatagagaatcatgtaaaagtgattatgaggggggctatttcacattggtcaaggaaggactctcagagaaggtgacattggagtaacatctaaagagaagggaccatgtgtgtcaaagtcttggaaaagaacattccttgcaaaaggaagagcaaatgaaaggccctgtagcagaagtgattgtggtgtgtttcaggaagagaaaggccactgtggctggaaagagccttgtgatgagggagaggatataaaggcaacaagttggacaagtaggtaggggccacatcatgtatgggaagacgtgagatgatttaaagcagacaaggactgatttaattttgttttaactctgcctattttgtagagactgaaagggcaagaatggaagtaagaagattattcagaagtgtgttgtaggcagagatgtggctagtttgcattagagtgatggtggagacaggcagatccaaatacatttcataagtaaaatt

SEQ ID NO: 1885413 - DNA, 4001 bp, Homo sapiens
atgtatattattctttcaattgtgcaaaaataagacattaacttgtttttgcatggaaaaattctgcaagaatagagaagaaatgttaacagttacccctgggatctgggataaaagagatacatcatgcttttctttaaaaaaaaaaaaaataggtttttgtggatttttttgtttttgttttttttgacagagtccagctctgtagcccaggccagagtgcagtggtgggatctcggttcactgcaacctccatctcctgggttcaagtgattcttgtgcctcagcctccgtagtagctgggattacagatgtgcaccaccacacccagctaatttttgtattttcagtagagacggagtttcaccttgttggtcaggctggtctccagctcctgacctcaggcgatccgcccgcctcggcctcccaaagtgctgggattacaggcctgagccactgcgcctggcccgtgcttttctctaaagtatgaaaggaatatgtactttcttcttaaaaaccatgtaccaaacaacacttttcaattaaaatgttatttttaaaagtttaaatccccaaatttcatggctctaactttttaaacatcactttttaaataaatgtctaagtttttaactcagtatacagcgttctccaaaacaacaaattcatattctgagcccaaaactgtgcacctcttttagtgatgaggacggagtccaaattgaggacatcccttgtagctcacaatgcacacatattctcacatcaatagcaacacagaatgcaactgatgaccaatatatattcacaaataattgaggaccatggctaagagttgcattcggattccgatgtgactgctattgtccttaacacggactagctccaggtgagtcccccggccccgggggtgtggcgggcgtcacccgttgtccgggcacacaccccgcagacccaatcctagcccgctggctagaccatggagggccgctgggtgcagccacagagcgcggggccccggcgaccccgccccgctccgcgtcactcggcgccctgcggcgcgcgatgagcacctaccactagcggagccgcgagggagaggccgcggccccttcccgttgcctgcggccaccggccggcattcagagcccctcgcctggcgctaaatttaaaaacgtaacacgagcagcaggctggtctcggaaacgaaacgaaattcggtccctgggcctcctcccgggcgctgccggtccctcagcgcgccgcgccacccggaacagacccttctcccgccattttcggcggggctgggagactgaggcccgcggcgctgagcctgcggcgccccggaagaggcgggcggcatggccgctggcgtggactgcggggacggggttggcgcccggcagcacgtgttcctggtttcaggtaaacacgcgcgcccgggcggcggggtcggcccaagaactggcggagcggcccgcgaccccgggcgcgccgccccccaccccggtggctcccactacccggcccggcgcgggatgggattctctctgggacagctggccccgcattttggtcacacgtcatagcaagccgcggttttcaaacccggaagcgccgaaaaggaccgagcgtgtttcccgggccctgatccccggtggctcgggtgggagggtggaagccgactcagcctgaggggagccacgcgggttcgcggtcaccggtgcgctgcgggccccggaggtttctgcccttggtgtcccctacctggcagctggccctgcttctgtgatcctactgggttggaaccagggatccagtaggctcgaagtggcctcagacggtgcgcagttttaagaaagcaaagggacaggcctgcagtggcgaggcaggagggaagcgggatgggagtcgcggttaggccaagggtagttcaaagcgattcagcaggatgatgaccacaggagtgctggagccgggcctttcagcccccgtgtggatgatgaccggccatccaggacatgcgagggcttgggacagtggacagccagtgccacacaaggaaggaccgattaaatgacacagttaaaggaatttggcctagggagtgcaagccagaaaggtttggtctttttatatatgtaacattggaaaaaaggaacatctcctgttccctgtattaagttttgactttagctcagcaaatgcagtgtttgtggcagtaaatatactctgataacaatattctttcccaggaatttagagttttatgatggttattgaaaatgtttacatgacaggctgtcaataatattttttgcctctaaaaataaaacatacataaagtgtacggattttaagtatgcaactcactgaacttttcatacgtatacaccaccctagtaaccatcccccagttcaagatgtagactgtttccaataacgcctcatgcctgttcctagatagccccaggaacctctatgctgacctctgtcaccagagattagttttgcctgtttgaataagagtgtaccctttgtgtctggcttctttcactctgaaagattcatccttgttgtgaaattcattcatgttgtagcagttgtttggttggttggttagttttttcattgctgcttctgtttaattgtatgagtatccatactatgtatctctactgtggatggacatttgggttgtttccagtttgcaactattacaagttacacttctcagagcattcctttaggcggcttttggtagacatgggcactcatatctctagggtgtataccctggagtggaatggctggttctagtacttgtgtgtagagctgtagttgacaatgttaaatggttttccaaagtggttatactgatttatattcccacaagcagtgtatgagagttcccattgctgcacatcctcggtaaaaacgtttgggtggtaaaacagctaatgcaaaattcagggttttgacagaatctcgcaaagggctacccgtatacatgcttttcattagaaaaatcatcctttcttctcacttcgtcacatcaagacaattagattttcagagtaggaactctaatcattctttcagaatcaagtgcattattgttatttcagatatacacaatagctgatgataatttgagcttcttattttgttgttctgtttaatcagtattgacatcgtcattttatacgtgtgtttgtgtccttgtattaaacacaaaaccctcaaaagaattaaatattgattgtatccctgaaaattgtaggttttaatatatctactgctgggttgtgggaagagtttcagttgagtttctgttcagagctgagatctactgtgaccttttaaggcattgggggaggctgagcagctgttggaactgctagaaagagctgtgtggtcaggggggcaggaactcttaacagttaaaaacttgagctaccagctcctgcaattcttccttctggcctttagcgccacctgcaggctctgagggtacaacaaggtttgacagcgactgcagtgcaacactagttctcaaacttgagggcatcatttacctggggagctgggcctcagttcccagaggtgctggttcagtaggtcctgggctggggccagagaatgtgcattggtaacaagttcccaagagatactgatgctgctggtccggaaaccactgcccccaccccaggaaccactgcagtaaagactttgggaactagattgggatataagaatgacaagcctcatgtttggccctctttgtggtgggccagaatttatatggtcaaggaagtgcatgtaagtgcagagtgtgaggctcatcttcccagatgtagttgtcgtcttttccagaagatgagaaatcagcctgcttagttacccattcgggagttggaaacgatatgcccttggctgagggagcaccatactccagtaaagctgggcccttaataaagaaaacaaagattattaaa

SEQ ID NO: 1885414 - DNA, 4001 bp, Homo sapiens
ttccctccgaagcatgtgatctttgttctgccttttgccctttgaagcatgtgatctttgtacctactgtctgttattacaccctctccccttttgaaacccttaagaaaaaacttgctggtttgaaacccttaatacaaaactcaggtgggcatcatggtcctaccaatatgtgatgtcacccccagcagcccagctgtaaaattcctctctttatactgtctctctttttatttctcagctggccgacacttatggaaaatagaaaaaacctacgttgaaatattgggggcaggttcccccaatacccatttcttcattgtacagtaaaatccaacatgatacttccttctggaacagacattgaagttttgctctaatctgtggaaattgtccaaatggcatacagcaaatgaggaaacatctatttaagaaaatctactaaaattcagaacaatgagagtctgtaacatttgagccaccttctacactctccctctttaccctaagctcagcctaacagaaacttcaatccaagttgtcaaaaagatgagttccttctctttacaatttctgatcaagagttgccatattttattgggagggggaaaccactaacatttttcatcctctccaactccatgaagaggatatattccaggtgcatgttgccaaagggttggtggctatcttcctcccaccagctctcagtcaggatggagtgtctactctgtgcatggctggcaagaagattggggttctgattttcctgacatgaactcaatctttgggcagcaccccacgccaggagagtcaagacaaaaagtctggaggaccagaggctaactcctctagccagtgcctggagtagggttgagacatcttaaccaaatgaaaggggaatccataggaaaagggacatctgaatgccccccaaaggaattgattttattttaaacagaatatggtgaagttcaagtataagggtactaacagtggatctctcggcagaaactctacaagctagaagagagtgggagccaatattcaacattcttaaagaaaagaattttcaacccagaatttcatatccagcgaaaacaaatagctcttcttaagtgacagcaaaaagtttaaccataggccagctagttcaccagacagaaaaagagaaagaagtacataagaagtgccctcctgggatctccataaacctcaaaaactgtctttaaaaactactactgcagctgggtatggtggctcatacctgtaatcccagcactttgggaggccagggcaggtggatcacctgaggtcaagaattagagaccagcctggccaacatggtgaaaccccatctctactaagaatacaaaaattagcctagctggtgatggacacttgtaattccagctactcaggaggctgaggcaagggaatcgcttgaacccaggaggcaaaggttgcagtgagccaagatcacgccaccacactccagcctgggtgacagagcaggactctatctcaaaaaaccaaaacaaaaaccaaaagaaaacaaaacaagaaataaaactaatactacatgggtttaatcagataatgctacagagcaatttatgaacaactccagatacgctgccttaaaagctgtaacactcaccacgaaagtctgcagcttcactcctaagccagcaagaccacaaacccaccagaaagaagaaattccaaacacatccaaacatcagaaagaacaaactccagacgcgccaccttaaaagctgtaatactcaccgcaaaagtccgcaacttcattcttaaagtcagtaagaccaagaacccaccaattccagacacattttggtatgcttcagggcattgtccaaaacaatagagcaatcagctgataatttggatgtgatatcaaatgagccaggcagcttaacagagagatcaggaaaggagaaagagagccctgctaaaactgttgtcccaagtaactatgaatgtccaaagctgtgccttacttaggagagacactgcagggaaatagacttcattaaaatagactggccatgtcaccaatcaataaacaagcaaatgataatgaaaacagcccacctaacagggaaggggaatcattagtccttgcttaggagtaggcaaggtgggatgatttgggggtacagaggatttttttggagtaatgcaaatattagaaaattggttgtggtgatgattacacaagtctgtaaatatattaaaagcaatggaaaaattgtatggtatgtgaattatatttcaaggaagatgttttaaaaatacctgaaattactatttaagcatagaaaccaacagttcatcctcaaacgctctgaaatgtatttagactgccaagtgaaagaagtttttcagccaaagcagaaattgtaaacttgcctaggtttattcaaatagtttggcagggaacctgtgggaattgagctctgggctgatggtcagccagcacttccagtgaccagcagtgacggagggtggcacatcatttatcatgtttgttactggctaaaataaatactgctgcctctgggccatgcactggacatgtaaaatcttcccaagtctgcagtgctatgaactctgcagacctacgtatgttatcaaaaatatcacactgaccttatgtctgtgagcatcagactagtaaggaaagtgaaagattttagaaaagggaatctaattagaaacatccctttatcctcatatcgttctatttgtttaaaaagtttaccattttcaggtgatgctccattttttattgcaatttttgagtgtgttaacaagaatgttttctgaactcatcattggttggcttcttctaaatggaaacctcttgtctgaacatttatgtgtctaagaccaaatagtgttcattctaacttgaatgggaggtgttcgctgtcaattcctgtaacttatttagccttgactgaggaaagctattcttctgcaataatgatgttctgtgactttcagtatagcacggggggaatatttagggggaaaaaatgacctgcttaaatagtcaaatcagtggcaattattgagataacagtcattcaatcatctaacgtcattaatacaacatatgctagagatggtgctaggtcttgaggctgtagaagtgaaatagtaacaccttttgcccacccattccaagggtcttgcctgacactcctacaacaaaagacaggttacaagagaaaagcataacaaatttatttaacaaagttttacgtgacacaggagacttcagaaatgaaagcccaaagatccagggaaaacttgacagttttttgcttgcactcaatgcaggatcagctgtatagaaatacgattggacaaaaagggtgtgttgtaatggtgataaactgaaggagcccagtaaggcctgttttttcagattcttccgggcctctctatgcagcattccttcttccaggtatagggtatgacacctgtcacataaggaccctcaagggaaaagggagaagaccagagagtaaagtttataggttttatggcctgctttcaaggagaatagttttagtttctatgacccacttttggtagagaaatggggaaaggagaataggagaaggtcagagagaaattcttgcttctgaggcccttccaatttccttccattgaaagtactcagcagaccatggtgttatattttgggatgacatgttctaagccccaaccagggccatggcagtgcctaagatatagcacacacactcaaggaaagccccagtcagtggcattgccttaaggtgaactcaaactgccgacctgaagggatgtctgtgatgcaaattattatttccatgtctattcagtttgcttttctttctctcagttaaagggaaagaatatcccaagtctttgtattcagaggaatgttcatcctcattctctgaatatccatccagaggggc

SEQ ID NO: 1885415 - DNA, 4001 bp, Homo sapiens
tgtcatgacaatgtttattcaggtaaaacaaacaaattgccctctaaaaagtattttctacagctcgaattacccacttacacaagttataacaactattaacaattttatcatttatatttgaagtcacttgctttgggggttttcactgagtgggagtagataactgagatatcctcaaagtcagagaaattctgtgattcaactgctagaggtcatttgatattaataatagttgaagttagtgaagcatgataatctccacattccatttatttacatcatgctcctgaatatatttcttttcctttcttttggagacagggtctcactgtgtggcccaggatagagtgaagtgacacaatcatggctcattgcaacctcaagcgctcaagcgatcctcccgcctcaggctccttaggagctgggactacaggcgtgcaccaccatgccagtctaatttttaaaaatctttttgtagagacagggtctcactatgctgtgcagactggcctaaatagatttctataaactacgttttataacaagtagttacctaattccacgcttagttaataaaatatcattttgagagctaagcacaggtagttatactttgctctgtgaccttagtcatttcaatccattagtcttccctgagtcttaggtaccaggagacctattttgtagattaaactcagctgattgttgtatgaaagatgacataatggaggaatacagatggcattccaaggagttttttaatgtttagggttttttttttcctaatggtaaaactatggttactcttgaaaatctggggcaataaaactataaatactaaaaagccatcatcttttttttttttttttgagacagagtcttgctctgttgcccaggctggagtgcagtggcacaatctcggctcactgcaagctccgcctcctgggttcatgccattctcctgcctcagcctcccgagtagctgggactacaggcacccgccaacacgcccggctaattttttttgtatttttagtagagacggggtttcaccgtgttagccaggatggtctcgatctcctgacctcgtgatccgcctgcctcggcctcccaaactgctgggattacaggcgtaagccaccgtgcctggccgtcattccatctttttaaaagagataatcagttaacattttaagttacagcatttaaataaattaggtcaggcatggtggctcccgcctgcaatcccagcactttgggaggctgagacgggtagatcacttgagctcaggagtctgagaccaaactggacaatatggtgaaaccccaactctcccaaaaaaaaaaaaaaaaaaaaaaattagcccagcaaggtggtgtgtgcctgcagtcccagctactcagcaggctgaggtgggatcacttgagcccaggaggtcgaggctatagtgacccgtgatcatgccactgcactccagcctgaatgacagagcgagacctggtctcaaaaaagtcaatcaatcaatcataggctgggcattacaggctcaagcctataatcctagctttgggaggctgaggcaggaggactgcttgagcccaggagttcaagaccagcctgagcaacatggcgagaccccaactctagaaaaaaaattttaaattaaccaggcatggtggccagtgcctgtgatcccagctacgagggaggcagaggtgtgaggatcacttgagcctgggaagtttcaggctgcagtgagctgtgatcacaccactccactccagcctgggtgaaagaacaataccccatctcaaaaaaaaataaaaaaatataatttaaaaaatcacagatagttttggatgctgcatgttaccactggggttaataaaaggatgtgtcaccaatttttgcaacatatcctgaatctgttcacttaggccatgctaatcttttctgtatcattccaattttgaaatctgtgctgctgaagcaagcacttatcagtacgcctaagtatcggagtgaaatcataattcccaatgaatgaaatcctttccaataattattattaaccacatctatgtaacaagtatctgtactacttagaaatcaacattaatcatcactcagtagagaatttcagcggtagaagtccattaatcatttcatctaaagcattatttcataaagttttttgcctggtttggcccaggcaattcacaagaggtctctggctaaggccttataatttctgaatttggaaatatgtgattttattatctactccgtaactttaattttaaaaaataaaagtaaaatatttcaatgtccccacagtccactccatcaggcccctccaaatcctctcctgctttcacatcaaacccctggagagaaagatctgttcttcatcttatcctgcccaccttacttaccctcagctaacttcatctggctgccactcctattactctcccaaaacagctcttgttaacgctgcagtggcctccatattacacattaaacatacatctttcggtctgaaccttgacttccccagctgaattcaatgctgttaaacaagttctcctctcctttttataaaaaattacttttttaaaagttaattattctaaaaatcccgttattaaagattaatggtggaaagtaagtcttgccccaaccagttccgttccccaggggaaccaatgcttctggtttcttgtgatgtttcattcattcatttatttagcaaatattcactaagcacctactatgcactgggtactgttctagcattggcagggcacggtggctcacatctataatcccagaactttgggaagccaatgcaggaggactacttgagcccaggatttcgaggttagcctggacaacacggcaacatctcatctcaaattaaaaaaaaagaaaaaaaaaagaaagagaaagagacaaaaatccctgccctgctgcagctggcattctaagcaggggatacagtcaataggtaaccaaataaatgggtagtaagaagaaaactaaagcagagcaaagaggataaggaggaacaggattttattttataaaaaatattttatatagaatggtcagaaaagtctttcttgtaaggtgatttttctttttttaagagacagggtcttgctctgttgcccaggccggaatgcagtggtgcaatcctagcttaccagtcttggactcctggactgaagtaacccttctaccttagcatctggctaattttaattttttttttttagtagagatagggtttccctttgtcacttaggctggtcttgaactcctggcttcaagtgatcctcctgcttcggcctcctgaagtactggtattacaggcatgagccactgtacctgaccctttttttcttgtttttgagacagggtccgtctcactcggttgcccaggctggagtacagtggtgtgattgcagttcactgcagccttaaactcctgggctcaagcaatcctcccatcttacccctccaaatatctgggactacagatgtgcaccactatgcgtggctaatttttttaaaacaaattttgtagcagtagggtctcactatgttgcccaggcaggcctcaaacccttggcctcaagctatcctcccaccttggcctcccaaagtgctgggattacagtgtgagccattgcaccaggcctgataaggtgatatttgagcagagatatttaaaaagtgagagagacagccatgtggttatctacagtccaatatactccagcctaagggactaagggggaacatgcttggtgtgtgtaacatggaggaagccagctgtggctaagtggcatgaacaagaaggtgtggtaggtgcagagggtgtaggtgcagcaggtagtaggtgcagatgatgtaggtgcagtggatgtaggttcagagggtgtagatgcggaggatgtaggtgcagagggtgtaggtgcagatgatgtag

SEQ ID NO: 1885416 - DNA, 4001 bp, Homo sapiens
ctgtcccatggttaactctgtgtagtccacataaactagttataactaaagctattactgaagttcctgttcaatagctatagctgaagctcagaagcttggacatttggaggtaagacagtatgtaattttgatttttaaaatattgagcagtgtaaggttaaaaaaaaagctcagaagcccatctactttaccttattattaaaaggacaactgccttttatctatctgttataacagaatttataaacatgtgaagactaaaattagaattacctattattctactcaccatgtatgcaattcttttctttaagtgttattttcctactgtttaaaaaaatctgtttttttttggtaaagatgggggtcccactatgttgcccagattggtcttgaactcctggcctcaagcagtcctcctgcctcaacctcccaaagtgctgggattataggtgtgagccacggtgcctgctacaattcttgttagttaagtcatttttcatgaaatggctgtaccatcatttacttaaacattctcccactgttggacagtttggtcacttaaaatttttttgctgtaattaacgtttttatatatcaatttttgacaaaattactcattatttgtttagagtatgtttctaaaaggaattgctggatcaatcactatgaactttgaaaaaagagcttttgatatattcatgaattgctttatgatacagctgaatagtactattatcaacaatgtgtaagatcagttgtctcatgtgcttaccagcacagcatgtattggtaattttgttaattcgataggtgaatagtctctttttaaaaaagataactagtataaataacttttcatcaaaattagaggaactgcaaatactgttgttctctgacacagatctaggtatcagaattcaatagaaacaataagtactgagctcctactataagacatgagccagccctttagggagtttgccatcttggcaggatgcttaacacctgtgcttataggcactttcctccctaactcagagccttaccccaaagtgcttaggagaaagcagagaaggcctggcttcttgtggccccattgccttgattcccgtcactgtgctatgctatcagccacatgaaatgcacagagctcagcagaaacagattaatgagctcttcattaatgtgtcaaataaatttgcttggacgtttcagcaatcattcatctagttggctcacattttttgttaaatagaaagcaaaaagaaggcataaatattgcttttatatttatgcttctgatctatccattatatgtactattcataaatggaattttgtgcttctttaatttgaatatttaaatttaaaaacatttaaacattaacgtttaaacaagtcattaaaacaagacaaagtcattaaacaagccaactctggaaagagaactcaatagtcagcacatcctatctgcttttgtcatttatacaagaatccatgtgaaagtcaatctcattacagcaatctttgaccatcaggggatattgtactctgggaaatcatagtttaaaggtatacatctctaattttagatgctaatttaatcaatggtttaaaggtggggagttataatgaacacaatccttcttttagttcttcacccatgtcactctctttttcttcctaagtctccccaaattattgacagatgctttcacgtatttttatttattttaatgagatgggggtcttgctatgttgtccaggctggtctcaaacacctgggctcaaaatcatcttcccgtctcagtctcctgactagctgagacttcagacatacaccaccatgaccggttctcttttttttaattaaaaaaatttattttattaaaatatgaaacacttcatgaattttcctgtcatccttgcacagggagcatgccaatcttcactgtgtcattccaattttgtatatatgctgctgaagcgagcacttcatgtctaaaagttcttgagaaaagcacgttctgaggcaaaatttcaacagacctatgtaatttactggtgaggttagggaattcacttaatccatataccctctgataaaatgattaaaaataatgacataccatagactgatggctggaagtagtaacagaccagcagacagcaggaaagtgaagccagggtaccaagcaacagtggctgagtaaattccattaaaagtagaaactgcagtgactcctccaagtgtttctaagaaagcaatacaagcaaacagggtacctgtttggagtagggatagagagagaggaaaaaaaaaaggcagaattacaaaacaacaaacacaaactaatggagacaactgttactcattgaaaacagtaaacatgagggcactgctgggtgaatgaaatgaaagttattccctcaaagtccctgagaagtcagcagcccattctgcagctgaggaaactaagggaaaggttctccttggacttgatgtgagagatgttggaaactccaaatagctgagttccagtgtccacagggcaaagctaaaaagacagtgcagctgactcttttgataactgcatgtctctcctctctgccacagccccaggcaaagccacacctacccctgctcttcaggatgctgtctcccaccctccaaccccatgctaatctgtgacacctgaaagcacaggatggctcctaacaagcaatgcttcctgcaagagccttttgaaaggtaaagaaaaccttcttatctgttcctcagtctggcaagtgacagctgcagacaaagagaggagattcttatacattctgcaactggaattttatccctcttcaaagtcaccaaaaaatcccatcactactagattctgcatgtttgactcatcaaattaaccatcttgtgctctagtgaaggtttatgccacagtttaatgttaagtgattctttaaaacatatgtttccaccttattgcttgcaactgcctctgccctaaggtgccttacaagatgaagagtggggattctgctatggtcacacttgctatacaccaaagttggtcaagggtaggccactcagcattgttcatgaagtctgcatggtcagtgcaagctcacaatcagagagaaacagacagtattctacctatgtttagttttgtctggaatccaagaccatgtcaactgaagagttaaacttccaaaagacaggctggccatcttcatgtgcttttcttcctctttgtcaaattgctcatcatcagatataaaatttcatgaccattttcagtcagattgacctggctttcttggtctcagttcctatatatgtagcttctgctttctgcagattttgtcaacaagtcactatgcttgttccctactttgccaagtttacttttccatgaaaaactgcaatgcatttttcttactgacaatacaaatcatgtaaataattgtgtttgcttggactgataggaaggaaatggccaagcttgagggttatctttcaaagttagatatggcttatgtgtatattctaattttccccatggtcttcatcttttagactgtgtattgatttttatctatttaaactttttcattttattgtacatattctcatatattgcttcaaattattcattgaatgataggacaaacattcataaaacatacgtctatctctgcaaaatatcgtgtgctcacttatgtgtcttcttttgactaaaatgaaagctttgtcgatctgccttgtacatctgccttgctcacagctgtatccctagggctcagctgtccgggtgcatggcagacatttaataaatatttgtcaaatgaatgaatcaaagcttaattcaggatcccatttaccagtcatcaagtagcatgcagacttactgcctccatgatttatgataatacattaagtcagtttaattggaaggatgttcttctacttgtctaactacattatt

SEQ ID NO: 1885417 - DNA, 4001 bp, Homo sapiens
gatccacctctcctcttcctcctcagcctaatcaacctgaagatcttgaagacctttgtcaggatctacttaatgctttatgaaaagtcaatatatcattcctgatgattttctttctaaccgcttcatttctctagcttactttattgcaagaacacagtatataataatgcagcacaaacaaaataggtgtccaccaactgtttatgttatcaggaaggctcccagtcaatggtgggctattagtagctaaggtgaaggaatcaaaagttatactcagattttcaactgcacagggatcagaatacctcacccccacattattcatgggtcaactgtaattatttgtttactaaatataaacaatttattataaaaatgaaatagaagatccatttgtataacaagtccaatttgttataatgtgactatagaggaaacatacaacatactaacttaaaagtcttttttcttatttacgcaaaaatattacataggattttagggatcataattaaataaaggaattttttcagacaatcatgtttgagattataagttagctacaactaccttcttaaataaatctgaatttcaaactaaagaagttaaattttaaaaattaatttacatatgtatatacatatatgcacatttaatttacatatatttttaaactggtctttttttattaacactaccttaatcttacatcttactttttactttctaatcaagagtaggaacaccaagagaaataagaaattcactatcagaagtcttacctggtttgtcatttttaagtatcatctttttatgttccaaaatttgttgttgaattctacgtatacaaaagtaataaataaaattgctattttaatactgaaataaaaaatatttaccaaacatattaaattctaaaaccatttcaggcaatatcagacctaatatcagaattttaatatcccatatacttcaaatttttaaaccttacaagcttattaagcttataattaaagaagaaaaaaagtgaagtactcataaatggaggaagcatagctcagtaaatgaactctagttagctggacatcatgtaacatgtcctgcactcagaataaatcctcactctgtaatagatattttgttttcagacaagttgcttctcttaggctccctggtttcttctaaaaaataaggattttgctaccttacttcagtaggttgttaggaagatgtaataagattacatgtttaaatgttcaggaaatagtaaagcaatggaatgatttattcttgaactttattgcttggtgtgtgtttttctataagttctaatattcaattgttgcagttttcagaaaatgttattaagtgctaattttggttattaagttgtattctttgtggcttgtaattcagggcattttacctaattcataactaatctgattaaaatagattacctaattgtctcccatcactgagctcatcaatcacaccaaaggcagaaaactaataggtgtcaaaacctgggcttggacaactacctctccttctctacctcctcaaactctgagccagcagatctgtgctaggacgctggatctccatggtcctctccaactaacagatgagacaaaaccctgcttttattgtttttcacttccatgaaggaaatgcaagttgacattttgtcatttccaagacatgtactagcaacaagtaacatccccttattactcagctctgttctcatttcagagatcaccttacatcaatagttttatagtgataatcacaatttcaatattgggtgtcttctgttttggtttcactcacactgcttccttggagctactcaacaaatagtcaaatgaccttcccgggactatgcaaaatatggaatgctttctgaatttgtgtgccatccctaggcagcagccatgcttacctgctctgtattgatccaattttaaaatatgtgctgctgaaacaagtacaaagccctgtttgataaatggatactcatgagttatggatgaggcttagctctgttaaatctaactcactgactttagattcagagaattttattgaatggcttcctgtgaggtagaattttaaaatacatttaaaactcctggaagagttgtgattagcccaggagattttcattatcatagagacacattaattgaggggccaattgcaagttggttcccactactcggtggaaagataacatggaaccttctgctatctaacaaaagctgctccacaggatgtaaaaaggcctcaaggtacagatctgatagcaaaagggaaagggaaccctaatctcttcctgcaacatgattttaacatccctgactgttgagagcaatcccaactaatattggttaaagaacagacaaacacgggtctcaaaggataacttaccatgaatgcctaggctaagtctagctaagatgtgggctccaaataaggtttttactgtagggtgaggatcaacttgctcgacatttgtgtgggtaaagctaggaggcctagctgccagatcagggtgctgggaacaacgactgagcataagtacataaattaataaacaccgtagctttgaactctatgtgtgaatcaccacaaaaactgaggggtctgaatgagtgaaggcatcctggtggcaaaggtcaatcattatcagattgcaggactggttacaatggcaacaatacaggaagtgagaccatggaaacaacagaaagatcagaatggcctttttcccccttcttctgacttgtaaagaaagattgccttccttggacttaggaaaccccttagcttcttggaaaattcaaagaaggaagacacaggagatagccccacgggaaaatacaagattttctgctaaattggacatttcaagacccaataactaattagaaaagtcaggccaggcacggtggctagcactgtgagaggccgaggcaggtggattacttgagctcaggagttcaagaccagccagggcaacagagaccttgtttcaaggaaaaaaaaaaaaaaagaaaagaaaggaaaagaagtaaaaaatgtggctctttttatcccatgcatggggattatacttagaataaaatgaacaacattgagatccctagggataaaggtcttaaaaatcctgaaaacatcttgcactctacttctaactaatctagacttctgcttgatttctggctaaaaggtagactaactcattgctatttcaaaccatctgaacaaaactaggaactctcacctaatgtataagatggaatagttgcaattattttaaacttcaattcaatattaactggccttttaacataaacacttactttgtcaaacagcgagaaatagcgtaatcttctgcatcttgtccacacgtcttgagtaaagacattaatattttgtttaagaaggatgttgacaatacccggtgagtcatagtgcacagcaagcataagggctgttctaaaataacaaggaaatcactccactcaagaactttaataaagacttttttaaacagctagtttgatacactttaccaatttaatatccacctgtcagtgtagacataataacattttgcatgtactagcttgggtctataagcatctagggtgctcaggtgttcatctttataaattgtcaccaagtctaaaagaaaaggacaataaggaagcctcctgtcccactggggtatgacataatacaagttgctaactcatagtcctttgatggccaagaaactgtgctgaggtcacttatctaaagcaggtaaagatttagatgaagatttccccattgctttcctagtctgatatattgtaatttatatcagctaggggtcagataagagctatctgcagactgaaaacaacaacaacaataatgatgatgatgataatactagtagtcataaactaaaagtccacactttaaaaattaataaaactggc

SEQ ID NO: 1885418 - DNA, 4001 bp, Homo sapiens
atgctgagggtgacagggaaagctgtggctggacagggtgtgagtagaggggcctaagatacacaggaaagtcgaaaaaaaaagtctctggtagaattagaatctcatttgagctgagattggaaggtagtaataaaatgtcccatatgaacaacttaagagaattccaggtaaatggatggacaagtgaaaaaggccttggggcaggttgtgccaagtgtgtacaaggaatagccaggaggccagtgtgcttgaagcaaattggacaagaaggagagcctaagatatgagggctagagaggtggtgaaggggtgggtggtgggcaggtcacatgagcccttcaggactattggaagacctttggtttttactcagagtaagatatagaaataaacaaagaccagatgggatgagaacaagcaagtgctgtttattcagagcttgctttagcaatggaatcagccactatcacctgtgttttgataaagactcaaagacaggcagagaagcaggaatgcctaatagtggaaaaaagggaaggcttcaggtgtgacctcattggaggctgttggcatggggaagctctagtggattaactagaagtggggtatcctatggttagaggtgcatatatggttctgtctggttgttccaaaattcaaagtggagacaaaaattaggaaagccatcatcagatcctgaccactggaggctgattgccaaaaaagttgtctttggctttccggttgctgtaggttgtgctgcagagttgtattttaatgtgtggtctggctactggctttttacattcaatctctcaatatgaaatcattagaaggctttggagatggggggaaggtttccataatctgacatactttaagaacataagttgtgactgctgtaagataaagagacaccaggtctaagagttgaagtaaagagcctgatcaggagattttgcaaccatgcaggcaagcgatcatagaagcttggaccaggcagtggcagtggaggtggaatgacagggctgcatgccggaatataaaggtagagctatttgagttttctgacggaccaggtgtggtatgcgcaagaaacagaagaataaaggatgactccaagttttgctgtcttgaccaactggaaagatgaaattgctaggtatacaggtgaggaagacttcaggagaatcagatttaggagtggaaatccacagttccattttaaacatattaaaattgaggttccttttaaatatccaagctgacatgtcaaattagccatttgggtatagaatcatggatgtcagtggagaggtccgaatggaaatctaaactgaacatgttgatggtatgtagagccacgagtcaaaataaaatcacacaggggaggattatagataaagaagagaatggatctagggattcaccatggggcacttagaagtcagggagataaagaaaaccgagcaaatgaggctgagaaaaagtcctagggatgaagacaaccagaggagtgtgggccccggaggccagttacaaaaagcatatcaaggaaaagggagtgatcagttgtttcaaaagctgctaacatgtcacatgagtgaagaactgagaggtgatcatcagatttagcaaatggatgtcaccaaaagttggctattttcaccagaactgttccagtgaagtagagggtgaataaagcctgaataagtaggtttaagagagtgtgtgaggagaggagcaggtgacaccgggcataggcatttatttcaagaagttttgctttaaatggaaacaagtgacatggagagaaatgtctttgctggtttttactttttatttttttacttgtgtatcagcaatcttggtggctagggacatcctcaccatcactcaggcagcaaaaatacgaaacgcttcacagatttgcttggcatccttgcacaggggccgtgctaactccaatttcagtatgtgacctgcccaagtgagtactttttttttttaatattctttttttaaaaaatttatttcaagttctgggatacaagtgcagaacgtgtaggtttgttacataggtatacatgggcgatggtggtttgctgcacctatcaacctgtcatctaggttttaagccctgcatgcattaggtatttgtcctaatgctctccctcccctttccctccaccccccgacaagccccagtgtgtgttgttcccctccctgtgtccctgtgttctcattgtctaactcccacttatgagtgagaacatgcagtgtctggttttctgttcctgtgttagtttgctgagaatgccggtttatttttaagatgagttttagtaaaagcaagaattacacctattattatgaagtaaggttttcaccaaatataaaatttcaatgtagaaattatcataagacttgagtacaaataatacaccaagtatcactgaaaattcaagtcaaatattcaattagttttagtgagtttgttttcattaacttatggaaatgtgctccggtatcacctagattttggcagtcttcaggtcatggactctgtggcattagtatgaaatattacagaaagtttgatttattagagtttttgttaactttttttttaagttcagggtacaagtacaggtttgctacatagataaatgtgtgccacgatggcttgctgcacagattatttcatcacccaggtgttaagcctagtactcattggttatttttcctgatcttcttcctccgcccaccctccaccttctgaaatgcccagtgtgtgttgtttcccgctatgtgtccatctattctcatcctttagggtttgttatgggctgaatgtttgtgttcgtcctgtattatatgttgaagccctaatccccaaggcagtggtattaggagatgcagcctttgggaggtactttggtgaggtcatgagggtggggccctcaggatgggattagtgtccttataagaagaagaagacagaggtatttttctctccatgagcatgcaccaaggaaacgtcttttgaagactcagagagaaggtagccatttccaagccagaaagaggcccctcaccgggaaccaaatctactggcaccccagtcttggattctccagcctccagaactgtgagaaagaaatgtctgttgtttaagccaccccagtctgtggcattttgttatagcagcctgagctgactaagacagggttgattattcataattcattctatacttctaatctatactggccagggttttcttttcaaataagttattcagaagtggtccatgtatgggattttaatttaataatctttttaaagatttaaagctcaagcacctgagttttgattcttcctaggccttatgacacatgcaggtttgattaaacaagccaggacttcttgccagtgccagtaagtttgaattaggaataaaaaagaaaaccgagtgtctgggctgtgcccttcgctctggaattcactcctacagtcaatctgacagagtaaataggcccagtatcaagtttaggtcttctgttgacctaacttctaacagaaatatgtaggctgtgggaaaaactggaaaagggtatcacagagacaaagaaaggcttccctgatagatttttctgttaacattccttttcaacttcacgttataaatacaatggaagtgtctatgcaggctgcttcaagtaagcatagagctttaagtgcaaaattcctaaaagtggcatttgtagactacccttaaaaattcttagctagtaggcatggagttctcattatttgctaagctctattctaaacacttcacatgattggctagttttatccttgcaacaacctttgaggtaagaattattatgactcactttacctctgaggcacacgtatgttaagtgagcagctgaaagttaggttggtaggtggtgatgctggggtttcaacccagaaactccatgtcagag

SEQ ID NO: 1885419 - DNA, 4001 bp, Homo sapiens
aacaaaaatttatgtatatataaaatatattcaagaagtatgcctaatgaaccgcaacggtcagtcccctttgttgtttttttaaatgtaggagatatcctatgaattttccattaccttttttcccccgtaatcagatcttgttttgaagttctgaatctggagatctgttttattcagaagtatttatattcttttatgaaggattatatgtaacttcagtgtatgttttgtggtaccctttattgttaaaactgacttctttaaaaataggtttcaccccttcatctctactaaaaatagaaaaattagccgggtgtggtggcgggtgcctgtaatcccagctgctcaggaggctaaggcagagaattgcttgaacccaagaggcggaggttgcggtgagcagagatcgcgccactgcattccagcctggtgacagagcgagactccatctcaaaacaaaacaaaacaaaacaaaacataggtttcaccctagagatgcataaacgtccgcccttttaaaagccacctctggttgcagttttagcaactaccagtagatggcgcaagttcctgaaaaaaaattatttgcctttataagtttaacaacttgagtactaaatttctaagtttgtaaaaaaggtttttaagttacagatattctaggtgagattggtggagaggttatggtggattaaaaatgtctgttaactttaattttgcttaaaaaaaagtctttgcaatttttttttttatcagtggttctcaaactcttaattgtgtatcagaatttacagacggcttgttaaaaacagactgtacaggccaggcatggtggctcacacctgtaatcccagcactttggtaggtggaggcgggaggattgcttgagcccaggagttccagacaagcctaggcaatgtagtgagactttgtctcttaaaaaaaaaaaaaaaaattatcagggcatggtaatacatgcctgtagtcttagttgcttgggaggctgaggtgggacaattgcttgagcacaggagttcaaggctacagtgagcgactatcacaccactgcactccagcctaggtgacagagggcgaccctgtctcttacacacacacacacacacacacacacacacacaccccaaaacagattgtacagaatatttctaacaaattgccacatgatggtgacactaatgtttaacagtattattaatgatctgaagataacactttcagaaccattgtttttaaattaaacaatctttgttttttaaaaaagaaaacacaaagaatgtacccattttctactaccctaatgtctggtcatattttcattgagtatgtggtgtctgtacatacatgttttagtgaagtcatagtatgtgtaaatttttttcacattctgctttttctcttatttacacatgttccttactgttaatgtatagtcctaccttatttccacattgtccattgaactttactagagatcctgccgtatactgcagcatcatgtgagaaagctatcatgtaggcctgaaaagtgttacagtttggccttgtgttttgactagtgtctaggatgatcagtggtttcatggacactgtcctgtgtctttgtggcatgaggagtaatccggattcaaaataaagctaattaaattataccttcttatattaaatggtatgcgtgaagaggtttcttttgtagccatatatgcaaaaatctgttgagtttgtgacacatgaccacttcagtgtgaggggaaccatagtgaattttggttagtttgtaaagaggcgtagggaaataagagaaatataattgtttttctgaaaataaagatgtcaaagccccagttttcacaaaacaatgaagaaatattccttttaaaatatagaacgcttcatgaatgtgtgtgtcatcctttcacaggcgccatgccaatctcttactgttccaattttggtatacgtgctgctgaagtgagcaccagaccttattttgtagtaggtagataagtaaattggttaagaaaccccgtaattatagtaagtacaatacaattattatattgtaggattgctaacaataataagcaaaagagtcatttttaatttcacttattttcaaaccttgaatcatttcacttttttgcaatgcatgacattttagaaaatctgaatatttatataatgtgtcccttataggagtggtccatttttttttttttttttttgtcttgtgagtggtccatatatatagcaatgtccattattttgtgtttttttccaccccttctccaaagcggggaaatactcatgttaggaatggggacaaagcagataccctagtcttttaattaatttatagttctgaaataagctgtatattttccaaatgtaatttaaaccataataggtaaaaataccttcaagaagatatttttaaattttaaaaatatgtttctttaacaggtttctataatccaggaacttgttactaattatgaagcctctcttaaaacgtgtgacttttttagcccatatggtaagtttaaattagattgaattggaatttgattactcatttcatttttaatcacagtaatgctcttttatgtatattatgtgtgtgctacctaatggctacttaataaatggctttcaaattggtgaatgaaatgagagcactttcaatcttacttaatttaaattttccataatcctatgagatgggagttaaccttgtgcggtttttttgtttgtttgtttgttttttgagacggagtctcatcctgtcacccaggctggagtacaatggcacagtcttggctcactgcaacctccgcctcctgggttcaactgatgctcctgccttagccttctgagtagctgggattacaggcgcctgccaccactcctgcctaagtgttgtatttttagtagagatggggtttcaccatgttggccaggctggtctcgaatacctgacctcgtgatccacccgcctcagcctcccaaagtgctgggattacaggcgtgagccaccacacctgggcttaaccttgttttaacatgaggaaacatacttgagaggttgaatggcttgcctaagaccatgtagttagtttatattggaacctgtttttcctgaatccctaaattctctgctttttctaccctcttattacttttaatcctctttagtttggtcctttgtttctatatttgtaggagcatatataaatcaaggcaagttactttagaaaacactagaatgttttcagtcatgcacaaagtaacttccgggttccttatgtgtctcttacatgtcattactctgagtatttttctgatgttttttaagagaggggatctcactgtgttgcgcaagctgaacttctgggctcaagtgatcctcccacctcagcctgctgagtggcaaggactacaggcgtgtgccaccatgcctagctgattttgtgtgcgtgtgtgtgtgtgtgcatacgcgcgcacacgcgggggtttgggggaggtttctagaggtgggattttgccatgttgtccaggctgatcttgaactcctgagctctagcaatctgcctgtctcagcctccgaaagtgctgggattacaggtgtgagctgccacaccctctatgagtttttttaaggcacattccagacttactgtttcatctgtaaatatcttagtgtgcatctctatttaaaacacgtaaacagaagaagtcatcgcagtgccatgtcacacaaaacctcataacataatatctgatacccaatcttagtgtgcatctctatttaaaacacgtaaacagaagaagtcatcgcagtgccatgtcacacaaaacctcataacataatatctgatacccagtccgcattcacatttcccccattatccaaaagaagtctttgtgtttggtttatttgagtatagatccagttaaggttcacaccaaataattggttg

SEQ ID NO: 1885420 - DNA, 4001 bp, Homo sapiens
acaagaaccattagtgattacttattttaattaaatgctcagtttaagcctggcacaaaattatgaaatcctttggcgaaagttattctttatttctatttttagtataacatgaaaaagtacctgctaccctgttaaacttctcattataaaaataatgtgaaaagttacactcagacaaaaaccaccaccccattggtacaatatggaaatagggatcccagcatggatgatttagtaggtgttaatagagtaagctgagagttaaaaaaaaaaaaactaaaacaaagacatattttgtggatagtagccatcatcatatagcaataagatgtaggctatacataacggccaaatgtggaagaccaatttgagatgttcagtagcttacaagactatgtgcacaaaatgtgaaataacagaatttcaaagatgacagtactcagaaaacgagatatgtaaaagaggataattatctaccttttcttagcaatgaaacatattagaatcttgaacatgtttctccagagtaatctctccatgacagaattatcatggacattccactaaatacctaaaactctctcaagatgcacccttccagcttgacctagtgcaaatctcacgtcttctgagaggcattctccaaattctccaatactctttattcaagtcccattcagaacccctgaatttgtctatactacgggtgtatctatttatgtcagaggaattcaggggccaatagaacactatacttttttgaatcctgagccatatcacagtgccatatgtataatttggtacccaataaatattttatgattcaaaaaaagtgtaaatatgaaagataactttcacaggtgtatgtgtatatgaagttagcaatgaccaagaaggaatgacacaaatttattactagattgataacaaaaaattactgaagggtttgcagacaggttgatggagccaatataactgtaaaaatttattagtctattattttgttaacagaatatgatatttaatggaccatgatattccctcacaaatttttccatctctttgcaaatgcacttgagtaaactgttgtataaaatatgtattttcttaaagttgttgctttccaaaatttgctgagaggtatatatacattgttgtctaacattgacttttctttgtatgtaaaatgtccaggttagtagcaaaagcatcagtacagttgatgatacaactgtaatatagttctctgttgttaattacataaaatgatgtggactaattgattgattgtacacttacgccagtcatcctgacagtcttaatttaatcttaaagtatattctgtttgatcatctggtctgggttccaccacactgttcataatatattgagaagcacattcagctatgtggaaatgtgtttttaattcctgggtagtcataaatgacaattataatgatgagcatgatgataatgatgatgataacctttgtgtggtgtgttagaatgtgggaagtaccaccactccgggtatataaatactctttacaatgtctccttttccaaattaagagactactgttccaaatatttcatatgaggagaggttctaatttgatttttatcctcaaatagtttcctgaacacagtttattgaataactatgtttcctattagttattatgcatttgttatcatactataagctcttatgaatagagactgtttcagagctacatgttgtatctacctttctgttgcctcttttgctagtgttttagaacccaacatttccaattataataaatttatcattgttttcatatatatatgccagtcccccgattaatttttgcctttacagtctattatgaaaattttcaaatgcatattttaaaaacacgaattcttcatgaagttgtgtgtcatccttataaggcgccacgtcaatcttttctgattttccagttgtatcatctgtactgctaaatgaacataacatctgagaattcctgagtcttttctgtcccgtgattctcttcttgtgtctggagttgttgtcctatggtagctgctctcctgcatcttttaatcagctctactttacaagacatgaaagtaggcttgtctatttttattatttttactagcatctagtatactgctaccatgtaataggtactcaacaaatacaggtacacttcaactgaaatgtcagaaattaaatgcttttactgagatcgcacaaccagaaaatgagagttaggatttatatccattccatttgattcaaaaatcaaccctactcaatggccctatatgagatgtcataaatggtggtagtgagaataagtagctgatgagtatacttccctaacatgatacaaaatatttacaacaaaccagcagccaagaacatactaccagaagcccacaggcattcccactgaagccaagaacaagaaaagtatgtctgatatcactactgtaatttggcatttttctgaaagtttgacaaatgcaacaacagagttaaataaggaatagaagtagattaatggaagatgatttgagaaaaaaacttgcaagtaattttagtgttaccttatgcaacccagagaattaaaggaaaactattgaaacaaataaaaagtttataatatatgtatttagtaagaaaacatgttagtgttcattatacatctatattttggtctcaactagctagaaaatgggctagaagaaaaatcacacatcatactggaagatatatgtaagttctttataaaactacaataattcaacccttatggcatataaacaccaaatataccactggaacataaagagatttcagaaagagttggtggggatataaactggtacattcagtagagttacaatttgttcacttttctgaagatgttatgcttcactaacataaatgtaaaataaactgtaacactaaaattatttaagttgtttattaaggtagtaatgataaatattaaattcataaacttaaaaaataaaatttgttgggaaagggtagtaaactcaacatattgttaatttaaaaatcaatatcagagagtgaccaatatttctgcacacactcaaatataactgctgattgaacagagattggacatgccatacttacttgtgttcatttccttccatgacaggtattgtgctgcttttattgtattaatacaaatagaccaaggcatttgaatgatggttgatagggacaaccttactttgttgaaataagtatatccatttgagtataggaaaaactcaggaaaattattgttttttgatattgagaattctatggtgggaaaattatgagccaaaataacaatataaatatatatattatttagtataaatatatattattttggctcataattttcccaccatagaattctcaataccaaaaagcatagttttttttaacaaatactacatatataatatttatatgctatatatttttatgggttgtttttttttcttgagatggagtcttgatctgtcgcccaggctggagtgcagtggcacgatctcagctcactgcaagctctgcctcctgggttcacgccattctcttgcctcagcctcccgagtagctgggactacaggtgcctgccacctcgcctggctaactttttgtatttttagtagagatggggtttcatcgtgttagccaggatggtctcgatctcctgacctcctgatatgcctgccttggcctcccaaagtgctgggattacaggcgtgagccaccacgcccggccataggttttttattagctttttatcctaaatgatttgggatcatttctagaattacttttaatgtctaaatagaggtattcatatttatcagaaaacaagttttccagcaagtgggatttcaggggattttgtttatttatagctgcggtagtattaaaggaatttttcttcctctagaagaggaggat

SEQ ID NO: 1885421 - DNA, 4001 bp, Homo sapiens
ttaattttcaaatttaagattcatttgtggaatttcaaagtccaagataaattcgcaaagatatggggtcacatgagcaactctggcacgtgcaccataataaattctgtggtcaccctaattacaaccctttcagagtaatcaactggttaatctgaatttggctgtctgggttggctgttcatttgtttattatttacatatttatttgcaaaaaaatctcatgttgtaagtttaaataagggcatatcatatactggtataaggaatagtcaaaaccagcatagggcaaaattcctgtggtgtctctctaaacgccttatttctctcttcccagttcagcaactgtgcaactgaacatggtggagaaatataaccacaagtatgctgaacagacttactttaactttataataattaataacctcaagtgggactttaatagtggcatctgttctgtgacccatttttgcttacagttggctaattattaagaagttaacagaggtttaagctgtgacctcaggctcgtggatgtatgaaaaaaaccttcagggaacttaagctaaaatcatggtctaacaggtggtagaatagatacttttaaagggtagggctagcactgttttagttttcccttaaatattactaccaacaatgattgtaaggtctagctgcacacacaggagccacaaatatctgcttgctttaacttaataaagacttaaggcaaaatccactctatcatctcattccagacattttggttttccaaagctacacaaatttattaacttttggtttgcagtttcaacttatgctgagctacacttaaaaatacttactgccaggtatggtggctcacacctataatccagtgcttttggaggccaagacgggaggatcacttgaagccaggagttcaagaccagcctgggcaaccaagcaaaacctctctctctacaaaaaattaaaaaattagctgagtacagcggcatgtgcctgtagtcccagctacttcggagactgagatagggggattgctggaacccaggaggttgaggctgcagggagctatgatcgcaccactgcaccccagcttggaccacagagtaagacgctatctcttaaacaaaacaaagcaaaataaacaaaaacttttgcaggggtctaccaattatgggaataacgctcattataaaacgtttaaaagctagatatagaaaatatttaaaaatctaaaatcacccatagttgaagaattcaattataataactgccaatatttttgcattttccttagtaagagtgacagtttcagagcctcctatgtgccaggtactctgctctttacttgtattattgaatctttacaacaacgctttgacgtaggtactattagcactcccgttttactgatgaggaaacctagactaatagcttatataactttgcccacagacacaatactactaagtggtggagtcagtattcaaactcactttctgtcctattccaggacctgtactatcaactatacaataatgcccattcttttgttattcacttatgtgtgtggactccaactatcctttgatctcaacgggccctacaatcttttgaatctacgacattttcactatttctcacctgctcatgtcctaacatgccacctggctcagcttccatggtcaaccaccagaactgttcccttgtgtacacactgactcccttgcttctctttcactttgtcatatgctcttggctaattccaacactgcctagatccaactctctgcctattccataccagcacttttgcagctgaacacagtggagaaaaagaaccacaatcatgctaaacagacttatatattttttatacatttaaaaaaataaatggaatgcttcacgaatttacgtgtcatccttgcataggggccatgctaatcttctctgtatttttccaattttagtatacgtgctgccaaagcaagcacacagacttctttttaaaattattttatttttaaattatttttatactttaagttttagggtacatgtgcacaatgtgcaggttagttacatatgtatacatgtgccatgttggtgcactgcacccattaactcgtcatttagcattaggtatatctcctaatgctatccctcccccctccccccaccccacaacaggcccaggtgtgtgatgttccccttcctgtgtccacgtgttctcactgttcaattcccacctatgagtgagaacatgcagtgtttggtttttagtccttgcgatagtttgctgagaatgatggtttccagcttcatccatgtccctacaaaggacatgaactcatcattttttatggctgcatagtattccatggtgtatatgtgccacattttcttaatccagtctttgttggacatttggcttggttccaagtctttgctattgcgaatagtgccgcagtaaacatacgtgtgcatgtgtctttatagcagcatgatttataatcctttgggtatatgcccagtaatgggatggctgggtcaaatggtatttctagttctagatccctgaggaatcgccacactgacttccacaagggttgaactagtttacagtcccaccaacagtgtaaaagtgttcctatttctccacatcctctccagcacctgttgtttcctgactttttaatgatcgccattctaactggtgtgagatggtatctcattgtggttttcatttgcatttctctgatggccagttttgatgagcattttttcatgtgttttttggctgcataaatgtcttcttttgagaagtgtctgttcatatccttcacccactttttgatggggttgtttttttcttgtaaatttgtttgagttcattgtagattctggatattagccctttgtcagagagtaggttgcaaaaattttctcccattctgtaggttgcctgttcactctgatggtagtttcttttgctgtgcagaagctcttgagtttaattagatcccatttgtcaattttggcttctgttgtcattgcttttggtgttttagacatgaagtccttgcccatgcctatgtcctgaatggtattgcctaggttttcttctagggtttttatggttttaggtctaacatgtaaatctttaattcatcttgaattaatttttgtatgaggtgtaaggaagggatccagtttcagctttctaaatatggctagccagttttcccagcaccatttattaaatagggaatcttctccccattgcttgtttttgtcaggtttgtcaaagatcacatagttgtagataggcggcattatttctgaaggctctgttctgttccattgatctatatctctgttttggtacgagtaccatgctgttttggttactgtagccttgtagtatagtttgaagtcaggtagcgtgatgcctccagctttgttcttttggcttaggattgacttcgcaatgcgggctcttttttggttccatatgaactttaaagtagttttttccaattctgtgaagaaagtcattggtagcttgatggggatggcgttgaatctataaattacctggggcagtatggccattttcatgatattgattcttcctacccatgagcatggaatgttcttccatttgtttgcatcctcttttatttcattgagcagtggtttgtagttctccttgaagagttccttcacaatcccttgtaagttggattcctaggtattttattctctttgaagcaattgtgaatgggagttcactcatgatttggctctctgtctgttactggtgtataagaatgcttgtgatttttgcacattgattttgtatcctgagactttgctcaagttgcttatcagcttaaggagattttgggctgagacgatggggttttccagatatacaatcatgtcatctgcaaacagggacaatttgacttcctcttttcctaactgaatgc

SEQ ID NO: 1885422 - DNA, 4001 bp, Homo sapiens
agcttttatataaaagtaatttttttaaattaacatagatttttctcatggaacataagattacataaacatagtgccaataaaataaaagagaatagaaagcccaaagacagatgtatacaataatttagtagataataacaaacacaattccatttattgaacatgcaggtgttgggagacaattctccatgggtctttcacttttctgcaagtcttgtgggggactaactctcctttgttttagattatctttttatggctgttcatttagcaaacagccttggaaaatagaggtgctcccacagagcaaagggcaggcatgcttactgaacgctttagaagatttggataagctaaactcagagttcctctcctataatgcaacccacttcatgtttaggtaattatctgggctcatcctttcaccaccatgggacttcagtcaaggagaactgatgcacatatggtgatgctcttgctgcctgctgtgcattagataataataaagtcctttgtttctgatccaggagtcttgggtcttctgccagcatctgtgaaactggcaggctaacttgtcagctggcaagtagggtaaaatctcaggctcttcacagttattaaacaggatacttgttaggaattttgcatttattatattatttaattattataactctacaaagtaggtgttattatctccattttacagatgataaaagcaatgtttaaagagattaagtaacgtgtccaaggtcaagcaagaattcatctctgggccaggattcgagttcaggactgtatcggtgttgtacaaattattacttatttggggaaataaagttaaattcccatttcatcatataggttaaaatttcacatggaatatagagtaaaatataaacaaacaaaaaccagtaaatatgcatatctgatttttagatgcataagaacttatctaagcacaaataaattttaagaccaaattgaatcattctgaatatgtcaaagggcactactgaaaggcaaatgaaaaactgggaaaatatttgaaggaaataggataaggaattaatgtctttaatatgtgaaaagtttacgaaaatccacaagaaaaatattaagtctcttagaaaaatgagtaaaagacttacaaagcaacttacacaagttatataaatagcaaaaataaaaacaatctcccccaattccatatatgttctacagtttcaaataaatggaattataattgacaaaaataagtatatagaaaaaatgttagacttcaacattaatgaagtgctacccctaaatactcttaattttaacaaattggctaatttttgttttgttttgttttgttagccgtgttagccaggatggtctccatttcctgacctcatgatctgcccgactcgtcctcccaaagtgctgggattacaggcatgagccaccgcacccggccgctaattttttaaaattaaaatatgcagtattgctgcagttacaatgaaatggttattgtgcactattgatgaaagtgtacattatacaactgttctagagcagggatccctgtaccagtccgtgacctgttaggaactggcccacacagccagaggcaggctgcgggccagcaagcattacagcctgagctctgcctcctatcagatcattggcagcattagagtctcataggagcacaaactttactgtgaactgcacactccttgtaagaatctaatgaatcccatgtggtgtttaactttctgttcctggcttatttctcttaacagaatgtcctctagttccattcatgttgccacaaatgacaggatttcatgctttttatggctgaataatattccatggagtaaatataccagattttctttatccagtcatcaaaaatatggaacacttcacaaacttgcatgttatccttgttcaggggccgtgctctgtgtcattccaattttagtgtatgtgctgctaaagtgggaaatgaaacattttaaaaatcctgtttcaattctaaaagacatatctgaaaatgtatttttcatcagtgtcaagaattaaacaatataaataactccctcgatttaaaaaagggtgattcacatacttctaattcctctctgcctcccctgctgggtatttccagctctgctgaaatcgtccagatgtttagattgatgttattattttttttacatgatgcctcttctactttaagaaagctttaaaggccgggtacagtggctcacgcctgtaatttcatcactttgggagaccaaggcaggtggatcacttgaggtcaggagttcaagaccagcctgggcaacatggtgaaaccccgtctctactgaaaacacaaaaaaattagctgggcttggtggcgcatgcctgtgaccccagctactctggaggctgaggcaggagaatcgcttgaacctgagaggcagaggttgcagtgagctgagattgcaccaccgcactccagcctgagcgacagagtgagactccgtctccagaaaaaaaaaaaaaaaaaaaaaagctttaaaatgtactaaacagccgtgttaccaacaattacttaaactttacaggtcttattgtttattactgttttttgtcttcatcttttctgaattatttattttgatgctttccttttttttttttttttttttgatccagagtctaccactgttgcctgggctggagtgcagtgatgcaatctcggctcagacagcaacctctgcctcccgggttcaagtaattctcctgcctcagccccccaagtatctgggattacaggctcacgccacccggcccagctaatttttttgtatttttagtagagatggggcttcactatgttggccagcctggtctcaaactcctgacctcgtgatctgtccacctcagcctcccaaagtgctgggattacagatgtgagccattgcgcctgccctattttggtgttttgaaatttttttttcttttttttttttttttgagacggagtctcactctgtcgcccaggttggagtgcagtggcgtgatctcagctcactgcaagctctgcctcctgggttcatgccattctcctgcctcagcctcccaagtagctgggaccacaggtgcccgctaccacgctcggctaatttttttgtatttttagtaaagacgaggtttcaccttgttagccagggtagtctcaatctcctgacctcgtgatccgcccgcctgggcctcccaaagtgctgggattacaggcgtgagccaccgcgcccggccttgaggtttcttactgttgttttgtttttagcagaggaggtatataggatactgactgccttcctttaccctgacacaggatagataagttgagtgggtatggaatgctactaacaatcttttccaagaggaaaccctaggaatgtggtttcacaatcttctagcatttggtttgtaagttaaaagtttgattctcttttctatgacggtatttttttttcctgtcatgaagcttataaatttttccctttaaccataggcttgagaaatttcatcagactatgtttaggtagtttttctttttttctgtctctcttttctttctttttctttttctttttttttgaaacagagtcttacctcttgtgcactattgacgaaagcatacattatacattcacccaggctggagtgcagtggcactatcacagctcactgcgggcttatcctgggctcaagcgatcctcccacctcagcttcctgagtagctgagattacaggtgtgtgccaccacatccggctatttttttttttaatagaaatgaagccttgctgtgttgcccagactggaggtagttttctgagaattcctacttggcattcaacggcctctttttctccactcaggaaacaatttattacatattctcagtgatttttttccttctattctctcatcatgaaattcctattat

SEQ ID NO: 1885423 - DNA, 4001 bp, Homo sapiens
gagatttgtgataatgcaaagaaaggaagagaatatgcccttcttggaaattacgactcatcaatggtatattaccagggggtgatgcagcagattcagagacattgccagtcagtcagagatccagctatcaaaggcaaatggcaacaggtaagatggtattaaagtattagatgagttaggatggcagtaccctattatacttgagagattagagttggaaaatctaattttgagtttgagatggaaatagtgcctatttatctcaatactgaaatacatttaaaatatactcttgaataattttctagtatcttacctggttaatgttttttgatcatatatttcgtgagggatgttttgaaaatatttaattccaattgaatctactttaacttttttctcttttcatgatcagttacctaattgtgtgactgcaaacttttgaaataaagtatttcattcattcattcctttttttttttttttttttttttttgagacagagtcttgttctgtcgcccaggccggagtgcagtggcgcaatctcggctcactgcaacctctgcctcccaggttcaagcagttctcctcctcagcctccggagtagctgggactacaggcatgtgccaccacgcccagttaatttttgtgtttttagtagaaacagggtttcaccatgttggccaggctggtcttgaattcctgacctagtgatccacccacctcagcctcccaaagtgctgggattacaagcgtgagccgctgtacctggcccattttttcttttttttttttctttttttttttgagacggagtcttactctgtttcccaggctggagtgcagtggcgcgatctcggctcactgtaagctccacctcccgggttcacgccattctcctgcctcagcctcccgagtagctgggactacatgcgcccaccaccacgcctggctaattttttctattttttagtagagatggggtttcaccgtgttagccaggatggtctcgatctcctgacctcgtgatccgcctgcctcggcctcccaaagtgctgggattacaagcatgagccaccacgccaggcctctttctttctttctttcttttttttttttttaaagagacagggttttgctctgtcacccaggctagagtgcagtggtgccatcacagctcactgcagcctcaaactcctgggctcaagcgatcttcccatctcagcttcccaagtagctagggggacaggttcacaccaccatgtccagcaaatttttaaattttttgtaaggactgagtcttgctatgttgcccagggtggtctcaaactcctggcttccagtgatcctcctgccttggcctctcaaagcactggtattacatgtgtgagccactgtgctggacctgaaataaagtattcatacttgcccttttccctttcatatttacatgttgttttgacccattttgcaaaactcttttgaaagactccttaaaaatacaaatgagtcagtaatctaataaaaaacattactatatttgctgtcttttgactatataatttgattatttaataagacagttaaaaacttgaattttaatttgcctacttaccgttttttaaatttaatgttttaattgatcagtaccttttagcatagttcttgctttgctgttctaattccaaattaattgtaacttttaaaaaagaattttttttttttttacaaataatacttataagcaatatatctttaaggaaataaaagcatcttcaatgatgtttaaacaaaattggcttttgttttataaggacttattatttaagctcgtgtttttcacctgttatactaaaacaacgtaacatcctttttagaaaacgttaagtaaaaaaaatacagaacactccaggagtttgtgtgcatctcgtgcagggaacatgctggtcttctctgtgttattccaattttagtgtatgtgctgccaatgcagacactccccacttagtgttaaaatttaaaatcttctaaaaattaaaagtacaaagtcaagtgtttctttgaagtttccattttatgtactaatgcctttcaagtgtttcttctaatttttccattagtcagaaattgatgttttcctaagttttgagggtaaatttgacttattttccaacttaaatgttaccaagttatattgattgagaacaatatacttgctccaactcaggctcaaatttttagttgttttcttctatccttcctattagccacaggcagggtattttattaatctattatggaaatgttttttatatattctgaattgtgtgtgttaaatagtgaccatttctactcagacatttctactatgtttctttccactgggttctgaaattacatttcttccactatagcatattctgtaattgcatgtattagctgttgaattttacctagctttttctttggatctgtaactccttcatatgttccttttaatatatcattcaatataaagatgagggaaaatttcttatactctgctttacagtgtgacgtgctttctggttaaaaaaaaaagaattgttaaaatgaatttataattgtaattttcttttcttttctttttttttttttttgacatggattcttgctctgttgcccaggctggagtgcaggagcgtgattgtagcctcgaactcctgggctcaagtgatccttctgcctcagcctcctgagtagctaggactatagactcgcactaggactacagactcatgctgtcatgcctggactaatttttttgtttccccaggctggtcttgaatgtaatttttaatctttatctgtttgctttggaaaattagtttgggctcaaagtttgcaaacacaagaatttcctcatagtatgtgttcagttaaattttttaaatacaggaaaaatcttgtctttgaaatcaaaataaactttactcagaactcaaaataatttaaataaggcaaaaataattcagatttcaggtgaaggagaatttaaataaaaactggaagtttgtaattcatagtataatactgcttctagctttcagacactcatgacaggcgttttatatttagtgatattgggaataggaaatgctgttgaaaattttggcttaatttttgggaatctatttataaatatattaaaagtatttagcacaatattttagatttcttggaatgtttaacttgttacctacttagttgcttgttttaaattgtattaatgatcatcacgttctttggtagaaatggaattccgttatgaaagatatataactacttattaaaaggtatagaattatgattttttcaaactaatttctacccttttctcagtattacttgaaatagttctttgtatttatgaatgttttaatgattcatttttcaccctttgacattaagaaaacgtgcactctatagtaatttattatttacaatttatgaagtatttaaacagcttctagcataaagcctattttttttttttaaggttcggcaggaattattggaggaatatgaacaagttaaaagtattgtcagcactttagaaagttttaaaattgacaagcctccagatttccctgtgtcctgtcaagatgaaccatttagagatcctgctgtttggccaccccctgttcctgcagaacacaggtaaataggactttatattctctttaggtgcttctagttaattgatgttcacagtgaagcatgttttgaacaaagtatgaaaaattatttttggggacatgtaatttcagtatctgtttttaatattcacatttatacatttacagttttgtatttgataaagtacagaagtaaatgacttgttacatatcttgcttttagaatgctttattacgctaataacaatagatgcctattgctagtcctaaaatttatcagttaagagaggtcttttgggtttcgtaatggcagcatcaaa

SEQ ID NO: 1885424 - DNA, 4001 bp, Homo sapiens
gtcagcctgtctctacttcggcatctcaaagcgttaaggccgagcagctgatgctcttgatgcggggattaacagaggttagtagtttttcctggttagaaaaagtgtaagagaattaggttgtagcgggagtggtttgatttggttgataccctggaggcccagagttgtgaaattttactttgactcaagatgaaattgggagtaattctaatgagaaaagaaagtgcttgaggaagaggattcttgctgaaatctgaggctttggaaggagaaaaggttaaaacaaaactacagctgagtttaaaacccaataccccttaaacactggctggctttaaaactctactacaaatgattagagcattagccatgatttctaaagcttgcaatttcacttatgaatctacacactgattacattttggatacatttggcagccaaagtagaccaggaaatcattattggataaaaagggccacacaggaggaagtttttattggcaaataccaacttatatattcacagaatcctatcgtcttagtcctagaaggaatctatcccccctgccttacgaaggccttctctaaaatgtgtccaaagagacagcaatctcttctcatttaataacctgcccccgcttccaactctctgaaatgtattccaacctctgatactcctatcacattaatttaaatcctttttttttttttttttggttatctcctctgtgaacatggaaaacagttatcatcttttctttcaaaacccttcatattctagaaggctataattacatttccctcaattttctcagcttttgatggaataatatacatgtgtatttctgacatttgttgacttctggggatgtgtagggcactgagcgtgtcacataaagtatctcatttagttctgacaaaagcctgcataatatttatattgcataaattttatataaatataataataacacatgattatagatcccccccccactttctatctaaagtagaggctccttgtaagctggaattcttagccccatttgagagataaagaaattgacacttgaggttcagaggttaataatacctttcaaacagttggtaaatagaagagccaggattgaaaaactgccgatgttcatgtgaacacagggattaaatttcccaaacctttgagtcgacttccctacgactattttttttttttttagatggagttttactcttgttgcccaggctggagtgcagtggcttaatctcggctcactgcaatctctgcttcccaggttcaagtgattctcctgtgtcagcctcccgagtagctgagattacaggcacctgccaccatgcccgggtaatttttgtattttcagtagagatggggtttcatcatgttagccaggctggtctcaaactcccgacctcaggtgatccacccacctctgcctcccaaagtgctgggattacaggcgcgatccactgcacctggcccactatgatctttctattcttctttggctcctttgcttttcttctcctgtcctttccttcatgctcctttctttgactatttgactatctttactgttcttcttagcattcatttttatacattacacatatattatttacatattataatatttacacaagatacagttttctcttcactttctctctatctaaagtagaagctccttataagttggaaccatgacttatgcataatttattgactttttagacaaaacattatgctttgagtgatgattgttttattatggtgtagaaaaaaaggggtcctattaagaggaagacagagacttttatgaggtcaaaccatttctccttcctgcaagctccaaaagcatctttactttttgttttctttttatggaatgcttcatgaatttgtgtgtcatccttgcccaggggtcatgctaatctctgtattgttccaatttaagtagatgtgctgctgaagcgagcacctgaaagcattttgtgcaaatgcagtcaagtatagcaaaaaaagaggaggtgggtgggtggtgctggggtcagaagacatgggttgaaattctaactctaaaatttactgttcgtttgacctgggaaagttactattacattctgagcacctgttttctccatggtaaaatggggatgataatacggatcttatagtgttatgaggattacaaaatgcaatagagtgggcattttatatagagctgggcacgtggtaactgttacaatgacaggtttcatcattagaatatattcgattcttgtacctctctcacagaaatcactttcttactagacagtaaattcttcaagggcagaggctggccttcattttattaccactcccctcccctccagcttaatgctggtcacatggtagcatgcaacaatttcttggaaatgttgtatgagaaggaaccctagtgaggaatccaggctggagaactctgttaaagattctttgaaactgaatgcagggtctaggtgtggtggcttatgcctgtaatcccagcactttgggaggctgaggcgggaggtttgcttgagctcaggagttcaagaccagaagtttgagacaaagtgagacttcatctcaactgaagaaaaaaaaaaattagctgaatatgacactaaggtggctcatgcctgtagtcccagctgcatgggaggctgaaatgggaggattgcctgagcccaagaggttgaagctgcagtgagccatgatcgtgccactgaactccagcctgggtgacagggtgagaacctgtctcaaaaaaaaaaaaaaaaaaaaaagctgaatgtacatggagtccaaaagctatattttgtaccaggcccgagaataatgttctacctatagaaaagtttgaaaatccaagtgactatattttcctttcttttttcttttcttttcttttttttttttttttttttttttttttgagtcagagtctcactctgtcgcctgaactggagcaatcttggttcactgcaacctctgcctcctgagttcaagtgattctcctgtctcagcttcccaagcagctgggattacaggcacgcgccaccacactcggctaatttttgtatttttagtagagacagggtttctccacattggccaggctggtctcaaactcctgacttcatgatccacccaccttggccttgaaaagtgttgggattacaggtgtgagccactgtgcccagcctcaatattttcatctctactatttcatttagcccatttaaaaatatggagataatttaaaaaataatgtcctgttcttgccttgtagattctattctttctcaagctctatacacatttcaaacaaagttattaatattatcatttaaagtgatttgtccaggatgatgtaatgctcttttcactgcacgcctttgtattctttttaaaattgagacagggtcttgctatgttgtccaggctgaatttgcacttctgggctctagcaatcctcctgcctcagcctcccagtagttgggactacagcttcttgctacctctcccagctccaaacttattttaaactccctttcagattgttctgttactcctagttcctgtactgtaaattcttcctttctgtgtatttaatgcatccctctcaggagggatgttggttacctcttgtgttaagatttttaatggtgagctcattgtcaaagggaattgtttgaaagggtccaactgctctggactgtggcaatatcaagtgggatgtttctcattggcctctgctgtgatcctccagggctaaacacactaagagtagttctgctgttaacaataaggcctagacactgtagtattttcacatagtatagtactctggatgtaaaagctcaaaaattgtgattccttgaacgttcactacatcttcaagcaaaaacacatttttacattatttttacgttgattattttagtgaaagacc

SEQ ID NO: 1885425 - DNA, 4001 bp, Homo sapiens
ttgtagagaatttttgtatctatattcatcagagatacttgcctgtaattttcttatttttgtgggtgactgccaggctttggtatcagagtgatgcttgctttctagaatgaattacagagaagtccttcctccttaattctttagaatagtttcagtatagatgatgccagatcttctttgtaaatctgttagaatatgacggtgaatccctctttgtctgtttttttttttttttttggttgacttttttttattactgattgaattttagaactcaatattggtctgttcagtgtttcaatttcttcttaattcaatcttggaagattgtatgtttctaggaatttatacattttctctagattttctaatttgtgttcatagaggggtccataacagtctctgaggaacattttcatttctgtggcattgcttgtaatgccacctttgttgtttctgattatccttgtgtggatctctgttctttttctttgataatttagttagtggtctatcaatattgtttattcttttaaaaatggcttttgcttttgttcattttttgtatggatttttgggtttcaatttcattcagttctctcagtttaattttctgctgctagcattggcgatagtttattcttattttgtgtcattttttatcattagtttgagatttttctagttttttgggtaggtatttagcactgtaaacttttctcttgacaatccttttgctgaattccagagattttgatgtgttgtgtctctcttttcatttacttccaagattttttttttaatttctggattaacgtttttttaccttgaagtcattcagaagcaagatgtttgatttccatgtaattttgtatttttcagggatatttttggtactgttttctatttttacttcactgttgtctgagactatggttggtatgatttcaaattttttgaatttattgagacttgctttaaaatcaagtaatgcggtcaatcttgaagtatgctctgtgtataatagagaataacatacattctgtggttaacaggtgaagtattctattgatgtctattctgcccaatttgtcaagtgttggatttatgtacagaatttctttgctagtttcctgtctaatactgtcagtcaggtgttgaagtcttccactatgcttgtgtggttgtcaagtctttcataggtttagaagttcttcctttataaatctgggtgctccagtattggaagtgtatatatttaggaaagttaagtcttctttttacattgaacctttatcattatgtaatactcttttttattctttattttactgctgttggtttaaagtctgttgtatgtgatataaaattagagactctgctgtcttttgttttccatttatgtggtagatctttctccacccctttactttgagcttatgggtgtcactacttgtgaaattggtcttttgaagacagcagatggatgggtcttatttttttattcagcttgccactgtgtgccttttttctttctttttttttttttttttgagattgagtcttgctctgttacccagacaagtgcagtggcgcaatcttggctcactgcaacctctgtctcccgggttcatgcaattctcctgctaatttatgtatttgtagtagaggcaaggtttcgctttgttggccaagctggtcttgaactcctgacctcaggtgatccgcccacctcggcctcccaaagtgctggaattacagacatgagccaccgtgcttggccccactctgtgccttttaagtagaggcatttagaccatttaaactcagatttaatattggtatgtgaggttttgatcctattgtgaagtttttagctgcttgctttgtaatttctagtaaaaatatggaactaatttgtgaatcatccttgctcaggggtcatactaatctatgtatcatttcaattttattatatgtgctgccgaaatgagcatgatttagcatagttcataaaagccgtaggatttttgaaatggtaaataagcattggattcaactttaagtccccagctgctttagatcctaacaagagaatcagcctgctttttgaagttttgaagtgtggcactgagttttcctctctaactatgaaagtcttagatggcatcttctttcaatataaggctgctttgtctacactgaaaatctgttatttagtgtagccaccttcattcattatctcatatattttgtataacttgttgcagtttctgtatcagcactttctatctcaacttgcattttatgttatagagatggcttcattcattaaacctcatgaaccaacttctgctaacttcatttgtttgtgtgtgtgtgtgtgtgtgtgtgtgtgtgtgtgtgtgtgtgtgtaggcagctttcttacctttctaggccttcataaaattgaaaaaaattaagccctggctttggattaggctttggcttgagggaatgttgtgcctggttaaatcttttatccagacccctaaatctttctccatatcagcgataaggcaattacactttatcatttatatgtccatgtaagtagcaattttaattaccttcaaaacctttgccattgcatttacaacatgactaactgtttagcacatcctttcagcctgtctcagttttcaacatgccttccttgctaacattaatcatgttcacttttgatttaaaatgtgataactatgactcctcctcccttttaaacacttaaaagctattgtaatttttttcattctaacatcttgtaaatcatgaaattcattgcttcatattgcccatattttatcttgttttattcttaaaattgcagacttttaaaatatttgagaatgagatgtaactttttcttttttgaaaatctctcaatatagccaaagtactttttggcttaatggcatatgcaaaagttaagagtacaacttcttacttaccattccattgtttctgcaagtaacaaattaaaagaaattctaggatagatagagttacatcttcaacaataacaaaaatattcaaatattgtaaagtataaatataatacttattgttttggtttgtttcattttgactgactgggaatttgtgagggacaggtgccactcccaccaccaggctcagagccatgggtcagacattttacctaggtggaaagaaagatcataaaacagagaaatcacaagcaattttcaaaggaattgactttattaccaagacacagtggtgaagcttgagattaagaatgctttcaaaagtaagggaggttgtcataaaaagtaattaagaggaaactggacattatatcattgatataagttaactataagacagctaaattttcagagagaggcaagaataaagacatttgagaagagccctcatagagtcacaacaaatctcaagcattgaccataaaaacgtatttctacaaggactccagacccttaaaacagtgatccagttatttcacgtattttttaatgcattattcagagttgtatattaattttagcagtatatagatacacacacatatacatatacacatatacatttagtggttgctctagaacataaatataataaattatttttaagtaggagggattctacttttcagagtatattcctgttgtttttgtttgtttttcaaataacattacaaaatagaatatggaaaaacacttcattctgaagcactaaaattttatcatagctccatatttatgacttctgtaagaattgctcttcatgattagtggcccagcgaatcgcatttactgagggaaaatttatgccttgaagacaaatctcaatatctgttttagaacacagagactgtttttattcttcatacatcttattttataagcttcaaaatttattatcaataaaaacctaccagaatggctaaaattaatatacaactctgaataatgg

SEQ ID NO: 1885426 - DNA, 4001 bp, Homo sapiens
ttcatgtctttatctttcagttgccctctgatcttggttattgcttatcttctgccatctttgggtttgtttgcttttggttttctagttcttttagttgtgatattaggttattatgacatcttcctagctttttgatgtgagcatttagtgctatacatttccctgataacactgctctatcagcatcccagagattctgatacattgtctctttgttctcattagtttaaaagaacttcttgattttgccttaatttcattatttacccacgagtgactcaggaacagcttgttcaatttccatgtagttttgtggttctaagtgaatttttcagtcttgaattctaatttgattgtactgtgatctgagatactgttatgatttcagttcttctgcatttgctgaagagtgttttatttcagattatgtgatcaattttagagtaagtgtatatggcaatgagaagaatgtatatcctgttgtttgcaagatgaggagttctgtatatattgatcaggtctgcttgatccagagctgagttcaggtcctgagtatctttgttaattttctgtcttgatgatccatctaacattgtcagtgtggagttaaagtctcccactattattatgtgggagtctacatctctttgtacgtctctaagaacttgctttataaatccaggtgctcctttattgggtgtatatctatttaggaatagttagctcttcttgttgaattgactcctttaccattatatagggcccttctttgtcttttctgatccttgttggtttaaaatttgttttgtcagaaactaggtttgtgacccctacttttttctgttttccatttgcttggtaaattttccttagtccctttatggtgaacctatgtgtgtctttgcatgtgagatgggtctcttgaagacagcataccaacagattttgaccccgtccagcttgccatcctatgtcttttaattggggcatttagctcatttacatttaatgttaatattgctatgtgtgagtttgatcctgtcatcataattcaagctggttattttgcagacttattatgtggtcacttcatagtgtcactggtctgtatacttcagtatgtttttgtagtggctagtaacagtttttccttttcatatttagtgcttccttcaggaactcttgcaaagcaggcctggaggtgacttattccctcatcctttgcttgtctgaaaagaatcttatttctccctcgcttatgaaacttagttgggctggatatgaaattctgggttggaaattgttttctttaagagtgttgaatattggccccaaattgcttctgtcttgtaaggtttacactgagaggtctgttgttatactgacggatttccctgtgtaggtgacccagcctttctctctggctgcgcgtaacattttttcttttctttcaaccttggagaatctgacaattatgtgccttggcgttgatcttcttgtgaagtatcttactggggctccctagatttcttgaatttgaatcttggcctgtctttctagattggaggaagttctcctggatgacctcccgaagtatgttttccaacttgggtctgtcctccctgtctctttcaagtaccccaatcagttgtaggttcagtctttttacatagtcccacatttctcagaggttttgttcattccttttcattcttttttctctattcttgtctgcctgtcttatttcagaaagatagtcttcaagctctgagattcttttctccacttaatctattctgctattgatacatgtcattgcactgtgaatttcccatgttgtgttcttcagctccatcaggtcagttatgtttctctctaatctggctattctggtaaaaatatggaatgcttcaaagatgcgtgtgtcatctttgcataggggccatgctagttttctctctatggtttcaattttagtataagtgccaaagtgagcatgacagtatatttttaaaatcccaagtggtttgtatttataccccatttatttacggactccagaattatgaagctactttaaaaatggttagcaaatttcccatatctagtttactaacagatttcaaaaaggcaaaacataaacaaaaataaaacaaaataatatgaaatgaatatgtacagtataataatgaaaactgttatttaatgttaggatttactatagtcatcatttatatattaatttgtggtatagcaatttttaaatcttaatgacatattaatccttttaaaagtgcttccttctagtaatatttaacatgccgattaatgcattttaatatttttgttgaggtttaattgatgtacaataatcagtgcataaagtgtttaatttgttgaattgatatgcatataagccactcaaataaacactgcaattaaattgatgagtatacccaccagccccaagagtatcttcttttgtaattcatatagagtcctacaacctctcctttctacaactattaatttcctttctgtcattatattttgtttttcttattttaagcattttatataagtggaatctcacattatgtactcactttgtggagtttattttactaccttgtttttgttttcagatttattcacattttggtgttaatcaacactttaaaatttctgaatagtattctgctttatggatatacaatttgtttattcatttacctgttgatggatatttagaatgtttccagtttggtgctttacaaataaagctataaaaatttgtgtataaatcttcatgtgaacataaatatctaggaatgaaatgtctagaatatatgcaagtttaagttagaaagaatttctaaaaactatattatagaagaggttgctagcaagatggctgaataggaacagctccagtctgcagctcctggagagatcaacacagaaggcaggtgatttctgcatttctaactgaggtacccagctcatctcattgggactggttagacagtgggtgtagcccatggagggcaagccaaagcagggtggggagtcacctcaccttggaaccacaaggggtcgggaactccttcccctagccaagggaagctgtgagggactgtgccgtgaggaacaatgcactgtggcctagatactatgcttttctcacagtcttagcaacctgtagtccaggagattccctcgggtgcctatgccaccagggccctgggtttcaagcacaaaagtgggcagccatttgggcagacaataacctagctgcaggagtttttttcataccccagtggcacctggaacaccagtgagatgaaaccattcactcccctggaaagggtgctgaagccaggaagtcaagtggtctaactcagcagatcccacccctatggagtccagcaagctaagatccactggcttgaaattctcactgccattacagcagtctgaagtcgatctgagacactcgagcttcgctgggggaagagcgtccaccattactgaggcttcagtaggtagttttcccctcacagtataaacaaagccaccaggatgtttgaactgggtggagcaaactggagctctgcaaagcctctgtagccagactgcctctctagattcctcctctctgggcagggcatctctgaaagaaaggcagcagccccagtcaggggcttatagataaaactcccatcttcctgggacagagcacctgggggaaggggcagctgtgggcacagcttcagcagacttaaacgttcctgcctgctggctctgaagagagcagcagatctcccagcacactgctcgagctctgctaagggacagactgcctactcaagtgggtccctgacccctgtgcctcctgactgggagacacctcccagcagggcttgacagacacctcccagcaggggtccacagacacctcatacaggagagctcttgctggcatctgacagatgcct

SEQ ID NO: 1885427 - DNA, 4001 bp, Homo sapiens
acttttcctttttgggaattaaagtccttcttattgcatgtatccagttacaacacaatatagtgtattggttaagaacacagaccctggaggcagaatgcctgggttcaaatcctgtctccatctttactaattgtataaccttgagtaaattgtatagtccctgagtgcctcaaattcatcatctgtaaaatgggggtaatagtacctgttccatagagatgtgaggattaaatgtgtcaatctatataaagtgcttacaacagtgtcaggaaggcaggattatataaatgttagctatgctgtttaataatccttttatattagcagcctcttcttcacagtagtcaaagttacaattttctacataataaaacttgacttttgaaataatcgtaagcccagtggtgtttctaaataatgctgttactatagtgagtgctgttctcttctgagaagccttttctgatagcctttctcttctgtgacctttaattggacttatttgggaagataagttggtgctttattattgttaggttatttgacctatgttagttttgtgttgccacctcgattaagttctttgagagctaaaatcattttttacgtgtcttagtattttatatagtgtaaaacatacagtagtaacttgataatgatcccttattagaggcagaaaataaaaatagaagcaatatatcattttatgtttgaaaagatgttagcatctaaaatagacttattagtgttttactttgttttaggttcctaaatatttgtcacagcaatgggctaaagcctctggaagaggtgaagttgggaaactgcggattgccaagtaagttatttacatattcttgacattttaaaaagctatttttgaaatttttataagtgcttttaaaagtgattataatttctgatcagagtttacttggaaaatgacaagtaatgagcatgtcaaggcttgtcaggagatggttaggtgccctgtaaggagacatccttgcacatacacacatatccccacacccacactcctagtgactggtggtataaatataatatcaagtttattggtttaccttaatggcggtgaagcagcagattatgtagttctttcacccctccatcctgtctgcctccttgagcaggtttgcttaggctgggtataactggatgcaccaaggaaagtacttgcagcaggactttgccactgtaccactgggcctacttataggggctttggaagtgggtggggagtatctagaaaacagtgtaacaatatagttttctggttgaggaaatggccttgttagaaaggaaagcctctaaagctcagctagtgtcagctggaggccttgtgttccattctttctatccattcattcttaaccaactccattcagattcgtatgtccatgattccattgaaacagctcttgtctgttactggtatcttcctctttatcaattagcttttgcttcataacaaaccatcccaaaacttagtggcttagaacaaaagccattttatttgctgataattctatggatcaattctggttggggctggcctgggcggccttcctggcaaggatgtcctcacttgtatgtggtggttgagttgacattagcaggggcaacagctatttatttcatctctagcaagctcattcacatgatggtgaaagagttctagtaggaaaagaggaagccccagtgcacaagcactttgaaagcctgtgcttgtgtcacatttgctaaagtccttttgaccaaagcagctcacatggccaagcccagattcagttatgggaaaacagactccaccttttgatggaagctgctgcaaaaaaaacttgtgttccttatttatttatttatttatttcaaaatatggaatacttcctaattcgcatgtcatccttgtgcaggggccatgctcatcttctctgtattgttccaattttagtatatgctgctgaggcgagcacatgttccttttcataatcggccacgtccacattcctaaatccaagagtcaactagcagctctcttacttgaacttcggtggaatttgacatagttgatcacttttttcctgagacttttttttccccactttactctaggacacatctcttctcctctcgcctcattggctgttccttcttagtttcttgctaagccccttctcatcttctgtctctaaatgttatgtgaccccaggactcagtccttagttctttccttttctctcttttcacttcctgggtgttctcatttggtctcatggctttaagtaccaggtggtatttaaatatacagttcaggatgcttctgccctccgtggaggcaccgtgctcaggaaggtccttattttctttgtgttccatgccctggctgtgactttctccacactactcccagaatcaaccactgacctactagaattgaccgctgatctagagttaaccacagaccaagatttaaccattaacctagacttgaccacggacctagagccaaccacagaacacgcaggctctggaattctttactgatgtggagtcagccaactctagctttgtggaagaagctgctgaggccacagctgattataatccatttcagagaacttgtgagtgacgattatgatgtgagtgaagatcagtattattattatttttcgagacaatgtctcactctgttgcccttgctggagtgctgtggcgtgatctcagctcactgtatcctctgcctcccgggttcaagcgattctcctgccttagcttcctgagtagctgggcttatagatgtgcgccagcatacctgactaatttttgtatttttagtagagacggggtttcgccatgttggccaagctggtcttgaactcctgacctcaagtgagccacctgctttggcctcctaaagtgctgggattacaggcggtagccactgtgcccggccgcgagtgaagattattatgaatgctgtttattccaaagagcccatcattagagtgacagacaagcttagcagattcacaggaagcaatgagtccatctcagcgcatgttaaagcaaatttttagttagctgtgactatgactgttatccactactttctaagaagattctgagctttaagacaagcctgttactccactataggagattgcataatggtagaaaactagtgaaatgtaggatgtacccagctgaggagaaacagcaagacattgatcctgggttgggtgatgtgaattgtgcatggatggggcaggggcatttcttagctgtgtctcatttaatatgggctcaataaatgttcatttcaactgaaaataagtaaaaatcaaaaaatgtatttacacacctctctctctgtccacgctcgtaattctgactgtgttgttgatgtttggactgtgtcctcggatgtcctcggatgtttcagaagcatctcaaacttaataattgctattcttctgttttttctctctgtaacactcttcctttagataatccccatgccttactcccacatttcttttcggtctctgttcacaatttcagctcattgaggtattttctggccaccatatgtaaaatagcaccctgcaggctctatctcccttaccctcttattattcactgttcttttgtgttgttatttattctccttctactatacccatctgacatactgtatatttgtttatgtgttgttcatatcgcctactaaagtataaactctaccaggtcaggatttttgtcttgatgattactatatctccattgtctagaacaatgcttggcatagtagacactgtgttctaaagttaggtggggacaagtacagttgtccctcagtacctgcaggagattggtgtctggcatgccccatctcccataccaaaatctaccatgctcaagtcctttatataaaatggcacagtatttacgtataacctacacacatccttctg

SEQ ID NO: 1885428 - DNA, 4001 bp, Homo sapiens
ggttttctagtttctgcacataaaggtattcatagcagcctcaaatgatttttttttttttatttgagttggagtcttgctctctcaccccggctggagtgcagtggcacaatctcagtttactgcaacctccacctgatggttcaagtgattctcctgcctcagcctcccgagtagctgggattataggcattcaccaccacacccagctaatttttgtatttttagtagagatggggtttcaccatactggccgggctgatcttgaactcctgacctcaaatgatctgcccacttcagcctcccaaagtgctgggattacaggcatgagccaccatgcctggcttgaatgatcttttgttatttctgtggtgttggttgtaatgtttccaggatcatttctaattgagcttatttggatcttctctcttcttttcttggttaatctaactaatgttctattttgtttattttttcaaagagccagatttttgtatcattgatcttttggggtttttttgtttgaatttcatttagttctactctgatcttgttatttcttttcttcttgtagctttgggtttggtttgttgttgtttctctagctccttgaggtatgacgttaggttgtcaatttgtactctttcaccttttttgatacaggcctttagtgctattaactttcctcttagcactgcttttgctgtatactagaggttttgatagcttgtgtcattattatcattcaattcaaagaatttctaaatttccatctttatttcattgttaacccagatatcattcaggagcagattatttaatttgcatgtatttgtatagttctgagggttccttttggagttgatttctagttttattcctctgttgtctgagaatatacttgatatgatttcaattttaaaaaatttattgagatttattttgtggcctatcatatggtctgtcttggagaatgttccatgcgctcatgagaagaatgtatactctgcagttgttgggaagaatgttctgtaaatatctgttaagtgcatttgttctggagtgtcatttaagttcattgtttgttgactttctgtctgaaagatctgtctagtgctgtcagtggtgtattgaagtctttcaccattattgtgttgctgtctcatttcttagatctagtagtaatttttaaaatttaaacattttaaaatgttttataaatctgggatctccagtgttaggtgcatataaatttagaattgaaatatcttcttgttgaattgatccttttgtcattatatagtgaccatctttgcttttttttaatgtgttattgctttgaagtctgttttgtctgatataagaatagctactacttctcacttttggtttctatttgcgtggaatatctttttgcacccttttaccttgagtttatatgaatccttccatgttaggtgagtctcttgaagacagcagatatttggtttgtgattttttaaattcattctgtattttttaagcagagcatttagaccatttacattcagtgttaatattgagatacgaggcactgttctcttcatcatattaattgttacctagatagttttttttcattgtgttattgttttatagtccctgtgagttttaaggtttcaagaggttctgttttggtacatattgggcttttgtttcaaggtctagaactccttttagcatttcttatagtgctggtttggtagtgacaaattccctcagcatttgtttgtctgaaaatgactttatttctccttcatttatgaaacttagttttgctggatacaaaattattggctgagagttattctgtttaaggaggctgaagataggactcttatcttttctggcttgtaaaaatatgaaattcttcatgaatttgtgtgtcattcttgcacagggactatgctaatcttctctgtatcattctaattttagtatatgtgctgcagaagtgagtactcttggttggctttgccaaacttttcctagactacattacagcctaggatgcttttgctttcagccaaccttctctcactgtcctttactagggctaagacttgcattactgtcagactgctctcctggcctcctcctgctccctctctatttccttttacatgggcatatctgataacatgatccttgtacatgtaatcccatcttagtgtctgcttctcagaagaccagttctaaaactaggagtatggatagtgatacgagaaaataggaggtaatttgtaactggctcactcaccatgtagcaggatctgttctgattggtaggtgtgacagcaatagatcctggcccaatgtggcagttcacttcataaagattgcactgatgatgatcttggaaaatgtcctgttggagtagaatactgtggaagaagccatgatgcaagcatttgctgctaagttgtattgacaccctacataaggataatgagaggctgagaactgttaacaagtatgtgaaacgagaaagccttggtggtagcctcataagaggccctctataccagtagtggaagggtggacagggtaaaacaacaggctaaagacctaattgtgagagttgcagagctccagaggcatctgaatgctcagcccaggtaggtctgttatgtgaaggacagggccctgatagggatgaccagggatcctgaaaactctgacaggacatctggataggtgcccctaaggatctggagtctacaagtctacctgaaccctctgggtgtgcagaggtggcccacccttccctaataagggctagaagagtacccactgtcctggaagatgctgcggaggcctcttcccaacaagacaactggtttccccctcaggagctgcacccacctcctcccctgcttgccaagccaattaagaatggtgctgttcagcatctctaattaaagaaagaaaagcaagaacagaggagcaggaggctgaagacagtcagcccagtggaaagcataattctttactcatttcccagacctgaactaatttccagaaccagaaactactgaccaaagaagtggctggattcctaagaagggccctgcaatactagtcaaagtttatattatgacagtatccacagtcctcccaaaacggacctctggccatttacacaggtgactgtacactgaggaaacggaaataactagatctctcaaggatgattgagcacagggtctgagttaacgttgattcctagagtggaaatctatgaccaaattccaaatcacagtgggctcaatgtgcccacagactcccctacccctgcagtgataactatctccatcaccaagtacataattgaaatagatatacttgacagttgaaagttacccccttatgggtctctaatttctgaagtaaaagctatcatggtagggaaaagaccaaataaaaacttctgaaactgctcccttcatcagatcaaaattgtaaatcaaaaacatctcttatcccagggaagacagtagcgattagtgccataattaaagacctaaaagacgcaaatatactgctgcctaacatagctctctttaatttgccagcctaatggctgcagaaactgggtgtcttatggggaaaaactgtaggctactgcagacttaaacaattagtagcctcatttgcagctactttgcccgatgtgatatcactgccagagtagattaataaggtttcagttacaggctgtgcagccattgatttggagaatacattcttttcatttcagttagaaaaggtgatcagtttgtgactccttgtttcaactagaacgtgtatatatcttgaaagttgtcaatcttgtcgtcacaacaagaaaatggtgatcaaactgaaaatcaatgacttttcttggacccattagaaaattgaatttgcagggcaaactcctaccctgaaatctggataaacagacaaaagtggacggtcac

SEQ ID NO: 1885429 - DNA, 4001 bp, Homo sapiens
ggcacttaggttgaatccgtattttggttactgtgaaaagtggtgcaataaacataagagtgccagtatctctttgatatactgattttctttcctttggatatgtacccagcagtgatattgctcattcatatgatagtcccttcagtatgggtaaaggtaaactaatttatatggtaaaatttcaagacgtgagatttgatactcattttccctctcctggtgagtcagaagattataaaacaggaagctctgtgagtcaaaatctcaaatataaaatgagacaccaaaacaagaatgggcaagagagggagcaccttgatcaaccacaagccaaaactagcagaagcctgtacattaactaagaaaacaattgaagaaaagcttccctcagggtaggttctaaaactatgcagatccaaaatgagtttaaagagttttgaaaattggaaagctatcattgcgactgcaaaggtttggattgtttgttcatttattaattccattgtgtttttggaaaaaaaaggaataaaaattgaagggatacttgatgaacttttctttctcgtataacatttaccctaacattaattgttggcattgtaattttttttttttaagacagtgtctcatcctgttgtccaggcaggagtgcagtggcatgatcatagctcactgcagcctcgacctcctgggctcaagagaacctcctgtttcagcctcctgagtagctaaggctacaggcacacgccaccacacccagctaatttttttgttttcttaatactttgtagagacagggatcttgctatgtttccaaggctgatcttgaactcttggcttcaagtgatcctcctgctttggcctcccaaagtgctgaaattacaggtgtgagccacctcacctgctggcattgtaatttatgttgtttaatttaataccacagcaaatatttatagatcaatgtattttatgtcaattgaaattcaatgactggagcaggaagtcggattcatatcatggaactcaaggctcataacctaagtctttattattatttgcacagcaaatgatgcttttttctttattgtaagatcttacaggaaatggaaatattatgcaccaccttccctgtcatattaaaggagctatgggaaaatggtctatgtacaggcagagaggtgactgttggataccgaacaactgaaaacacctttattgcattcaatttttggattactttccctttagaaataagacataagtagaatagaacttggcacttcaaaatttcaatttttaagaaatttttcctatataaaaatatttccctaaataaaaatatatgagctacccatttatggatatatataaaaatgtataattaaaaagaaattatggtttaattgttttgggaaaaaacataatttgaaatagctttgattactaattaacaaattacatgagaaagttcagctgaacctctgatacactaaaaataaatgtaatattttttcatggtaaaaaatgcttacttttcaaccagaacaactcattgtaatgtgttcctgtgtgaaaatataaatggatatttattcctgtaactttttttgctaatataattagcctgagtaataatatgcctaagcctaacaagagcatattagatggttttgagaagtttagtttcgcttcataaatctctttttagtatttatttttattttattatttatttattttaatacaaagctttgcaattagcaattttatttaaaaaataaaaggtactaaaataaatgcttgtgtggtgtgattggtaaataatccaaaaaaataggttctttttttttccttcaaggcaatcagccagaaagcaggttttgttcttcaaaaaaatatggaatatttcataaatttgcatggcatcattctgcaggggccatgctaatctctgtatcattccgattttttagtgcatgtgctgccagagacagcaccataaatcttgttaaagtatattttgctcatctgtggaattgactcagttcagacttgctgaggctgggagatcaaaactctttgtttaatgcgttcaggaacatagcactgttgagaacatcgtatacattaagtaaaacaagacacagtttttcctacttgggaactttaatgagtaaaatacctacttgatctttcttcccttactatttgatatgtcttttatttatatataaaaatgcattatagcacatttcttaaacctttcaaggaataaaaaaaattccattattcatttttccagtacaatatgagctcagctatgacttgcagcctctacaagtgtcagacgacaggtacattttaaagccatttaagaccctttagtgatggaaaacaatggcagcatctgcctcattttgggaaaaaaatttaattaattaatttgattcaattccgttatttgcttaaagctatattctaaagattttggaaataaagaaacataagatatagtaacaaaatagtgaataatgcaaggccatcagcttataagtaacattaattaatgtagtataggccactgtttccaagactctaatgttcacataagttacctgatgatcttgttaaaatgcaggttttgattcaggaggttggagcagagcctgagaatgtgtgttctaccaatatcccaggggatgccacagctgctggcctatgagctccctggaggtatgaaggggatgaaccaaaactgctgtacatgctacaggcaacatgttaaaaggaaggaagaaaatcagaagtgactcagtgtcaggaaaaattgtgaaagaccttgaaatgggcacatacacagaaagattactgagcattctgttttatgcaatcacgtgggttatctgattccctgggtatgccacattcattgcctttaagatattttacaactctataaataataactcacaataatgcaaattattcctagtgaggggaatgaactttgtctaacatatttccaattgattattgtaactgcccaacaggttcaccttactggctgcctagacagagccaatttatcaagacaggggaattgcaatagagaaagggtaattcatatagagctggctgtgccggagattggagtttgattattactcaaatcagcctcccggagaatttggggatcagagttttaaaagataatttagtggccgggcgcggtggctcacgcctgtaatcccagcactttgggaggccgaggcgggcggatcacgaggtcaagagatcgagaccatcccggctaaaacggtgaaaccccgtctctactaaaaatacaaaaaaattagccgggcgtagtggcgggcgcctgtagtcccagctacttgggaggctgaggcaggagaatggcgtgaacccgggaggcggagcttgcagtgagccgagatcccgccactgcactccagcctgggcgacagagcgagactccgtctcaaaaaaaaaaaaaaaaaaaaaaaaaagataatttagtgagtaggggcttgggaagtagagaatgctgattggtcaggttggagatggaatcataggaagtggaagctgacctcttacactgactgagtcagttcctgggtgggggccacaggatgagatgagccagtttttccatccaggttgtgccagctgatccacggagtgcaggatctgcaaaatatctcaagcactcatctttggttttacaatagtgatgttatccccagaagcaatttggagaggtttggaatcttgcagcctccaggtgcatgactcctaaaccacaatttctcatcttgtgactaatttgttagtcctacaaaggcagtctagtacccaggaaggaagggggtttgtttagagaaaggagtgtttttgtctgaaataaagctgaaccaaaagaactaagttcctcccagagttagtttggcctatgtccaggaatgaagaaagatggc

SEQ ID NO: 1885430 - DNA, 4001 bp, Homo sapiens
tttatggtaggaatatgagtaaacatatctatcataagaagaacacatggacttatcagatactatcagttaagaagttaaattgctaacatttttatttgaatgaaacaaatgacaatagtgaaggaaaacacaaaataattttgaatgaacagtttctgttataatagggctttttaaaaactaaaatcaacttaaatgctgtaaaaaattgcattaaaaatggaatatttttacgtgtgaaattttgaggtgtaaatggagttaagtccatttccctccattattataaagtaacgttaattttactaacgtgttttcaatactttataatcatggatgctaagattattttggatgcagatcaaattaggcacaagcatttaaatttctttttaaatttctcacatgatacttaagaaatacacaatcatgcagtgcttaacaataggaatgaagtccaagaaatgtgttcttagatatttcatttttgtgtgaacatcatagagtttacttacacaaaccttgatgggatagcctactacgcacctaggctatgtggtatagtctattgttcctaggacacaaacctgtatatataggctataccaaacctatatatgggctttttctaaacatagaaaaagtataatcttatgggaccacatatatatatatatatatatatatatatatatatatatatatatatatatgctctgtcattgattgaaaagtcattatgctatgcacgtctataatccatatgtacttgtgacttttctataacagagcatattgtcaaggaaaactatactaattctagaatgcctttctttcaacgtatcttttaattgcagatcactccaatatgaatttcaatttgcattttgttctcataaagttactcctttatttcttctaggatgctcaattttgaaataagatgtacacctgttaaactgatgcatttctacccttcatttgcttgttctattttaattttatatgatagttctccatttgatgagaacaaataacaattgctttttcctaaatcaagttgcatatgcattcaatttgtcaggtctgaatttagacatatcgtttcacatactgtcttctattactctaattaccatgctgcacatatttttccaaactggcatttcaatatgctttacttttttaaaagctgatattcctaaaattaccattttccttctcactctttcctttcaccttaacacttttcagtaatgttttctcaaaaaggaactttcaagctcaaataactataaaggtaggaaagatgtttttaattaatcataaagtggtacttaaaagtttgcatctctaaatgtgaacatatatagagagagaaaaaatgaatttagcagctaaaaaaagttaagaagtaaattgttcttatcaaaacatcttttaaattattttacactgtagtttattacaatttaatttaaaaatgtatggtacttctgcaatattagtatgccttttcttgcctctaagttattttttaattatctctggatatttcaagtaaagtacaaataaattggtggattataaataatatctcaatatttcatttaatgatatcattttaaaatataataattattcattcccaaattcactggatgagaataaagtagaatattggggagggtaaagttaaggaagtaaaatagactactttcacaaataagatctgtaatttgaaatttaaaaattactttaatatatgaaaattctgactttaaaaattgctaacctacttccagtaaaggtagttacccaccattgaaagtcttgcagaatccctttcaaatctataattcagcaattatttccaagagcatgtttcacaaaatgcatacagagtgcttcctgaagttgtatgtcatcctttgcaaggacactgataatcttctgagtcattccaattttagcgtatgtgccaccaaagcaagcatgattttaagatctttttttttttttttggtcatattagtctcaatgatcattagacaaatttttaaatattcaaaatgtttcttataaattgaaaatgtataagtatatatatttatggggtataatgtgatgctatgatttataaatatgtgaaataattaaattaaactaattagcctacccataatgtcaaatgcttactatttttgtgttgagaacatttgaaatttattattttagctatttttaaatggacaatacactgtaattaactacattcaccatgctatgaaattgatctgaagaaaaaaaccctcattcttcctttctaagcttttgtaccctttgaccatcatctccttatttctccacctctagcttctgtaatttatactttactctcagcttttatgaattcaattgttttagattccacattgtggtatttatttttctgtacctggattatttcacttagcataatgttctccaattccatccatgttgcaaatgataacatttccttctttttttaaggctgaagagtattctattatgtgtatataccaggttttctttacctacttatctgttaatggacgctgaggttggctattgtgaatattgctgcaaagaacacgggagcgcagacatctcttcaacaaactaatttcaaatctcttatgtaaatatccagaagtgggattgctaagtcacatggtagttctattttaagttttttgaggagcctctgtatagttttccatatggctgtactaattaatattctcatccacaatatacaagtgtaccttgttctctacatcctccaacactagttaagttcctctttttgataagaaccatttggacaggtgtgaggtgatattatggttttaacttggattttcctaatgattatctgtaatgattagtaatgttgagcatttttcatacatctgttggccatttgtaagtcttttaaaaaaaaagtctattcaggtcccttgcccgttttttaaatcaagttatttgttttcttgctattgagttgcttgagttccttatatattttggatataaaccctttatcagatgtggggcttataaatattttctctcaatccactggttgtctctgcacactgttaattcattcctttgctgtgcagaagtttttagtttgatgtaatcccatttgtctatttttgttttgttgcctgtgcttttggggtcaaatccaaaaaaatcattgctcaggccaatgtcatatagttttgctaaactgtcatgtgtgttttcttctagtagttttacagtttctgctcttacatgtaagtccttattaaattttgagcagatttttgtgcatagtgtgagataagggtccaatttcatttttctaaatgtagatatccaattatcccagcaacactttttgaagagactgtcctgttcttattgtatgttgttggctgctttgtcaaaaatcatttctgggctctctattctgctggtttatgtgtcatttttattacagtaccatgcagttttaattacattagttttgtagtacacagacataccttggatatattgcaggtttggatccagatcacagcatcaaagcaaatatcacagtaggaaaggcaaatgaatttcttggtttctgagtgcctataaaagttatatttaaactataatctcttaagcatgcaacagcattatgtctttaaaaaagtacaatacaaaaaatactttattgctaaaaaatgcagacacagagacttgaaatgagcacatgttgttggaaaaatggtgttgatagacttgatcaatgcaatgttgccacaaaccttcaatctgtaaaaaatgcaatatctgcaaagtgcaataaagtgaagtataaaaaacaaacaaacaagttatgtctgtagcttgaaatcagatagtgtgacatctttagctttgttctttttgttcacgactaccttggctat

SEQ ID NO: 1885431 - DNA, 4001 bp, Homo sapiens
ggattacaggggtgagccactgtgcctggcctatatttgtttttaaaaattaaaatatgcatacggttggagtcccttttgtcatcctctcagatcctattttcttatgtagaagttactttttagcttcatgcacttatattcttcctacaaatatttaaatatatttaacatgtagtattgtgtttcaaatttatgtgatattttagtacatacattctataatttgaaaaatgacatttatgttgatatatgtgtattattattattattattatttgaaacagtcttgctctgtcacccaggctgtagtgcagtggcacaatcttggctcactgcaacctccatctcccagtttcaagtgattgttgagcctcagcctcctgagtagctaggattacaagtgtgagcccctgcacctgccttacttcattaattttaatagctatgtagtattcagttatatgaacgaatagtacacagttttagtcctttattgatagttgttatcaacaaataaacaaatgtaaaatttttcctcaaattgggtcaagctatatatattgttctaaattagctctttttctcccaataataatagtgtgcaggtttgttacatgggtgtattacatgaggtttggggtacaattgatcccatcacccaggtagtaagcatagcacccagtaggtagttttgttttagtgttttgagacagggtaggtctctgctccccaggctggagtgcaatgttgcaatcactggtcactgcagttttgacctcttgggctcagtcgatcctcccagctcagcctcctgggtagctgggactacagtggtgggccacatgccctgctaatttttgtattttttgtagagactgggttttgccctgttacccaggctgatctcgaactcctggactcaagcaatccacccactgcggcctccccaagtgttaggattataggcatgagccaccgtacccagcccccagcaggtagttttgaaccttcactccttcccatcctctcctctctgttatttccctatatctattgttcccatgtttatgtccacctttacccaatgtttagcttagaatgatgatttccagctgcatcatgttgctgcaaatgacatgattttgttgttttttatggctgcagtgaacctttgggtaaagaaaatttacaaaaatatctcacatctttttttttatgaaagtaagtagtagtaatccatagttcagatctactttataagtgagtcactgatgaagacagtagttacacattttatagcattaccttgatgtggcaaatttttcttgttttgtttttgttttacgtgaattaatttggatgagactttcttgaataatttacatttatagtgtttgcctccagtggggttgagatgaggagccttaaatccaacaaagttgtatacatgcattcatggggtgacacttaggttatttaatcaggaaacactcatatttgtccacatgtagatgctacacgtggagttagtcctattctttggaaatttcactatgttgcccacgctggtcttgaactcctgagctccagtgatcctcccaccttggcctcccagagtgctgggattattgacgtgagcctctgtgcccagccagaaatgtgattttaattccataatatatagtatatgttactgtgaatgcagtgtatgtttattccataagtagcaaattgactcattcaacaatttcaatagttttccagttgttttgtctttagtttcccaggcaaataatgctattgtcttcaatcacagtattgattagttcatcccattcttcatactgatcattgttttttggatatgaaataatacagactactgtaataataaaaaaagatggaacacctccccaatttgcatgccatccttatgcagggaccatgctaacctctgtattgttccaattttagtatatgtgctgctgaagcgagcactccatttctgtaaagcttatgtattttatctaatatatttttatgacaaattttaaatataaaataaaagtgagaacagtggcattcatttacgttttgcaagccttttgatccaaactcaacagaagatagctagatttttctgtttttggattcagtatgtacttaaatgctgttctggctgacatatatgtagaaaatcaagcttcacaaaatatgtagttggaaaagggaagaatactataatagccttttcaaatagttgtgaatattcttcaatagtacacaaaaacatggcaagtagtttcttaaagcacagttgtgatagggaatctgaaataatttccatgaacttttcatcttctgctggattaaaattcactggtctatcacgaaacttaaataaattctttagctatgcatggtcttgtaacatcacacatttggaaaatattagctcactgagttatatggatcttcaaaatgttgatgtattccattgtacaatattttaaaagtcacattatttaataaaatcaccagtctcattaaaaagtctttaagtactgagaagtgggtcaaattcaaggtgtaacatagaagtttgccacagttctaatttttacttgaagcctccaattttatcattggtcacaaatactatcagttgttttctttgatgtggcaggcttacttcgttcatttttgggaaaatgactgccaaataaccaagtccgaataaccactatatgcctgtcaattgttatttcaaggcaaagtgttgttccattaaaggggcttgttcagcccctttatggaaataattttgaaataatttcagaagtgctttcccttgataaaagtctcatactttggtatgcagtaaaacctctatgcatacttcttgtcacattgaatataaaaaaataaaaaataaaaagacatgttcccaaggatcaattttaaaaattaataatgatttcaactgcttcatgaaataaaaccctcgaaaaactgaccgtaaaaattggcagtgaggaatattagtgcagtgtggtgccactgctttaacttttttgctaaggcaccagaaatttaatacaccattgctttgctactctcagtggaaatgtcaaccaagcagaataggcaaaaaacatctcagtttgaaaatcgtttgaccttgtggactcccagaaaggtttgtaagacatgtagggatttgtagaccacactttgagagctactgatgtggaagcatcatttccaagcagcaaggtgccattctagcagtgtatctggactggctccaggaacctagatataatcaataaggtgagacattgaatttactgtatcattgaattttatttaattgttttgtattgaggagaacaaactcatcttgtgaatcatcagctttctgtggttttgaaattacggaatctgctcttctctagcaagggagaggggtcttcttctgctggcccatagcactcagagcaatctaggagctcagatatctccctctgagattcgtctctatttttgacatagaagacttgcaatggctattaattcagctgcttcttaactcctagcatccttacaaacaaatattaatcctgattttcagcatattctgccttctggctgcaggaggtaagagtctctttaaagacacagtagaggccttcttctttcatagcaggccctaagctaatatttgggtgacatgagcctgttttttgtttgttttcatccttccactgtagttgaaaaacccagccaacatcacttctcacagacttacacacacgtgtgtgtgtgcaaattgtagaacttctgtagaatgcatatatattatatatatatatatatataaatatgtatatgtcagtgttttctcttttacctgtgcttcctctgagtccaccataggtgagagtctcagtaaagcgatactgaagcataaaagtgttcattaccatcccatttat

SEQ ID NO: 1885432 - DNA, 4001 bp, Homo sapiens
ggagagctcccgttgctccacctgtaggagggagagtaaagagcccaatttgggcaaacggaggtggagaagtatgaagagaactgaaatgaacgtggcaaagggccaacgcattggccttgtcactcatgttgacacactggcctttttccttttgggagatgggaagatctggaggcttcccaggagaggacaaaacctgacaataatatctatctgcaaaccctcctctgaggagcccaactcatggggtggatcttgttacatgtatgttggacacgcttcactccataactcataattaggcacatacagaaacaatccattagaaaatagggtctggcaaaatatgggtctgggtctacctgatcctcacaaatcacaaggcaccacaggagtctgacctccagaaatgcagcagaaagcaagaacccacagacaataccagagtctgattttccagctacgagaaaaattgaagttgacagctgttctccagagaccgatttaaaagacgcaaagttcagtagctgctcaaagtgtaacttccccttcaagcaagcctccagaaacagaaattaagctaaaccttaacacgcaacaccaaaatggaaacagtaaatccatgttaaggtgtaaagacagtcaaaaacaattgccttattctactgcattccatggcaaaacaaatttcttatatcttcccaacatacagtaagcgttcaatatttactgaaagaataaaggaggctttaagcgtccccaccggaagctgactttgtgaacagggccagcattccatgcccatgtcctggaagccttccatcctagcaggctcccgataggatatcattcaccttcctcctcccaaatggtcactcagcaaggagttctagatgattggaagttgaggacaagatgataacactaaacattaagcagtttaattcaatgattccttagcagtgcattcaaccaatcaagggaaagaacaagagcaacaccaccaaatgcaaaagcccttcccagtggccctctgccacttctcttgatggacatcactgcatacctgggagccaccccagaggacattccaatggatggcaaagcccatggccttccacatctggcatcaattccttaggctttgccaccatccctcccaaattgtattctggaaataatcttaaatccaagaattcccactgataaatagagcctgtcaatggtaacatatgagcaccttacaagaaattttcacttcattttattaatgctaaactactgaaatctcaccagttacaaataaaaggtcactaagttcattttaaaacactgccatttatattttcaacatgttcctaattcttagtctacagcaggaaaaaggggtgtcagatactgctttatctcatagcctgttcccagaatgcagtaattggaccaggagaggtattagtgctcttttagactatctgtcacaaaacacatccaaggagtgaaatggaagtcgactgctgaccaatcaatttacaatacacctttgaaggtaagttcataaattagagtctacctataattcctattaaatagtgtgactgtcctgctcctatcagatttccaaatctgttctattactcaatgcattattcaacaaataactatggacatgaaacactttatctcaacacctgcatggaaacatgagctgagaagaagataacattttgaccactgagcatgctgccaggaagatcttctagtgaaaacaactcttagataaccaattccaaatgcaagatatcagatatttatggctaatatcattaaaagtgacattattgaaaagcaggttttacccaagtgatttattctttcttttttttttaactttaaaaacatagaacacttcatgaatgtgtgtgtcatccttgcgcagggatcatcctaaccttctctgtatcattgcaattgtagtctatgtgctgccaaagtgagcatgaccaggtgctttatattaaaaaaaaaaaaaaaaatgtgaccaggcacggtggctcatgcctgtaatcccagcactttgggagggcgaggtgggtggatagcttgaggtcaggagttcgaggccagcctgacccacatggtgaaaccctgtctctattaaaaatacaaaaattagccgagcttggtggcaggcacctgtaatcccagctacctggaaggctgaggcaggagaatcgcttgaacccagaaagcggaggttgcagtgagctgagattgctccactgcactccagcctgggtgagagagtgaaactccgtctcaaaaaaaaaaaaaaagtaagaaagaaaggaagaaagaaagaaaaaatgtgaacttcatggtataaaaacaaaaaaaaaagagttatgagatttatttaattttgcactgcaagagaaggatcatttttaatgagattcttctcaattttcaattaaaagaaacaacaattatttgttataaaaatatctggcctcaacaagtacaggaatcattacaattcaggccccatgcagccactgccccaaaagaaacgcaacaggtcagcgtgtgaaactctaacactaaaacatattgcatttaagtataccacatttggcctttcattcagaattcagtatattctttccaaacagagggaaataatccctactacaaggaaagatttaaggctgtcctaagtgttggcatgctacaaaccaagtaaggagcagcagccactctgagatcgagttatccaaaggcaagggcctaaacccatccttttcaggtcccaaacgcttttgccctcagtcaagggtgcactggttctcggggaggacataccttgtcagaaaagacacttcccaaggagacagggttcaggaactacaacatcaaataagatctggatggaaagctaaaccgaagtggtcaagctgggagaacatcgggagctgagatgattggtacacagagatttctagtatggaaaacacaaatgtttaatttaggtctgggtagaaagccatatctatccgtccctcatgttgtagagttaaaaatctggggcaagctatattattctatctttctggatttctcacataattgtcaaactttattcaagtgtttaattctaactgacatttctttgtttatcatgcgtatatagcaaagtgcacaaaaccaaagtgtgcatatatagcaaagtgcacaaaaccaaagtgtacagctcacagtttcataaagtggacccatccctgcaggtgtctaactgaaatccaacatagagacatgagttaaataggtctgttatgtgcaggattctaacagcagtaaagacccgatctaaaggctgcctagcttcagactgacaattgtaaaatggaaacacatttaccacttctgcctacagggacaccactaccatactagaaaggaatgtaaaaatatgcagtcagtttaaaacacacacacacaactaggaatggaatcattagctaagatgtggggttgtcttttttctaaaatagacttctttctgctttcgccagacaagttgaacatgcctccaagacgccttctgagtatgagctgcagggagagagaagcccacaagaggggctgccgcctaagcaagggccctggcctgcgaggcaggaagaacgggctctagcttcacaaatggtatctcagaagatatgtcaatccatttttaaaataataatgcagttgtaataagagtgtcattgtgtcaaagaaacagagccactaggtgacatatagagatttatgataaggaattggctcacacaactatggagtctggcaaactccaacaccagcagtgggaatgggcaagagggccaatggtatggttccagtccaaaggccggtgggttggaaactcaggaataaccattgtttcagtagctctgaaggcgggaaaagctaatgtgccagtttgaagattgtcgggc

SEQ ID NO: 1885433 - DNA, 4001 bp, Homo sapiens
tgggcacataaatgttaggaattatatattttctgggaggaagaacttcaaaaaggaaagtttgcaaatgtaagctaaatgtgagatttcaggaggttaaagtgtttttagtatcaggaagtcaaggagatctacaatcctcccaaccagagaaggaatgttctgagttaggagtgtagggaaagaaagaaaattagaatataagcaattttaaggtagagaggagggaattgaaataaacccttgttggatagatcttgaccttagtaaaaggaagtcatcaaatgacaatggagagggctccaaatgacctgagagtcttaataaaagaaggcagtttttagaatgacaactatagagaatacaataatgtaataccttgggaataaaagaattccaagcagcaataagagctaggtcatggacttggtcagtatggcatccctaattttccacagcttctcttaattcaagtcagaggtcgacaaactatggccgataggccaaatccagcctaccatctgtttttggacagcctgcaagctaagattggtttgtgtggttttttttaattatgagggggaaataaaaataaaaataaatatttaatgacacatgaaaattatatgaaatgtagatgttagtgtatataaagttttattggaacacaaactcatttgtttacatattgtctatggctgcttttatgctacaaccgcacatttgagttgttgcaacagaaactttttggcccacaaagcctaaaatacttactctttggtcctttacaaaacatgtctgcatgccagctttcagcagcatcagttaagcagcagtgataattgtctgtctgtttcttggagatcattcacaagcctgaatagatgggtcaccatttatcaatgctttcgagatatcagcatgcatatctttcccatgcatctctttagcagggtaggaaaattatgactttgaacgggtaactctgtttcttggtaaggataagatgttacattccactgaatggaagaaaaatcaaattctgtgcttccaaaattccaatattttaaagtattagaacatctcatggtttatagaaaaacatggaacatgacaagacatcttggccagactaaaaattggaactctgcagccaggaaacatacaaagtcacctgttatttttcttatgacaagctttaaaacaaagtgctttggcaaacttgaatgtttaacacatagtgcttactgtaccaatacagttttaagcattttaccaatattaactcatttaattatcctaattacctaatgagattatcactgttatgctcattttataattatgaaagctgagacacaggtagtaaagagtggtatggagtttgaactgatgcagtctggcttcagaacccttgcttaatatagttacttgtgaatatttaaccctctgaatctaaaataaaatttgaaactataaaaataaatacttaaagtcacattacattgaaaaatacttcaatctcatgaagcttcaagattatttgagaccttttttgttctagatcccttattatatatgtatgtattcaacttttaggttcaggggatatatgtgcagatttgttacttagcccagaaatttgaggcagacttgaatgcagatttcagctttgctacttacttgggcaagttgttaacttctctgagtctcagaatctttatctctaaaaagagaataactgcttgcccactttcaccactgttattcaacattgtactagaattcccagctaaagcaactagacaaggaaaagaaataaagggcagtcaaattgttaagggagtagtcaaattatccttgttattagatgataggattttttttttttttttgaaaacaaaatgcttcatgattttgtatgtcatccgtgtgcaggaaccatgctaattttctctgtatcattccaatttgaatatatgtgctgctgaaatgagcacaatgataggatcttctatttggaaaacctaaagactccaccaaaaaactattagaattgatgggcaaattcagtaaagttgcaggatacaaaatcagtgtaccaaaatcagtagcacttctatatgccaacaatgaacaatccgaaaaataaattaagaaagtattcccatttacaatagctacaaataaaattaaatacctaggaattaaacaaagaagtggccgggtgcagtggctcatgcctgtaatcccagcactttgggaggccaaggcgggtggatcacgaggtcaggagtttgagaccagcctggccaacatggtgaaaccccgtttctactaaaaatacaaaaattagccaggcgtggtggtgtgcacctgtaatcctagctacttgggaggctgaggcaggagagtcacttgaacccatgaggtggaggttgcagtgagccgagctaatgccatttcactccagcgtcagtgacagagcaagactccatcttgaaaaaaaaaaaaaaaagtaaaagatctctacaatgaaaactataaaacactgatgcaagaaattgaggagaacatacaaaagatggaaagatatattccatgttcatggattggaagaatcaatgttgttaaaatgtccatacttacccagagcagtctacagattcaatgcaatccctcttagtataccaatgacattcttcacaagagtagaaaaaaaaatcctaaaatgtatatggaaccacaatagacccagaatagccaaagctatcctacgcaaaaagagcaaaactgaggaatcacattgcctgacttcaaaatatactacagtgctatagtaaccaaaacagcatggtaccagcataaaaacagacacacagaccaatggaaaaaaaaaatagagaaatcagaaacaaatccatacatctccagcaaacttatttttgagaaagctgccaacaacatacattggggaaaggacagtctcttctatagattatactgggaaactgcatgtccatatgcagaagaataaaattagacccctatctcttgccatatacaagggtaaaatcaaaatgggttaaagacttaaatctaagacctcaaactataaaactactaaaacattggagaaacgctctaggacattgttctgagcaaagatttcttgagtgataccgcacaagcacaggcagccaaagcaaaaatggacaaatgggatatcatcaagtagaaaacctcctgcatagcaaaggaaacagtcaacaaagtgaagagacaacccacaaaatgggagaaaagatttgcgaacaatccatctgacaaggaattaataaccagaatatataaagagttcaaacaactcagtaggaaaaaaatctaataatccaatttttaaatgggcaaaagatctgaatagacatttctcagaagaaggcatacgtatggtaaacagggttatgaaaaggtgctcaatatcactgatcatcagagaaatgcaaatcaaaactacaatgagacatcgtctcaccccagttaaaagggcatttatccaaaagacaagcaataacaaatgctgatgaggatgtggagtaaagagaaccctcctacactgttggtgggaatgtaacttagtacaaccactatggagaacagtttggaggttcctcaaaaaactaaaagtagatttatgctggatcatatggtagctttatgcttgatcaatgattgctggatcatatggtagctctatttttagtttttgtgtatatcccaaaagaaaggaaatcagtatatcaaagaaatatctgcacttccatacttattgcagcactgtttacagtagccaagacttgggagcaacccaagtgtccatcaacagataccggataaagaaaatgtggtacatatacataatggagtattcttcggccataaaaaagaatgaaattctgtcatttgcaacaacatgaatggaactggaggtcattatatta

SEQ ID NO: 1885434 - DNA, 4001 bp, Homo sapiens
tagctagtggtctactttattattttttttgcaaaaaaaaaaaacctcctggattcattgatttgttgaaggaattttcatgtctttatctttcagttgccctctgatcttggttattgcttatcttctgccacctttgggtttgtttgcttttggttttctatttcttttagttgtgatattaggttattaatatgacatcttcctagcttttggatgtgagcatttagtgctatacatttccctgataacactgctctatcagcatcccagagattctgattcattgtctctttgttctcattagtttaaaagaacttcttgattttgccttaatttcattatttacccacgagtgactcaggaacagcttgttcaatttccatgtagttttgtggttctaagtgaatttttcagtcttgaattctaatttgattgtgctgtgatctgagatactgttatgatttcagttcttctgcatttgctgaagagtgttttatttcagattatgtgatcaattttagagtaagtgtatatagcaatgagaagaatgtatatcctgtttgcaagatgaggagttctgtatatatcgatcaggtctgcttgatccagagctgagttcaggtcctgagtatctttgttaattttctgtcttgatgatgcatctaacattgtcagtgtggagttaaagtctcccactattattatgtgggagtctacatctctttgtacgtctctaagaacttgctttataaatccaggtgctcctttattgggtgtatatctatttaggaatagttagctcttcttgttgaattgactcctttaccattatatagggcccttctttgtcttttctgatctttgttggtttaaaatttgttttgtcagaaactaggtttgtgacccctacttttttgttttccatttgcttggtaaattttcctcaatccctttatgttgaacctatgtgtgtctttgcatgtgagatgggtctcttgaagacagcataccaacagattttgaccctgtccagcttgccatcctatgtcttttaattggggcatttagctcatttacatttaatgttaatattgctatgtgtgagtttgatcctgtcatcataattcaagctggttattttgcagacttattatgtggtcacttcatagtgtcactggtctgtatacttcagtatgtttttgtagtggctagtaacagtttttccttttcatatttagtgcttccttcaggaactcttgcaaagcaggcctggaggtgacttattcccttgggttggaaattcttttctttaagaatgttgaatattggccccaaattgcttctgtcttgtaaggtttacactgagaggtctgttgttatactgacggatttccctttgtaggtgacccagcctttctctctggctgcgcgtaacattttttcttttctttcaaccttggagaatctaacgattatgtgccttggcattgatcttcttgtgaagtatcttactggggctccctagatttcttgaatttgaatcttggcctgtctttctagattggaggaagttctcctggatgacctcccgaagtatgttttccaacttgggtctgtcctccctgtctctttcaagtaccccaattagttataggttcagtccttttacatagtcccacatttctcagaggttttgttcattcgttttcattcttttttctctattcttgtctgcctgtcttatttcagaaagatagtcttcaagctctgagattcttttctccacttcatctattctgctattgatacatgtcattgcactatgaatttccaatgttatgtttttcagctccatcaggtcagttatgtttctctctaatctggctattctggtaaaaatatggaatgcttcaaagatgtgtgtgtcatctttgcataggggccatgctagttttctctctattgtttcaattttagtataagtgccaaagtgagcatgacagtatatttttaaaatcccaagtggtttgtatttataccccatttatttactgactccagaattatgaagctattttaaaaatggttagcaaatttcccatatctagtttactaacagatttcaaaaaggcaaaacataaacaaaagtaaaacaaaataatatgaaattaatatgtacagtataataatgaaaactgttatttaatgttaggatttactatagtcatcatttatatattaatttgtgatataggaatttttaaatcttaatgacttatattaatccttttaaaagtgcttccttctagtaatatttaacatgctgattaatgcattttaatatttttgttgaggtttaattgacgtacaataatcagtgcataaagtgtttaatttgttgaattgatatgcatataagccactcaaataaacactgcaattaaattgataagtatacccaccagccccaagagtatcttcttttgtaattcatatagagtcctacaacctctcctttctacaactattaatttcctttctgtcattatattttgtttttcttattttaagcattttatataagtggaatctcacattatgtactcactttgtggagtttattttactaccttgtttttgttttcagatttattcacattttggtgttaatcaacactttaaaatttctgaatagtattctgctttatgggtatacaatttgtttattcatttacctgttgatggatatttggaatgtttccagtttggtgctttacaaataaagctatacaaatttgtgtataaatcttcatgtgaacataaatatctaggaatgaaatgtttagaatatatgcaagtttaagttagaaagaatttctaaaactatgttatagaagagcttgctagcaagatggctgaataggaacagctccagtctgcagctcctggtgagatcaacacagaaggcaggtgatttctgcatttctaactgaggtacccagctcatctcattgggactggttagacagtgggtgtagcccatggagggcaagccaaagcagggtggggagtcacctcacctgggaaccacaaggggtcgggaactccttcccctagccaagggaagctgtgagggactgtgccgtgaggaacaatgcactgcggcctagatactatgcttttcccacactcttagcaacctgttgtccaggagattccctcgggtgcctatgccaccagggccctgggtttcaagcacaaaactgggcagccatttgggcagacaataacctagctgcaggagttttttttcatatcccagtggcacctggaacaccagtgagacgaaaccattcactcccctggaaagggtgctgaagccaggaagtcaagtggtctaactcagcagatcccacccctatggagtccagcaagctaagatccactggcttgaagttctcactaccagcacagcagtctgaagtcaacctgagacactcgagcttcgttgggggaagagcatccaccattactgaggcttcagtagttagttttcccctcacagtgtaaacaaagccaccaggatgtttgaactgggtggagcaaactggagctctgcaaagcctctgtagccagactgcctctctagattcctcctctctgggcagggcatctctgaaagaaaggcagcagccccagtcaggggcttatagataaaactcccatcttcgtgggacagagcacctgagggaaggggcagctgtgggcgcagcttcagcagacttaaacattcctgcctgctggctctgaagagagcagcagatctcccagcacagtgctcgagctctgctaagggacagactgcctactcaagtgggtccctgacccctgtgcctcctgactgggagacacctcccagcaggggttgacagacacctcccagcaggggtccacagacacctcatacaggagagctcttgctggcatctgacagatgc

SEQ ID NO: 1885435 - DNA, 4001 bp, Homo sapiens
aacccttgttacctataatttttacagcatatagaaattatacattcacatgcacaccaatagtatcttcataatcatacaaaactccaaaacatgaaaaattttaatttttcataataaacaatatattaaagttttcttctaattattaacatatggaggccagtaatctcagcactttgggggccaaggtgggaggactgcctgatcccaggaattcaaggccgcaatgaattatgatcactccactgcattccaacctggaaaagagagcaagaccctgcctcttaaaataacaacaacaaaacccacatggaactgaaagtaagaggaagggggaagcctgttctccctgactgtaccagaccacactagtgcttcttaactgcctcaactctcttaaggcactggttcttaaataggattgacatcacaatacctgaaaggctttctaaaaaaagacatttatagaactgaaagaaaagaaaaatggaggtctggatgagaaactggattggtaggtttaggggtcctggccagcaatgtatattttaaaagcaccttgggaaatgctgatacacatctttggttaatttttaaaagattaacatgaaatcaatgttaatgcaataaaacagaatttctgatgaaataaatggaactatattctttttacagaaatacaaagggaaaacatcagggagattagattttagaaagactataaacctgatatttgccagtgaaattataaaagcctttttaatttctacactgattttatgacatcctgaggtacctctaaagcttcctcaaggaataaatgttcaaacacaaaattaatttgcaacataaaaaaatgcacacagctacacaatatacttttcctccaaacaaaataagccacaattctaataagaatgtcttaatttccaggccggtcatggtggctcatgcctgtaatcccaacactttgggaggccgaggtgggcagatcacttggggtcaggagtctgagaccagcctggccaacatggtgaaaccccatctctactaaaaatacaaaagttagccgggtgtggtggtacacgcctgtaatcccggctactcaggaggctgaggcaggagaatcgcttgagcccaggaggccaaggttgcagtgagccgagatcatgccactgcactccagcctgggcaatagagtgagactccgcctgaaaaaaaaaaaaaaaagtgtcataatttccaaatattaggaaaaaatgcacctaagcaaatcacaaaaatcccttctcctctatatgaggtttttaacataatttttttccactttttaaagaattactaaaagcaaccatctgaagttactacccatgattttcctaactataccaatacatttgcctttcagaattactgatttaaaattttcgtattctagtttaacaatctgcatgctggatatctattaagctactcaagaaaaaaaaagataatagtattctaatctgtaaattcagatgttttataatgaatctaacctaaaaacttgttctgtaaaattgatgaggaatatgtacactcacaaatcattattttcatagaggcctgatttccccatagatcacagttatgttattttctgtcaacaggttacaattttagcctaacataataaaagggagtctttaaaaaaaagtttttggataagggttgctcaccctcgaactcaaattaacagatcccttatctaaacacttaatgtgattcctaatacatgtatatgtaattctgtgcatatcatttgtgtttatgccaatggaaattaaattctcaatacagtattttataaattttttattttttaatctttataaattttttaaaaatatattataatgcagaacacttcatgaatttggatgtcatctttgcacagggaccatgctagttttctctgtactgttctaattttagcgtatgtgctgccaaagtgagcatacatttcaaagattttttttttttacgttgaagctactagagcttcatcttctatatgcaaatataatatatcccatttaaagtgggtcaaatcaatagttaccattaaaacaacagttttttaggatgtgatagaacaattttctactcttgaagtatccaacatctagattcggggtaaactgaaccttggattcaaagactatgctctttatgatacctaattctactcttattttgctgtccttcaatgtctatcttaacaacagtcacttcttggaaatttctaaccccttatcctcatttttacagcctccgggttgcgggggattaggaattctgtgaatgagactacaaagatattacaaataaagtattctttttcatttttttgagaagtaaacaagaactggttttcacttttgggtaaatataaaggaaaagtgctaaatgtttaccttatgactgcgtaacagtgacatttcaattataacaccatgaactgattaaaagtacaaaatctctttatattatgcaataaaacgacaaatttcaaagtactctaaaaagatttatttatttatttattttcattttcagagacagggtctcactgtgctgcccaggctggagatcaattgtgtgatcatagctcactccagccttgaactcctgagctcaatcaatcctcccgcctcaagctcccaagtagctgggactacaggtgtgtgccaccatacctgcctatggttgttgtttatttgttttgagaccaggtcatgctgtgttgcctagacttatttttacatgtaaatcacctttaatagaggccatgtggatctaacccaaataattgcaacttaatttccatctctgattttccccttaataactacagaatttcatcaactaatttatataatcctacttcattttggctgaatatctatctatgatagatacttaagactatctggtattagaaatactgtaagcattaacaaaataattaagtaccttaaagctttctcataaaatgtatttaatcttattgaccaaactcaggcacataatgtcaatttatatgatgaatttaacctgagctttatcaaacacacagtcctcaatatttgatagagatcacagcctgcacaactactttgttttcctggtctacacatagtaatcttccctttgacataacttcagtcttgcctgtattaatggtgtcatttctagatgaactgtcattaattaatttaacaaatatcattagactattgattgtataaagtgcagtgcctaaatcccaaaaacatgaataattcaacatattttaaaaaaccagcatcagggttttaactatactagtaggaatcttacccactggcctataatagtaggttacttacttcggtctctatgtttgaagaaacaaaacagtaacctacctgcttgtccccaaacttggccaaatgatctaaaatgatgggatctccctagactctacaatggtggcaatcttttaaataataacacttacttaaacgaagcatcaaaacagagggaagaaaggtgttagctactaaatataactgttttggttgaaaagaaccatttttttcttcttgagtggtagtgactgtttgagtaaatggtgtccttcattcatagtgataaattgtgttgtgttgtttacaaacaagaaacttaaagacaagagtgtcttatgaaaattaattacaaaaattcacacaaaaaagtaagatttagttaacaatgtaattttaattttggatttctttccaatgaaaaaagctaccaccaaagtacaaacaaaaattaaagttgatctccagaaaactgtggttgaatcaataagtgcctcttatttatctaacattaacaacaatttagttgttttctcttattttctctttctttttttgccaggacatgttctcatgtgaacaatttagttgatttttttgtaacaattt

SEQ ID NO: 1885436 - DNA, 4001 bp, Homo sapiens
cagcctggccaatatggtgacctctgtctgtactaaaaaatacaaaaattagctgggcatggtggcgggcacctgtagttccagctacttgggaggctgaggcaggagaatcacttgaacccagaaggcagaggttgcagtgagccgagattgtggcactacactccagcctgggcgacagagtgatactccgtctcaacaacgacaacaacaacaacaacaagattaaatgagaccatgtgactcagttctgtgctcagtatttggaatatagcaggaattcattcccgtgtagcacactgttaaaggtactctgctagagtactctgttagaggtactctgcactgtgctctttatgtaatgtttatctttaggttttacatttaaaatttaaatctcctacattgttgagatgactagactggcctcaatagagccgatttttaaatatgaataaaatttcatatctcctgttaacctttttccatccctcctctgatttttttctccaattggtatttttttcttggatcttgagaactttgtggttaaagcagagatgaaaattttgtgggaaaacatctgcaaaataaatttctttgaatgaattgggatagatggcttggccctcaggtccagacctccctaacataataaatgaaccagttattgaccagacaaaagatttcccttaagtgctctttaattttaaagcagaatagctttaactggctcttgatgaagaaatcatcttaccattcttagctgtcctctcttctgcatatgcagtgccaggagtgcttttgggcatttgctgtgttagggtagtgatatgttttggaaagataacggtattgaaattagggtactttcaagagaaattcaactttggattgatgtaccctctgatatgtgctgtcttgtttttaaagaaacacctttatcaggatatgattcatacatgaaatgattcatccatttaaaatgttcagtggttttcagtatattcagagttgtgcatccatcaccatagtcaattttagaacatctttattactttccaaaagaacactggaccccttagccatcaccccggaactctgctccacccaaccccctagccctagggaactgtttttttttttttttttttttttgagacggagtctcgctctgttgcccaggccggactgcggactgcagtggcgccctagggaactgttaatctgctttctgtctctagatatttgcctgttctggacatttcatagcagtggattcatgcactatgtgatccttatgcggggcttctttcacttagcatggttttaagagtcacccatgctgtggcatggatcatacttcattttttaaaagttggtacataatatttcattgtattctgtagttgtttatccatttatcaattgatggacatttgtgttgtttccaatttttgtttattatgaacagtgctgctaagagcattcatgtataagtttttgtgggaacatatattttcaacgttgggcatctaggagtggaattgctggatcatacggtaacctgggtttaaccatctgaagaacagccagactattttccatagcggctacgctgttttgcattcccagcagcagtgtgcgagggttctactttcaacacatcctcaccaatacctgttattttgattagcaaagccgatcgaattggtataccaatccaattgctacaccaatacttgtctttttgattttagccatctagtgagtgtgaagtgaaagctcattgtcgttttgacttgcatttccccaatgattcttcacttgcttattgtcatcttttttttgtcctatctgttttgttttgtttttgtttttgttttctttttaatatggaatgcttcatgaatttgtgtgtcatccttgtgcagggaccatgccagtcttctctgtatcattccaattttataatagtatatgtggtgttgaagcaagcacctatttgtttttaattgaccgggagggatagcaataattgtaatctgtccagttcttatgtggaggatagtttctcctacatttccccacttctttgacctaaattcacataaacgtcaaggaatgtttgattgaagtaacactcttttaaaacctagttacagttaagtcataacccaactggctgtatataaaagagagtcttgtgaaggttcagaattttgtgtctttgtgaaaagaaattaaaaccttgtaaggagtcagctaaagaatgtaaatttttatgagcttctataaacagggaaatatggaatgtttagttccatttaacctgactataagccaggacaagagagtacatattttattttgtgtctttttacactgcttttaaaaaaaataggactattttgaaaaattgcacttcccctcctatattttagagaggtaaccacattagtatcattattacttttgattaatctaattgaaaatctcactaaattgcaatagtttttaaaaagtcaaattcaaatcttatgtgtgttttatgttttcctcttcgccctcaaggaatatttcttcatgttgagacagcatttctatactgccacaatgacagtaaaagacttaaaacagtcagctgctaaaatgtaagataaaagtaactgatgtatgtagaatctgaattttagtctcttcacatgttggaacaacttttcaacagccataactccatatatgaagaacgtgaacagtttcaagggtgcatttgtatgcaagttatactttatatctcttttattgtttaaagtcagtataccctgccattaagtgatctttttgggtgtctgcctaaaatataatttctttgggaatggctggtggaggccaagaagaggtccttgagttctgacttcattatgccattgagtttgtcctgcttccttgttcttcatccagtgtctaatttacagtggggccatgggtgcttcctgcgctcatgtgatccttggtgccatcagcccttgcagatgtgttcactgatgctagacggctttgccaatagatgtgctgtttggcagctttttatgtttgatacagcatcagcatttatggatttattggtttttctttaaagaactgagctccctaagaaaccatggttttgctccatgacctcctgtaacagtaatttaagttgccacttctggcaggttcctgagctgaggggtcagttggacctgtgtacattgtatttgttcattcgtttcatggctgtcaatgaaagtagtggaagttgtctatgaatcagaaatttaaatctcaggcatctttttttctgtgatgctatatagttggaaggtttttctaggaagtgcaatgcagtcattcatcgcttaacaacagggatagttcctgtagcttatcttccctttgtgaggggctgacaggccaatggagagaggacgagaaaagaccagttaccatcctcgtttttctggtcttacacctcacctgtttctagaagtgataggaaaacaatgcccaacaagttggttttctatttttaaaaaatatggaaagatacctgtaacataagatttatcaccttaactatttttaagtgtacacatcagtgatactcggtacattcacattgctgtgcagccatcatcaccattcatctccagaactttttcatcttctgaaactgtaaatctgaccccattaaacactaaccccttatttgccttctcccagcacctggcaactaccatgctactttctgtttctatgaatttgactattctaaatacttcaaatggaatcgtgcagtatttgtccttttgtatctggtttattttacttatcacagagtccacagatttcatccacgttgtagcatatgtaaaatttcttgcattttaaggctgaatagtattccattgtgtgtgtagataccacattttgcttatctgttcatccactgatggaca

SEQ ID NO: 1885437 - DNA, 4001 bp, Homo sapiens
cctggtggacaccaacacccaagtggatgtcaggccccaagtgggcactgaggccccaggtaaatacccaggtccctggtcaaaaacaggtccctgatggacaatccggccccaggtggacatgaggcctcaagtggacacttgactccaaatgtcttgggtggacaccactccccaggtggatacctgggctcctgatgaacatcaggcctcaggttcaatctaggtcccatgtgaacatccaggcccaggaagtcctcaggcaccgggaaacactcaagccccaggtggacatccagttcccgactgacaccaaggcctcaggtggacactaggcactaggagaacttcagggcccagctgaaatcaagccctgggtgaatacccaggccctagctaaataccaggccccagatttacattgggccacaggtggacattaggcccaaggtacacactggattctaggtagactttagtccccagatttacattgggccacaggtggacattaggcccaaggtagacactggattctaggtagactttagtgcccagatttacattgggccaccggtggacattaggcccaaggtagacactggattctaggtagactttagtccccaggttcacagtcacacctcaggaaaataccaggccaggccccagttgactgtcagaccccatctagacaccagtccccacatagataatctatgccccatctggacatcaggttccaggtaaacaccaagtccaagatgaagagcaggccccagttgggtatctaatccataggtggacatggggcaccagattgacacacaggcccaacgtggatacccacaccacaggtggacatgaggccccaggtacatacccagtcccccggtgactatcgggccctaggtgaacaccaggtcccagatgaacatcaggacccaaatggatacctaggtccctggggaacatcaggctccaggtggacaccaaggacccatgtgggcagctaggcccagagtgacatcaggttccatggggacacccagtctccaggtggatactgcgtccctaggggtacacaccagtcctcagtgaccgaatggtcacatattctctggccaaatgcaataaaatcacctccccaaagaatatatattctttaaaactgaaaactacatttctcaatcattctgaagataaggaactcgcaacagaatgctgaacacacacagaaacgatgaaactcccacaaccaacacgagtgcaatgctgctcaactagtccgagagcaagacccaccacaggctttgcatagaagacgcacagattcgaatggaagaaaatgtgggacccgaaattgcaatataagaaaagagaaaaaggcaaccacgcacaccaagaaatccaagaagtaaagggtgacatggagacataacacgcccggtttcccaagaaacattaggaaccacattgcgaaatgaaatggcaggccccatcaagccctgttgagactctgaactgcaggcctctcctagacggcctctaggcctacaaattgctaaggccacccttaacacgtcctacccaccttgtagaaattccccaccactaggaaaagacactaaaacccatgttggtcccgagcttaccctgccagagcttaccttgccgaagcttcccgcagtccctgggtgccactagctggctctgtggcttccttggagggcctgtggcctaggcccggtcccctctctcagctcccgtgcctgtccgcccatgaccccagagggacgggcccctggttccctggcggagctgccctgtcggctcacacaggcgccggacggccgcgctcttgctcccaggcaccagcccactcccacgggcagtcgattgtggcactctctggggccccaagtcctgcacctgccccagatcttcatgccctgagcagagaagcgagaacatcttactcagcaccaactgggccaaaatggcgccttccgcaccacgtgtgcaagagggcaagtttcccgtggtgggggagggggcacagaaactccccacctactctcctaggaagagggcggcgcccatggagacaaacccatgggcaccttgatagtcacaaatgcaatgctagatcaaaaaatgatattctggtcaggcaccctggctcaggtctctaacctcagcactttgggaggctgaggcagggggatcacttgaggtcaggagtttgagaccaccctggccaacatggtgaatcccctctctactaaaaatacaaaaattagctgggcttggtggcaggtgcctgtaagcccaactactcagacagctgaggcaggcaaatcactagaacccaggaggcggaagttgcagtgagcagagatcagccactgccctccagctggagagacagagcaagactccatgtaaggtaaaaaaaagaaatgggtgctatactgaagcactcaaatgtggaaacatcagatgagaatttatatacaagggaaacaaacatatatgtctaaaaatcttgtataatgttaagcatataattattaaggaacaaaaagcacttctgtagttgaaaacagtaaaaattaagttgaactaaatgtatattactatttcattacaagcagagatagtctttgtattatatttaaatgaaggtattatccatatgaaagataaatataaattagagcctgttccccaatttctgcttttctcttaggttgtttctttttttattttcaagagttctttctatattctgaacacaaaacttttgctgattgctgtgtggcaaatatcttctattttatatagcttgccttaggtgagcagaaattcttaattttaatgtaacttgaatttttttttttttttttttgagacagaatcttactcccaggctggagtgcaatgatgcagtctaagctcattgcagactgcctcctgggctcaagtgatcctcccacctcagcctccctagtaactgtgactacaagtgcgtgccaccatgcctggctaatttttgtattttttgtagagatggggttttgctgtgttgcccaggttggtctcaaactcctgagctcaggggttccgcctgcctcagtgttccaaagtgctgggattacaggtgtgagccaccgcacccggccttgtagtttgattttaacaatcctttccttgagggttactgctttctatttgtttttaaaggaattcttatttaccctgaagccataaagatattgtgttccacttccttctaaaatttttaaggtttgattttctcacttatgtgcttaatcatctagaattgatacttgtgcacagtatggggttcagataaattttcgtgcttgtttccatatagttaaccacttgccccagtaacatttttggaatggcccagctttcccccactaaaccctgctgatacctctctcatgtatcaggttctcattaatgcaagggtctgtctctgagccttttactctctttgattgttcccatgcgaatgccacataattattatggtttcatgttaaagcttaatatcttctagagcaagtcttccctcttcttcttaagtagtgtctttggttattgtgtttttattctgcaaggttgctggggttttgattcaaattgctttgaattacaagatcaatttgaggagagttgacatttcaatgatatttaattttctggttcatcatgtacataactccatttttaaagggtctttttaatgtctttcattaaagttcatagattttcttcttaaaattcctatgtaagttctttcattataattattccaaggtaacatttttttcttgcttgataaatgtctatcattaacacatacttttctcttaaactcttgctggtatgtagaaatgcaatttaacttatatcagtaatcttgaaaaaatctattattaacattgtcagtttgtatgaatttt

SEQ ID NO: 1885438 - DNA, 4001 bp, Homo sapiens
tagtaagtaattctgtgcaagtgatacacctaaatctcctgcattttattcttgggcaaagtttgttatcaaataattttgagaaattaaatgggaatttgggctgaccttctctactgaactaaatgatttatttctttgtatgctagtgtgagtacatgtattagtgtatgtgtgtgaatatataagtagtgtgtttatatataagtgcatgtatgtatgtgtaagtgcatatgtatgtagatgtaagtagtgtatgtgagtgtatgtgcatgtgtatcagtagtatgtggatttaagtgcatgtgtgtataaatgcgtgtgtgtataagtgtgtgtgcgtatgtataaatgcatgtgtggatgtgtatatgtatgatctacatgcgtgtgtgtgggatatttgtgtgtagtgtgtgtatgtgcatgtagtgtggtgtgtatttaaagatgaagagcttaacaaagtgtgctttgttcttacccatgagttgtcaagtaagtctggagagcttatgtcttcttgctttttatttcttataaggcagatggaatatttttgaaactgaatttgttggcatgttgctggaaacagtaacaaacaattgcatgtagtttcccttgaattcctttccattcagttagctcagttcataatattatttgttgattctaacatgtgtcatggatgcctgcaggcccagttgggagggcaaaggctcagttagttgaaaagctggtgtgcacactatcatgcctgccctgtttgtgtaggtgtggcatggtcagaggcaccgcgacccaatgaattcaaggcttgcacaagcttgcaacccatagaaggagaagaaaacattgatttccttcagtacctgggtggttcagggaggtaacctgaggtagtcagtgcgagcagggaatccaaaaatcctatattcgaattctggctctatcacttgctgactatctccctgtgcctcaatttactcatttacaaaagagggatcataagattctcatgccgggcacatagtagatacaagtaattgttgcaacaataaagattcaggtgaattatattttcatcataatttagtgttcaaatatttaatttccacttgccaagaaaaatccatgttccttttctaatttttattaaaaataatatttccaggccgagcacagtggctcaagcctgtaatccaagcactttgggaggccgaggcgggtggatcacgaggtcaggggatcgagaccatcctggctaacacagcgaaaccctgtctctattaaaaatacaaaaagttagctgggcgtcccaactactcgggaggctgaggcaggagaattgcttgaacctgggaggcagaggttgcagtgagccgagatggtgccaccaccactccagcctgggcgacagagtgagactctgtctgaaaaaataataatatttccaatcaggacttatttttcttcatatgttggtgtgtgtatatgtgggcatgcctatgcttatgtgtgtatgcatgcatacaaatgtttttgtgcatgtgtgcattcatgtgcatgtctacatgtatgtgtctatatgcatatgtaatttcccatgtacatgagtgtgtgcattgcatgtgtgtacgttgtgcatgtgtgattgcatatgtatgcacaatgcttgtgttttcatgagcatatgtgtaaatatacacatgtgcttttttgtgtatatgggtgcatatgtacatggatgtgtatgtacctgtgtgtgtgagcgtatgcgtagtccttatggactctatgaactatgagatttaaataaccttattttattatgtgctttatttaaaatttaaagagatcaagtcctaaaaatatagttaaagcaaaccccacaaccaacacaaagggagggttgtaatgcttaccgttttgttatttttttgaatacacaagtctggaaatagcatcctgggaattttatttttctcagtcactggccttcaaatcccacatacttcatttaggcagaaatcaacaaggagtaatctggagtagagtgattgcttctgtggggctaattgtttcattatttgcataacaaaggttcaaagtaattattgctactttgagtctgtatatcacattctcagacatctggatacaaataaaagacttgaatcagcatctagttgcttccaaatatctgtatctttgatgttgtatagacaaaaccttggggcttttggacatggccttaatagggtcacagagtatggagacgcagtgcaaaagggccttcctgtggatgttcttttccctatgtggcatcctctgtagatcagagcagcatttactgctgctactggtatgcagaaaacacatgtagatgcagggagaaaagcaaaattccactaagatcagaaaccgaggtatactaaagagtaacaagaaactactaaaatgttttcgatgactgtgtggaactttattttattttatttatttctgagacagggtcttgctgtgtcccaggctggagtgcagtggtgcaatcacagctcactgcagcctcaaaagcctgggctcatggggatcttctcacctcagccacatgagccacatgagtagctggagccacaggtgtgcaccaccattccaggctaattaaaaaaaaaagattatggagacaggatcttgctatgttgcccagtctggcctggatctcctgggctcaagcgatcctcccaccttggccttccaaaatgctgggattgcaggaatgagccaccatgcccagccagagtgttgcgctttatattacacttgatattactgtaagatattacagttgatatatcttacatttcagaatgtttcagaactctgtagattttaatattcctattgtttgttgccaaaaacaactagtcaaaattcataattctaacacacagttataagtaccagaagcaattactgggttgcatatcatagatttttaacaaattggtgtattaatcttaatacagttttgtgatagaaaaatctgctaatgaatgccaattttacaaaatatggattctccaaagctggttttaaagttctacatgttggaggttgataaagagtatgccttctggaatgcttcatgaaacaagtatatagactaagttacaaaaatgttttgtgcacctggtaaaagctaaaattatagcatttagtgcataaaagtagagagaatcctagtgcaatacttgctagcggccaaatggctctgagactaaaataatgtctccctgagtctcaatgaatttcagagatgtacaaatccctacatatttctgcatagtcacctttcacaatcttcagtcttcaactccttggcatgatctcaatgagtgtttacactgcttctgagttttaatgaaatagctttatcttcttgttgtcagtctaccattgttacgtgttgtcaatcttaaccatttcttcaatgttttaaaggggccagagccttgataatctcatcaaagtgacccctgaagtaaagagaagtaaccaagggtgaggactatgtcttacctctcttccttccccttccccatccatttgtggcactcaggaaagaagatgtgttgaaaaacctttggattgggatcagaaaggctgaaccccattacttaccagcttggtgtctttgaacaagtcccttgaatgctgagcttcagcctccttagttataaactgaggatcataatgtttgtttggccgggtacggtggctcacgcctgtaatcccagcactttgggaggccaaggtgggcggattacttgaggtcaggagttcaagtccagcctgtccaacatagtgaaaccgtgtctctataaaaaatacaaaaattagccaggcatggtggagtgcacctatagtcccagctacttgggaggctgcgacaggagaatcgtttgaacccaggaggtggaagttacaatgagccaaga

SEQ ID NO: 1885439 - DNA, 4001 bp, Homo sapiens
tctgtcatctgtaaaatggaaataacatttctttgtcttgaatgaaccaagggatgtaaagattcctggagtagcactttgcatcaacagatgcaagttttatacatatgcattttccttcctcccttccttcctccctctttctcctttcccctttcctttcttccccttccccttcccttcgcctcccctccctttcctttccttttctttctctcgcgctgtcacccaggctagagtgcagcagctagagtgcagcagctagagtgcagcggcgtgatctcggctcacctcaacctccacctcccagcttcaactgattttcctgcctcagcctcccgagtagctgggattacaggtgtccatcaccacgtccggctaatttttgtacttttagtagagatgggttttctccatattggtcaggctggtctcgaactcccgacctcaggtgatctgcccgtctcggcctcccaaaatgctgggattacaggcataagccactgagcccggccccagttatatgtttaaatcatgagttcacagccgggtgccgtggctcacacctgtaatggcagcactttgggaggccgaggcaggcggatcacctgaggtcgggagttcgagaccagcctcaccaatatggagaaaccccatctctactaaaaatacaacaattagccggacgtggtgatgggcacctgtaatcccagctactcgggaggctgaggcagcagaatcacttgaacctgggaggcggaggttgcagtgagctgagatggtgccattgcactccagcctgggcaacaagagtgaggctctgtctaaaaacaaaacaaaacaaaaatatacctgggtatgcttgaacacaaacactgccataccgttaaaaatgttatatattaatatataaataaatatttacatatatgtatattagatatatatgtaaagatttctactcatagtacggttcttttaattttttgttctgtttggacattttctttctttttttttttttttttttttaagagggagtatcactttgtcgcccaggctggagtgcagtggcgcgatcttggctcactgcaacctccgcctcccgggttcaagcgattctcctgtttcagcctcccgagtggctgggattacaggcacccgccaccaggtctggcttttttttttttttttttttttttttttttttttttttttttttgagacgaagtctcgctttgttgcccaggctggagtgcagtggtacgctctctgctcactgcaatctccgcctcccaggttcaagcgattcttctgcctcagccacccaagtagctgggattatagcgcccgccgctatgcccggctaatctgtatattttcaagctaaaagctggggtataaaaaaataagggcaagtttacttccatccaactgtgaaggttcacgggggcaccgtgagaaggttgccccctgcgaaggttgcttttccacggttctcgatgcgttccccaaatttctcttccacctcccagtcgatatcggaggccacatcaggtgtcaccgagtcccgggcagctccctcaggcagcggcaggggaagatcctgaggggcacttgggacgggccccgcccctccgtgtccccatctggggctgtcaggggtgtggctagtgctggcagaaaccaatgggagctgaggaggtcgcgtgtttgcgcggacggggcggggcggcgcggggctgcgtgcaggctcgtgggtctgccccgcccgcgacggcattttttccttttctccagcggcctcaggttcttgttacaactgagtccgggttggaggaggtgtggggccgctgccgccaggtaagtcctggcccgtgcctcctcctgccggccccgctttctctgcggctcctggaacccgggcctggggtaaggttgggctgcgatttccgaggagcctcctttgcaaccgggcgtgctcggggctgcctgtgctctccacttcgcaggccgggccgggctcggcggggcgcgaggttccggggactggggacagggctctgcttctcgggctgctgcctccttgggtcgggccggtgccgcggggcccccatcgctgttggcgtggggtgattcctgttccagggtcattcagatccgagtgcgaagcccgtcctggcatctccgcgtctgctaacgagccccgggcttgcaaccctgcttgtgcgtccctcccactcgtgcgttcattcaaacggcagcctgagcgcccgcgagcttcgcactgtgggagagggcacaccacattcggaatcgctcgtggcacacaggctgggaggaacttgcctggaaagttaatgtacctctgggttttgaagtctttctaggtgcactttcatgtaaagcagttgcagtgattagcatttttgttctgcgcaagagtagcaaacaatgttggcactgccctgcggattcggcttgcggtgctacttgggtagtgagaaagttgaaaggcatgaatcttgcttttggctttgccgttgcgaagctttgtgaccgcgggctcagttaattaacgtgaaacgagatgataatttcgaagatttcttttaaacccggctttttgtaagtctgtgatgagcttagttttccttctgcacctttaaaaagaataggaaataggaaaagttcatgaaagggcattattgaaagggcagtcggtccagcaaggaacaataaatgtatgagagcacattaaaggctgtgcaattacagttttaagacttaagactaaaaagggaacaggaagtaaaactgaaagaacttaccaagaattaaataagagaaacggctgggagcggtggctcaggcctgtaatcccagcactttgggaggccgaggcgggcggatcacctgaggtcaggagttcgagaccagcctggccaacatggagaaactccgtctctactaaaaatacaaaattagccgggcgtggtgacggatgtctaattctagctactcgggaggttgagacaggagaatcgcttgaatccaggagacggaggttgcagtgagccgagatcatgctattgtactccagcctgggcaataagaacaaaactccgcctctaaataaataaataagagaaacttggaaagcgttcaaaagtacgaacagctagtattatatttaattacctccctttacagctgtacacatgaggtcaggtgggtgaaaataaatactaagcaaccatgtaagagaaaatgtagacaggatgtgtaacttagcatatatcctaagtgtagggagaatcctttgaaattcttaatttgtatagacaatttcattcagaaaacttgtttttaacctttatttattatttgggacagggtcttgctctgtcacccaggctgctagagtgcagtgtcatggtcttagctcactgcagccttgaagtcctgggcttatgtgccccttccacctcagcctgcggagtagctgggactagagtcgcgtaccaccatacctagataatgttttggatttttttagtataggtggtcgtctcattctgttgcccaggctggtcttgaacccctggcctcaagctattctccagcctcagcctcccaagtagctgggattacaggtatgtgtgactagcccagctaacatttttgttgttgtttttttactttgtatttttcacttttttttgtatttatttatatatttatttatttatttgagatggagttttgcttttgttgcccaggccggggtgcagtggtgcggtctcagcttactgcaacctccgcttcccaggttcaggcagttctcttgcctcagcctcccgaatagctagaattacaggcgcccaccactatgcctggctaatttttgtatttttaatagagacaggatttcaccgtgttggccaggctggtctcgaactcctgacgtcaggtgatccacccgcctcggcctcccaaag

SEQ ID NO: 1885440 - DNA, 4001 bp, Homo sapiens
tttctaagtggggaaaatggattttgttctgttacagttactatgatttatacttttttgtccggttatcaaattattgttaacctttatctatctttactctttttaaccttaaatagttcaactgttcaaaatttatctaaattactttaaaaaagaatctaaataatctactcccaaatccaaatctagaagaaagaaaatgattcttaagagactacttccttgtgtctctgacagtcttcaaatcacttactttccatttagtttctttgcagtttcactgtgaagtgactgaaacttcatttctattatattctggaaatttggggatctgagatctagcaatgtactcattttaagaaattaccttacaggaaaaatgttgagaaattccctggagtgttcctaaaccagctttgctgaggtgtggggtttggactccacttttagtgagggcctgctgtgtgctcaccaccatgcctggcagcttctgctgtcatctcgtttcaccctttgaaaagtctagaaggagagcaggtattgtcaggcccattgtgaagaaattaaaagcaagactcaaagaagctgtaaggtgcctaggatcataagaccagtaagcgtgggtgaggccaaggcttggcctggatctcttacctccactccttattgcttgtcacattgtgtaccgatgtctgggtattttcccagcctgccattgatcttagaaggaaaattctgcactggtgctgctccaagagatacagaggatgcattgatctaacccaatgtgttatgtggttgatttctaaggtgaagtgaaatcagttccaaaaaggtttgaagagatcagcgctgtccatccagggttaagaccctatgtgtaccttccctggaattccatatttattggtgatgctatttctgtctcagaaaagtccccctaatttccaaagtggcttacaaataataggttctagatcatcttgaaaaaattggtcaggtgattgtgtataagaaagaggacaattttatatcacaaaaaggaaaatgcaccaacatttatatgtttgcattcaactgtatgttgtgcacagttgtgtgtgtgttggggttggaagagtaagtgtcatggaaactgaacgatgctgggaaatacatcctaattactcaggaccatatgttttttataaacaagcaaacaagagtcatggattcaactataatggataaaaatctctcaagttaaaaacaatacaaggaagtaaagtagaatagcacagtacagtagttaagcatgaagtagttaagcttgaagccagttgcctgagtttataacccagtctgctaattactagttgtgtgacatttgataggtcagtcacttaaaaacaaaataaaacaaaacaaacaaatcctctgttcaatattcccctctataaagtggacacaataataataagtatgcataaggatgttgcgaaggttagatgagaaagtgcaaatgaaatgtctgatacttcatagaagtgtgttataaaagagaaaaatatatatacgatttttgaactccttgtaatagaataatatatttctcaggttcaagaagttgggaaagagttaatcacaacagaattgtcaccatgctaagagagagagcaagtgattttactactagaagccagtatgaacccaataacacagtatggggaagagaacatctaaccaatgcataataattaggatattgttgagaaccgagccctccgagcttctacatgcctttaacaattagtaggtcaatgaccttgctcagtggatctccactcatatgggaggcaccagcaaaatgaagaaaaacccgcagacgctcttgtaggaaatgcaattaaagtggaaaggcctaaaataacatttccattgtgcccctcacttacattggagagtcagggccagactgggaggctggcagggaaacagcttggcactgcaggccacctggggtccatttgccaacaggacttgtggctaacatcctttgataacaaatttcccagagtcacagggctcttttagatcaccatgattccgggtcacaagacggatgggaagccacagagccccgggtcctttccgtgaagttaaatattacaccatccataatgaaacatctttgtatctcctcgtggccacaattacttagtcactgattatacaataaactcttcagaaataattcacaaagatgagaaatcaaaccccacccttttatgttctgaggcatgaaccagctccacctcttgagagagggaggtaaagcctgttgcacatcttcagcccatggtattttccggcaaatgtggaagaccctcaatattggaaggtgatctgcagttccacagggagacagtacaatgggtgcctgcctgggaatggcagtgcctggcttcagatacgatttcaaccgatcagctgtatagcactgggcaaattacttaatttcctaggcatctcagtttccttattcaccaaatggcagtaataattgcacctacttcataaggttgttggacctggcacactgtagttgctaaataaccgtcaactataatgcccattctcctgagtcgttcaccttttcgatagcctagcaaaaagttctttgaaaaaatgacaactaccaaacaaaaggcatatttcatatagacaaaataactcacattgtctcttacacatgatagggaccttgcccatgattgtggcccttacataatctggataaccatttgggtttttattgctatgtggtgcttcttctgcaaatggtattgtcctttgtgaaacccactgcttttaccttatcattggcaaatacttttggggtttactcgaaatgtattcactggcatggggagtatggatgaggtccctccttcatggaacttagattctggttaggtaaggggtaacaataaagcttaagaagttttaggatcccaaactcagagttcaaggggctcatgtgtgaggaactctagggggaggaagaaaagaagtaaagtttaagctcaaaattgaaggcggctgagagttttgcttgagaaagtgccccaggtgggtggaagaatgtggttccaatacctaaaaggaaaagaagcttggagttgagaggagccgaggccttccacccacctgcagcaatgtcaggcggtaagaggatgatggtcaggctgacctaggcttggagaccacatcaaagggtcaggcttgatcccaaaagtatcaaggaatcacggaagggtttcacactgggagtgaaatggtctgacctgaggtgaggctggatcatcttggctgctctgtgaggcaggagagaatgtggggatcctggtgggaggctgtggctgtcaagtcggcacaagtgcaccatcttttaatgattctggcccagacttgggtggtttggaggtaaagaggtagatagatttgagaaacatttaaacatttggcttaaaactaaagctagccctccctgccccacaaatcaggataagtagcaacattaacctatagtcggcccttctgctaccaacacccaggacgtttttagtttggaaaaagaagggacctggtatctaaagtgcagcttgggggttttctactgaggtcaatgacctgcactgctctgcctgacccattgccacctcagacactgaagcctgctcagcctcctctcaccctaattacacttatcatgcaaagccctaatacagccaggaagggctcaacaccagtccctctagccaaacaatcagcaaactaagataactttaaagagtgtcaagcccaactttatgactccttcataggcaccaagggcattgtctcagcagcctcagccaccagacaggatggcccagggctgcttgttccttgacctgctaggaccaactgtgactcatctatttactgcagagcaaaggtaacttgggttgcacaag

SEQ ID NO: 1885441 - DNA, 4001 bp, Homo sapiens
gactctcagcctcttgcctcatttcctgtctatctcacgttcaccccttaaatctcacaaccaatatttctctacaggaatcaccctagacttccctccttcatggagactgcattttctctggtcactcaaaatatcatttcaggatgttgacagatcacttgggacccaacccccgcactacttttacttggctgatgttgtccagtgcccctctctgttctttaccagtcccagagaaaatgattgagagctaattgatccaaaggggcagaaaaagggatgagaacataggcctgcctcccaaaggatcttccttttgccataggtcaggttcaaatgtcatataacattggtcaaaactcagcctccactcacccctctcctcacatctcatattccccaggctgacctggaaaggtggaggaaaagaaggcagaagggagagatgaagcccaagaacctgagtatttttctcaggcaagactcaggactgctctggacattcagaagctgagtgtgcaagtgtgctgtgtagttcaaggccaccaccactgaagaggccaaggacaccttagtaggaattctaacctggcttccagggagaggtgcttccaaattggccctgtaggcaaattcacttttttcaccctctaagcgagtaagtgcttgttcccaatttccatggtttagtcttcagtttcagtctttggtctcctctggtctatcagctcccatctctctcccagtctttttctttattctgtgacacctgttgaatgaggcacatagggtttgtagtcactgtagtgttccttgtggttgtgaggtaataggctaatattatcactttctcagaaagtcttcaaaattatcatgaggaggtgatgcattcatctgctgggaggtgtctgtgtggtcagataagatgatggctacattccattcctatcctgtcattcaatcattcttcctccagggagccactgagggacgtgatagtccaaagcactcagctaaaacggaattgcaaacatggtacccacaactttggtttcttatcatccatttgtatatctgcatgtagtctgtctctgatttagggtttaggttcctctgtatttttttttcttttcctgccctttgagagtttaataaaagccagaagcatcttgtaaatggtgacacaagaatcattatcaaatacacctcttgcacaataatatatagtacaaacattaaggtgtgtggctttatcagctagattgcgtgaatgtaaaacagctcccacattttttagctagataggtatttaacgtctctgtaaaatgggaattataataggatgtaccttagtgttcactgtaaagattaagtgacttaatgtatacaagcacttacaacagtctctggcaaatagatgacaaaatatatattatccataacagatgtggtggaaatatttattatctctcttaagagtgttcctctgcagtttagaactcagggacccccttgaagatgcccctggatctcccgaagtctctggacctctaagaatccctagtttagcagaaagagtcccagactagaggtcagaagacctgggaatgttcatagccccatacacaccattaagagccgaccacgggccagtcctcttactagattctgctgtcagtttacgaattcttcaccagttatgcaaggtggctatcttttccccatttcacagacgaaataaattcagaagggtttaacgacgtagttaatgctaggagcagaaaacacgggtctgtccgagccactgttaagatcctcctttaaaatcccgccacatggttctgagagtcaatctctcttatttctgtcggcgtcaaacaggaatatcactaccttgcccacctcacagggtgagattccaactagaaagtgtttatgcaagtccgccgtgggtcgcgaaacggcggctgccgtcggaactgcgatgccaaacacagtaaacctcaaggacaagcgagccgagccgagccgagccgagccgagccgagccgagccgagccgagccgagccgagccgagccgagccgagccgagccgagccgagccgagccgagccgagccgagccgagccgagccgagccgagccgagccgagccgagccgagccgagccgagccgagccgagccgagccgaggaggcttgggatccctcctccaggcccgaagccggagtccggcgcgcggctgagtggcaggtgcactagccaatagagctgggggaggcggagcgggcggggctgccctttggccgcgctcggccttgtgggagagctagtggctgctggcttgtgcgcgccggtctcatcgctgctgagggtcagcagagagccgcggcctgtggggcgttgtctaatcccagagcgctgactgcgggcaccgagaatcctggcgttagtccaaggggcctggcgaaatctcgttaacgagtactgcaggctgttggtgaagtcacgacgtagtgccagtggcctcgtcccgctctgctcaagggaccctcacaggctgtggaatccgggcgtcgggacctccggggacctgggccttctgcttccactctcattcctgaatgttaaaggggcagggccggaccggtaacaagggaaggctggagaaatagcagggacggattttcctcccggaaacacatttgcaggcctcctagaaggaaaaatctagaaacagtgggattggggaaagaacgacgtggcggttctcatgtcttgatgggatccccctttgcccttgggacaccaacatctctcacctgctttatcgtcataatcttctgactggatttcctgccccaagatttgcccattcctgtcaggcccactccagcccagggtgattgctgccaaatgctgctgatcactacattccccaacttaaatacctttacagagttccccgttgccctcgagacaaaggcctgacactgaacttagctcttgaggcaatggaggttccggcttcctgattactgttccagccccatttctgaccactttccactctgtttcccccagtcaggggtttatgagattaataaatggatgaacaagctatttctagaaatatcagcaatattatcagagtaaaaggaaccattataatctgaatgacgatgaaaacctattgtgctcatgtatcacttcagatggggaagtcaactctgtcctggaatccagggaacctgaattcttatgtttgctcagctactagatttttcgcataatctgccacatgttgcatccagtctttgttccttaatttataaaatagggccagtgaaggaatgttttctatactcatatctttatctttatgagctacttcaaagataaatccaacagaacagggagaagcactttacacattcaaagtattactaatgtgtaacaagatagacgccatgatacacaccatgaattacctttaaaatccttttctgggacacatagaacttgcactttatatatcatgtaagacagtggtccccaacctttttggcaccagggactggttttatggaagacagtttttccacagaccagggtggaggtggggagaacgcttttgggatgattcaagcacattagatttattgtgccttattattattacattgcaatatatagtgaaatatacagcgcaccataatgaagaatcagtgggagccctgagcttgttttcctgcagctacacggtcccaactgggggtgatgggaagcagtgagagatcatcaggcattatattctcctaaggagcgtccaacctagatccctggcaggtgcagttcacaatagggtttgcactcctatgagcatctaacgctgctgctgatctgatgggaggcagagctcaggcggcaatgcaaacaatggggagtggctgtaaatacagatgaagcttcgcttgcttgcctgctgctcacctgct

SEQ ID NO: 1885442 - DNA, 4001 bp, Homo sapiens
ggcaaagggaagactgccttctgttttgtgggaggcaggttacaaaatgttaggagtgcacatttactttcatgtgtctgcttggttgcaagtcgaatctgctgtctgctggaactccggagaactgataggaatgcagcatccaggaacctgatcctaccccagggagttctgatgctaccttcctatgctgcagaggactctcctgctgcagctctaagagaaatttagacagtaagtcaatccagacatgccctgtgaaagtgagatcttattggcatggcttgcccggtgaaaggtaatgaggagtagctgaggctgcacctgctcaggagcccatgtgctcaacaagaaaactccaagcttgcttcaatttggcattgtttttagtgaacgttcactgttttaattccattcactgtttcttatttatttgagatggggtctctgtcacccaagctggagagcagtggtgtcatcttagctcgctgcagcctcaaactccctggctcaagtgatcctcccacctcagcctccccagttgagaccacaagcatgcacccatcttcattctttgtttcttatccttgctggactactgcaggggtcctcctggagatgagattcttccaacctgaaaaactctataattatttctgccagagccaaaatcttcctggtcaatggctgaaagggggcaatgctcaacatggaaatgcatacctgccacgcttagcaggaatctggcggggctgaaaacccaccacatacaaggcactctcaggaggcaggaactgggccactgtcttagtttcaattcctgaaacaggaatctagatgcacatgtttactggggatatgatccccagaaacacagtgagggattggagaagcaagatagagagaggtgggttagccaataaagggggtgtacatgagcaggatgctgcacagagcacttgggttttacttcctctggagtccctctcaaaggctcagtggaaaacacctcgattttcctgttggcagggggtataaaaaaacggagactttttttttttaacaagctccatccttcattggttaagggttgctccaggcccctttaactctgatgctcttctgggcttccccatgcatggggcttaacaaatttctgtggccagagagagccatcaggcagagatgtggaagctttaggtaagaagctacagtgtgtccatgaagctgcagatgacctgcaagggaacatgctccatccacttgcaacagccatcatgacagtaatgtcttctcatctgtgtgcccaaacatgtgcacatgtgcatacacacacacacacacacacaaatgcaaattgttgtacctttttctcatttgcactccccctcaccatgaccatgtaaaaatcgagtctccaaatagtttcagccctgctgagccatatagccttgccttgcaatacgagcaagtagaagcagttatctgtagcctcccaggccccagctactccattgtaaatccatgccagtttctaacttcagcccagctggaaaggctaggacttgcgttggctgttttgcttaagccctgctgaagggcaacatggggtgatgggaaaaactggaacagatgtcaggaatttgaggtttcttgtgtcctgtccgccagtaagttacataacttccttagttgacttctagaacttagtttctcccttggtagaactagagtaataatacccgccctatttgcctccaagagttgtaggaagactcaaaaggagccaattcacgtacctgggatcaccttgacgtggcagggatgttccttgcaaagccttatcctgctcaatcttcacctaattacgttggttttaggcttgaagcaggggccttgctggctgacctctcaaagcctccctttcccttgttcccatgtgtagcattctgttttgggagcacagaatgtcctctggtctagaggaagctaagccactgtttgcaatcagtccaagcagatcaagttaaggaccaggccattttggaggcacacaaggactcctcttggcagatgggcacgacaggcttgcttgcagactgagtggtgaacagccccttccatctcttcgtttgcttgtatcaaatagcaaattccagaatcactatacagagtggtggatggggcaatacaacttacccaaaatattaataggcactcatgagggcaccagctgttgtgactagtctgtgtcattaaggcctgtgtgatgtcaacagagaagccattgttggctggacctgcccccaccagctcaaccagggagtgtttgtcagtcacttaggaagagctgccttaaagggtgagtgtggttctcaaaggtgggaaaaactaacaattcttgaagaggactcaaggtttattggaccaccaaatactggagttgatgctgaagtctataacaatggtaacaatactcagggtgtatccattgtgggcccagccaatggatactctggggagtattgaggggaggggtgttgagtccttctacacaggctcagaaagaaaggttcttatcatccacttagaaacaatggaagcaaagtaactctctgggacagaaactttgtcggtcagggagaggcttgaaggagactctaaatggttcccagaatgaattcccacgtaaacctaaagaatgctgatggagagaagccactgctcattcttctttttaagccaaataatatccttctgccggaacaaagttgttcttggcacttggaagtaaatgtgaggagggaatcaaaacacaacgcctgagagacaaatccataagaaatctgaaggccaggacgtggtgaaaagtaataaagatagaagggtcagtggcaggaacaaagattaactgtaccagaggagatggcgctttggctctgaaaataggattgagcgaaagccggaagtgctgcagagacgcacgtgtccttcgtttccaccctgaaggctcaaaggaaggccgctgcccagccacgcggaggctgcaggacagggttctggaagctggggcctccttgccctaatcctggaaggatattccacatctaaatcaccgaagcttcatcctgtgatgcagaagctctccccttgtgaacaaccaacacaggaagtagtgaaacctggtagagagaatattatctttctccaccttcaattataccagaactgcctccagggactttggcaggtttgacaaatggcagaagaatttagaagattttctttgctggcaaagggagccaatggttgggcacaaatgtgctgctgcggttgtttgtacaatgaaactctagattgtaggcagaaatgtcaggttcctttcaactctcttcagagctaatctagttcccatgtgcaaactcaatctatagcatttgggtaaagaatactcagtcctctgctgtgacaagaacaaattcatcacccacaccatacattgtagctaagggcatcatcgtgcccacatgaatcaccaggcagagacggctgccaactctgaaattctttactcatggaagactcacgtatactaatgccgactatttacgcaagcacatttctccaggtggcctggagcagtttacaagatgctggctcattcctcatcatgccacttggaaggagagcaaaaggtggggaaagaggaagggccaacatcatcatctgcattttatgtggggaaactgaggctcacataagccgtaaagtgaaatgtatagacatttatgagtcagaaatcgaccatggaagaggcaaaatgagcttatctgaatcatgagtggactatttcttgcccaacaatttcatgcagctcttccaacacaactgttttgatacagcagcctcaaaacaagccaaaattcagactcgctgtatttggtttataaccagtttcccatctttcattccttctctgacttctacctgacttctgaatt

SEQ ID NO: 1885443 - DNA, 4001 bp, Homo sapiens
agcacctttaccttgggacatcagagcctccagaaccaccacataagcttctactgcttacccaggtctgtggtatattgttacagcaagacaacggcctaagacaaatgctattaccactattattttgagtcctgttccatgcatggtcaaagcaattccaagctagtatataacacacaaagaatggatgctttaaacaatcttttttttttttttaaggattcaaaagcaaactctggatcctgagcttaactgttacgcaatagatgacatcccacttatttttgtatgttttatttgtcctggcacagtagctcacacctgtaatcccagcactttgggaggccaaggcaggtggatcacgaggtcaggagtttgagaccagacttataaacatggtgaaaccctgtctctactaaagatacaaaaattagccaggcgtggtggcacgcgcctataatcccagctactcagcaggctgaggcagaattgcttgaacccaggaggcagatgttgcagtgagccgagatcacaccattgcactccagccaggttgacagagcaagactgtctcaaaaaaaaaatattttatttcttccttgatgatttagaaggactatcttcaaaccagtacaagtatttcatatataatacctcgccattttctgagtaatttgttgcacaataagctacctcatgtccttcagcaagaaatacattaaatttgaatagcaaggacattacataatgaattaggacacaaccaaaatttgctttaaatatttctttgggggagaggacaccacacttctactcaatgaagagaaacatttttgtagcccagaggtcctttatttttttttttaacacctattatgccatgaattcatagggaataggttccagcagctcaggctccttcccattggttctcacaaagtgtgcttctctgggtggagcaggctattaaaggaaaaaaaaagggaataaaataattatgtgatgtgttaaatctcaaccttaaagtgctctcagaaccaatgaaatatacaccaaattcttacctggcgctttagttgaacccaggtacctttctctttggcttctttctttttctgatcattttccttcacacgtttcaggaagctatctcggctcttagagtgcttaatgtgctcaatacgcacattaattctcttggcaagaatcttgcccctggacagagcagaaattcttttaagtgctttaacaaaaatataacagaaatgtagaaaactgattttgcagtttcatttattaaataaaccataaaccttttacccagatatgacaaatcaacaaagtatgccttgattacttaatttacaatcaattaatcatatcagaagaggccttgcagagaacatccctacttttaactctctttgatgagatgatggtctcttaaactctagtaatctaaaaccagactgctaataaaatttaaaagtttactaaacttctctttttattctataaaaactgctgggccaggcgcggtggctcatgcctgtaatcccagcactttgggaggccgaggcaggcagatcacgaggtcaggagattgagaccatcctggctgacacagtgaaaccctgtctctactaagaatacaaaaaatttagctgggcatggtggtgggcgcctgtagtcctagctaccccagaggctgaggcaggagaatggcgtgaacccaggaggtggagcttgcagagagcagagatcccaccactgcactccagccagggcgacagagcaagactccgtctcgaaacaaaacaaacaaaccgcttagtaactaactgtgtaagactttccagtaaatctatttcaatttgtttcctctgacaggatacagacaaacacccagtttgcctgagttttaaaaggatatttcctttgccccacttgaatgaccaataaagacataagtccaactggcaaagtgaaaagggggtatatgagggaatactggttagccacaaagaactacaacactacttacttaacttgtttgtttacaacaatgccaacagcatgctgggtaacattgtagactcttccagttttgccatggtaacacttgtggggcattcctttttgaacagtacccattccctattaaagaaaccaatgttatataccagcatttccccttcctttaaaattctgactttaagtaactgcaaagtattctaagatttctttcaaatggcaactcaagagctttcagagccggtgaaatgtgtttttcacattgcttcaagcaatcaaaaaaaacagtcatcattaagctcgagtgccaagatacatttaaatccaggtcacagaagaacacagctttcactaggagggtttttaatcatagtaatagtaatcttcatcaataattaaactttgcactaaggcgttcctttccaacttgataaactcataatttcccaccctaccacccaatttccactagctgttaactccaagcgggtaatgaggaaaatttaaattctgctaagaatagcactttaaaaaatccattctaggccgggcacggtggttcacacctgtaataatcccagcacattgggaggctgagtccggcggatcacccgaggtgttcaagaccagcctgaccaacatggagaaaccccttctctactaaaaatacaaaattagccaggaatcatggtgcatgcctgtaatcccagcacattgggaggctgagtccagcagatcacccgaggtgttcaagaccagcctgaccaacatggagaaaccacttctctactaaaaatacaaaattagccaggtatcatggtgcacgcctgtaatcccagctatttgggaggctgaggcaggagaactgcttgaatccgggagggaggcggaggttgaggtgagatcatgccattgcactccagcctgagcaacaagagtgaaactccgtctccaaaaaaaaaaaaaaaaaaatccattctatactcttacagatgcaacatacactagtatttgaattcctacactagattaaatccaacttttctatcttctgtagtgttattttcccaattttatgtttaccttgatgtctacaatatcacctttcttatagattcgcatatatgtggccaaaggaacaactcctacaaaaataaatttggtatagtgagtattaaggctaaaaatctagagtaaaagaaatgcaattttactagcttttaacacatatatcatttttgatggttacatgcttattatcttcccaatggacaatttctcctgacagcacaatcagcctactaaatcacaacctctctccaaagtttaatcttgcatcaatacttagtcacaaaatcaccatataattttggtaatttatttaccttatcacgaaataagctgggtagacgctagttatttaattctattgatacacattctatgaactacaacacatgttgaacacaacagaacacaaatgtgtgccatgcttctctcaaggaaggtaaacctacttaccatgttttctaaaaggcctagagaacatatatcgggtgcctctcctctttccctttgtgttcgtcattttggcgaattactgaaaccagaaagcagaacagtcaaatacgactgaaaactggcatttgccccaaacccctgtaatttcaaatgttcacatttcagtagcgaagtgagaactgcaaactgaaagctggatcaccaagcagttagttctgttgaaaggttaaaaaatcattattttagcaagtaaggtcttttggcaaaactgcccaagttctataacatcaaaactcttaaggagcagaacttgatacgagaatccaaactagtaccctttctctatgagaatataaaaacacaacaggacttctaccacactctatctgtagaacccaatttagaatgccaagggcatgtaattactaactagaagataattt

SEQ ID NO: 1885444 - DNA, 4001 bp, Homo sapiens
ttacaatgtcaaatcagaacgctaagccaggtgcaatgcctcacacctgtaatcccaacactttagaaggccaaagcttgagatcacttgaggccagagttttcagaccagcctgggccacatggcatgaccccatccctacaaaaaatctatcagaatgcttaaaattgctattaagttcccaatacgtatttaggtttgtttccaatcacggggtgctgggggttaacattagtatctgcctcaggttttggacactatggacagtctggaatttgacactagggcaaactccagattgctcaaaccactacattcacatgttcaagcagaccagagtcactggcctgcttttaatctttcttttacaagtgtaatcaaccaggtaaggctgatagactatttcccaaaactcacgttttgaaaattcccctcccaggctaggcctgcactttgggaggctgaggtgggcagatctccttgagcccaggagttgagaccaccctgggcaactaagcgatactcggtctctacaaaaattagctgggcataggggtgcatgcctgcagtcccagcaactagtgagactgaggtgggaaaatggcttgagcacaggatgcagagaatgcagtgagttgcttgtgccactgcactacaagcctgggtgaccgacctgcctcaaaaactcttcccgctttttttcctcctgtattcctctattcaatctcagctgccacaattagacagacggaaagcgcaaggacatgttcttcttgcatctgtggtggaaaccatagcagcagatagcaactgctccaggtctgtcaaatagatgcattttcttattcagacaccccatcttttcagatacaatatagagaacatttttacccctttgcccaccagccagcccacattctgtgtaccttcatcttttaaatcaggggctggcaaacttgcaggctctagtctgttagacacaactctgctcatgcactgacaacagccacagtcaatccataaatgaataagcatagccacgttccaataaaactggactcgaacttaaattccatatcccacaaggtattcttttcccctcaaccatttaaaaaggcaaccaaccaccttaaagtgtacaaaacaggtggtcagataggctagtttgccagtccctgttctagttaccagggagtttaattaacattcatcccaaaagacttcgctctctttatgtgaaataagctgagacaaagttgcttccactgaatgagtctctttttattctcttggtaatctcttccagttaactacttccgttgtaggtgatgaaatgggtaaggctccacacttcagatgttggcactgctatgagcatggtctttccctttattgcaactcaaaatcagaacctttgattcttttttatattccagtcccagaagtagtctccactgtagaagttaattgatgagtagtagcctacaatcaggctctagcttctccaggaacactacaggatcaatttagtttaaatatgcattaaactaaaaggcattctctcaaatgagtttaaatgcattttatttttagacaacctacatgacatgtttttcttaaaaacaatgcctccactccaaataaatcacagtcaaaataaatgaagagctcaagatgacatcagtcccatttgtcttaagtcctggtgttgtgtggatgacaagcagaagccagttatgatgacaggtgatagatccaaaataattgccacatttgttactgtaaaagcaaaaactacattaatatttttcaaacattacactgcaaaagttacattaccattaacatgcagcctacatttccaggctaaagatgtattccccaattcaatctgggccgccacaaagacagacagaaagcgcagggatttctttcttttgcatcctagtgcaaaccaaaagaacaacagtaaattgttcaaggtctatcagtggatgcagaacacccttaccaaatcagcggtagctcatttttcagaaggctgtggcatgtaccacccacaccctgctctaccaacaaaaacctcagatactgtctgaataacccctttggtaagtcatcttatactgttctaagtaatttctgtctactgttgactctaatcttgttcagtatagctttatgtttttcttcttccttatacagaagcctatgaaaactaggataatgaatgcctttgtttctgtacagcttccagcagttccttccatagaagacaccaagttatttattattagtaaaacaatttgcataccagttcagcagtcagctctatttactaagctagtactgcactaggcttttcaatgatcagctgcccattatcagtaaaccaaagtgaaaaccactgatactgatccatacgtatacagcaaaatatgattatgaagtgaaagtgaggccatatctagaggaagatcaatggtgttctctgatctccttcagcatttaaactctactgtatttttttgagacagcacctcactctgtcacccaggatagagtgcagtggtgggatctctgctcactgcaacccccctcccaggtttaagtgattttcctgcctcaggctctcgattagctgggattacaggtgcccgctgccatgcctggctaatttttgtatttttagcagagatagggtttcgccatgttggccaggctggtctcgaactcccaacctcaggtgatgcacccacctcggcgtcccaagtgctgaaattacaggtgtgagccaccacacccagcctaaactgtactttattatgccccatctgcactcaacgttttccacaaataagattctaagcctttttataccctaagaattttttacatatgaaacacaattctcttgatccccaaagagaaaactaaaaccatgtttcagaacgctgtaaaactcattctcagtgtcacaaaacaattgcaaatcacatctaaaatgtcttttttacattatttattttaacccacttccttgtacttacacatttttccatttctaaaccatccttaaagaaaatcatatatggggtcacaccatcctcacggtagtccaatagagcaaccatgccatctggattcatgttttcaccaataaagaacttgggaagcaaacaaaatacctagaattagactattacatacaaatacatgccattcaaaacaaactacagtacaagggaaggtttagaccaccacaaaaatcaaaacttcagtacccaaaagctctgatgctcacttatcatagacatctgttcactggattaaggcaccttaatagtgacctaaatagaaaaataacgtacagagcaatccaggaacactaggctttcaggaaacctttactctcaatcctaaatacaatcccaaaccctaaagcgtgcttatatagtcaaccacagggaacataaggctgacagtgatagaatatatcatacagtctggaagtatcttatggccaggggatgcatgaagctggaaaattagaggaaagggaaagccactgacattttccaaaagtagaattaacaagctcagatacattagaaggaggaccagtagcaatgagacacattaaaattgtaagcaaaaaactgaaagaacacttaggtggttaagcaattcacaaaaagaaaaactgagaaatgtcatctgggaagcaaattttcaatcagaagacaagatttggaaacacctgcgagctgggaaagccactttctacacctggaatactagtatagaattgaagattaatcaacttaatttttgctcttgcagttaaaattgtacaatcctttgatccagatacttaaggtatttacctggtagtttttgaaattagcaaggatgtgcttgatttgttctgcagcccctgtcataaaaggttttactctttctggtctctgttcttcaagtttccctttgattctaaaaca

SEQ ID NO: 1885445 - DNA, 4001 bp, Homo sapiens
actttgggaggccaaggcaggtggatcacgaggtcaggagtttgagaccagacttataaacatggtgaaaccctgtctctactaaagatacaaaaattagccaggcgtggtggcacgcgcctataatcccagctactcagcaggctgaggcagaattgcttgaacccaggaggcagatgttgcagtgagccgagatcacaccattgcactccagccaggttgacagagcaagactgtctcaaaaaaaaaatattttatttcttccttgatgatttagaaggactatcttcaaaccagtacaagtatttcatatataatacctcgccattttctgagtaatttgttgcacaataagctacctcatgtccttcagcaagaaatacattaaatttgaatagcaaggacattacataatgaattaggacacaaccaaaatttgctttaaatatttctttgggggagaggacaccacacttctactcaatgaagagaaacatttttgtagcccagaggtcctttatttttttttttaacacctattatgccatgaattcatagggaataggttccagcagctcaggctccttcccattggttctcacaaagtgtgcttctctgggtggagcaggctattaaaggaaaaaaaaagggaataaaataattatgtgatgtgttaaatctcaaccttaaagtgctctcagaaccaatgaaatatacaccaaattcttacctggcgctttagttgaacccaggtacctttctctttggcttctttctttttctgatcattttccttcacacgtttcaggaagctatctcggctcttagagtgcttaatgtgctcaatacgcacattaattctcttggcaagaatcttgcccctggacagagcagaaattcttttaagtgctttaacaaaaatataacagaaatgtagaaaactgattttgcagtttcatttattaaataaaccataaaccttttacccagatatgacaaatcaacaaagtatgccttgattacttaatttacaatcaattaatcatatcagaagaggccttgcagagaacatccctacttttaactctctttgatgagatgatggtctcttaaactctagtaatctaaaaccagactgctaataaaatttaaaagtttactaaacttctctttttattctataaaaactgctgggccaggcgcggtggctcatgcctgtaatcccagcactttgggaggccgaggcaggcagatcacgaggtcaggagattgagaccatcctggctgacacagtgaaaccctgtctctactaagaatacaaaaaatttagctgggcatggtggtgggcgcctgtagtcctagctaccccagaggctgaggcaggagaatggcgtgaacccaggaggtggagcttgcagagagcagagatcccaccactgcactccagccagggcgacagagcaagactccgtctcgaaacaaaacaaacaaaccgcttagtaactaactgtgtaagactttccagtaaatctatttcaatttgtttcctctgacaggatacagacaaacacccagtttgcctgagttttaaaaggatatttcctttgccccacttgaatgaccaataaagacataagtccaactggcaaagtgaaaagggggtatatgagggaatactggttagccacaaagaactacaacactacttacttaacttgtttgtttacaacaatgccaacagcatgctgggtaacattgtagactcttccagttttgccatggtaacacttgtggggcattcctttttgaacagtacccattccctattaaagaaaccaatgttatataccagcatttccccttcctttaaaattctgactttaagtaactgcaaagtattctaagatttctttcaaatggcaactcaagagctttcagagccggtgaaatgtgtttttcacattgcttcaagcaatcaaaaaaaacagtcatcattaagctcgagtgccaagatacatttaaatccaggtcacagaagaacacagctttcactaggagggtttttaatcatagtaatagtaatcttcatcaataattaaactttgcactaaggcgttcctttccaacttgataaactcataatttcccaccctaccacccaatttccactagctgttaactccaagcgggtaatgaggaaaatttaaattctgctaagaatagcactttaaaaaatccattctaggccgggcacggtggttcacacctgtaataatcccagcacattgggaggctgagtccggcggatcacccgaggtgttcaagaccagcctgaccaacatggagaaaccccttctctactaaaaatacaaaattagccaggaatcatggtgcatgcctgtaatcccagcacattgggaggctgagtccagcagatcacccgaggtgttcaagaccagcctgaccaacatggagaaaccacttctctactaaaaatacaaaattagccaggtatcatggtgcacgcctgtaatcccagctatttgggaggctgaggcaggagaactgcttgaatccgggagggaggcggaggttgaggtgagatcatgccattgcactccagcctgagcaacaagagtgaaactccgtctccaaaaaaaaaaaaaaaaaaatccattctatactcttacagatgcaacatacactagtatttgaattcctacactagattaaatccaacttttctatcttctgtagtgttattttcccaattttatgtttaccttgatgtctacaatatcacctttcttatagattcgcatatatgtggccaaaggaacaactcctacaaaaataaatttggtatagtgagtattaaggctaaaaatctagagtaaaagaaatgcaattttactagcttttaacacatatatcatttttgatggttacatgcttattatcttcccaatggacaatttctcctgacagcacaatcagcctactaaatcacaacctctctccaaagtttaatcttgcatcaatacttagtcacaaaatcaccatataattttggtaatttatttaccttatcacgaaataagctgggtagacgctagttatttaattctattgatacacattctatgaactacaacacatgttgaacacaacagaacacaaatgtgtgccatgcttctctcaaggaaggtaaacctacttaccatgttttctaaaaggcctagagaacatatatcgggtgcctctcctctttccctttgtgttcgtcattttggcgaattactgaaaccagaaagcagaacagtcaaatacgactgaaaactggcatttgccccaaacccctgtaatttcaaatgttcacatttcagtagcgaagtgagaactgcaaactgaaagctggatcaccaagcagttagttctgttgaaaggttaaaaaatcattattttagcaagtaaggtcttttggcaaaactgcccaagttctataacatcaaaactcttaaggagcagaacttgatacgagaatccaaactagtaccctttctctatgagaatataaaaacacaacaggacttctaccacactctatctgtagaacccaatttagaatgccaagggcatgtaattactaactagaagataatttagtggagaacacaataaaacagccttacatttttatgtgaattaaacctttcttgtcaaccaaattttccgtgatggtgtatctcaaacatcatctatttaactatcagaaatctcaagccacttcacatttctgattatttactacgaacgtatatagggtagaagagaggggaacccaggctttataatcattgacctaaatttgacataggctctgccacttactagctgggacacccacatttcatctctcatcttcatttgtaaaataggggtgaacactttcgtagctgaggtaatgtctacaaagaactcagcaatgcttggcccgtgta

SEQ ID NO: 1885446 - DNA, 4001 bp, Homo sapiens
caagcctaacttttacataaatctgatggcctgaaacagttttaattcacgttcataattacaatcaaagcttttgtgtgtgtgtgtgtgtgtgtgtgtgtgtgtgtgtgaatgaactgaacataaatcgtaggaagacttaaagagttaaccgtttgtagatgttcctacttgcacataccacagggctaggtcaaatccaaactgccaaagaaagaaggcaagcaagttctccctgaagggcaggccaccatgtgaataaaacctccagacagatcatgttctaaatgtgccgcagcataccaaaaagtgaggaaaatacggaaacagaatcatgctgtttgacttctgcatcgtgttaactattttttttaaaaaactgctctaactactaaagaaggaaattatgcttagcataaaaatattccagcactgagtgattggtacgttttacttctctcttccagggaaactacttacacttattgattttaaacaccttcacctcagcagcgcatgtaagtgagacactgtaagttaactgtaccttaaagagatcagtatatagatggttctggcgaccaagattacaacaaaagacaaacaacacagaatttttaaagagctgaatagtcagtcaaggatgcatactctcagtctgggctagctcttttttggaaaggttgccaagaatgtccttattccctccagagttatttttcactccactacctctgactaggtgcatcgccagtgcaagaaaatgcgagaagcctctgtttctgttgcaagcaacacctggacctccaaggaaaatgagcactttcttgctaggaacagtctcaaacattttcaagggtgagtctccccttctccaggtttaaccctcttcctccgtagctggagaggctctcctactcgtgcccgccgccttcttcctcccggcgaggattccagggccacaaccagggcagctgcacgccaggccggcctgggtagccgggatgacaccagggtttgccaacgccaaacagggcgcagactccccggcgcgctccggactctccactcgcctaaacctgctctcaagtgaaaaggagtgggaggaggaggattgggagggggcggggggcggaggggatctgttaattcgaggtcctgggggtgtgggagcgggaggcggctccgctgatccctcctccctccccgagtcctgggctccacctcctccgcaggcccccagatatacacacacagccgcggctggacatgcacacccagtgccggctccgggcgcgcacacatgcaggtagccacactcacctgagccggtgcagagggcggcctgggctgggaaggggccccctgcgccgcgggagtggggagagcgggaggtgccacagcgcggacctgcgaactgaggtgatggcccgttttccttaactctcctgcagcacctccgcccctgcgccggctcggctctggccacagcagcgaggacagaggggccccgggcgcggcggactcgcgggcgcacgctcccaggagcgcgccgagaggggcgccgcggcgcaggaaacttgggcgaagttagttgcaagtgccaggcggctgccgagaagagcgaggcggggacgcggccggtgccaggcctgcggcgccgcgtggaggctgcgctgccctccgcggccggcgagctccgggagccctaagtcggcaggcgcgcctgaaggggctcggagcgaacagagccggcatggcccaggggacggccggacgcggctcctcggcgagccgggagaacttcctctgaggccgggcgaccaacgcttgctcaagcctcatccaccctccttcctcgccccacccgtcagtccagcagcgggagaggaagactcgagaggcaggtgctgcgggggacagctcccccctccaaaaaaaaaaaatcacccagccgattgggggtttcccatcggcgcaccctgcccggagccaagaagacaggctggtgctgctgtatttgtatttatatccattgctgcgctctgcgttctcgtggcacgcctggacactcctccgcctccccctcctcttcctcctccagggccacctccccgccttccccacccccatctgcttctgtcaaatgagaaagtcaccgaggagaacccaaacactccagccgctgagagccccctttggcacttggcagcacgcggcggcgggctcctcggctcaacttcgaggagtctccgcgacgcaacttttggggacgctttgcatttaagagagaacgaccgaggaggaggagcgctctgcccggccgccgctacctgcggggagctcaccagcaaacgccactgcagacgaaggacccaaagaacgtaaagggcaaactgccgccgcggggagggggcaccgccgagaagttagagtgtcccagagacaacctgctcgagcgctcggccggagacactaaggcggcccggggcgcggcgtggccctgggctggtcccccagccccctcctccggggcgggagcgacgccggggcgcgacgagccccggccggccgagcgggtctccgcgggcagccaacattgatttcctccgggccgagggcgagggcccgggaggcggcgggctgcagccgcggcagggcgagagcatgtccaagccggtggaccacgtcaagcggcccatgaacgccttcatggtgtggtcgcgggctcagcggcgcaagatggcccaggagaaccccaagatgcacaactcggagatcagcaagcgcttgggcgccgagtggaaactgctcacagagtcggagaagcggccgttcatcgacgaggccaagcgtctacgcgccatgcacatgaaggagcaccccgactacaagtaccggccgcggcgcaagcccaagacgctgctcaagaaggacaagttcgccttcccggtgccctacggcctgggcggcgtggcggacgccgagcaccctgcgctcaaggcgggcgccgggctgcacgcgggggcgggcggcggcctggtgcctgagtcgctgctcgccaatcccgagaaggcggccgcggccgccgccgctgccgccgcacgcgtcttcttcccgcagtcggccgctgccgccgccgctgccgccgccgccgccgccgcgggcagcccctactcgctgctcgacctgggctccaaaatggcagagatctcgtcgtcctcgtccggcctcccgtacgcgtcgtcgctgggctacccgaccgcgggcgcgggcgccttccacggcgcggcggcggcggctgcagcggcggccgccgccgccggggggcacacgcactcgcaccccagcccgggcaacccgggctacatgatcccgtgcaactgcagcgcgtggcccagccccgggctgcagccgccgctcgcctacatcctgctgccgggcatgggcaagccccagctggacccctaccccgcggcctacgctgccgcgctatgaccccgcggggccgcctcgcgaggaccggtgtgcacacgtgtacatatgtataggtacgagcgctgcggcctccccgtgcgccctcccgcgaccgggggcccggtttgtatgtacatagaatgtataggtgccaggtagaggcagagaggccaggcggggcaggagtggccaagcgcgcaagggcgcgggcgagcaggcctgtgaattcgcaggatcatttcagacccgcacttcggcagccaactcgaaagcaggcggttgtgtgcggcagcagttggcgtttgctttgcacttcggaacctgttgcgttttgacccacggaggtggaggagtaactttttgacatgttggcctttccagttttgttggaagtttcatggtcggttttgtttttgtttctcattcttcttcctcgcccctcagccccccaacccccaaccccctcccggtccgtgttgcatgcacgctgttcaaatgtgaggtctgaaatggctggcacacgg

SEQ ID NO: 1885447 - DNA, 4001 bp, Homo sapiens; identical to SEQ ID NO: 917453

SEQ ID NO: 1885448 - DNA, 4001 bp, Homo sapiens
catgggtactgggggttaggacttcaccatcttttggggggacacaattcaatcaaaaacgtataccatgtttgtaacaatatgcaacgtgtacccatatggcagaagattttgaaagaacaggcagaaataacagtagcattgttagggtggtaggaatgtagagcacttctcctcccaccccgtacctgtgtacacacagcctttccctgctttctgtaacactggtttttgttgttatgttaaaaatgttttaattttagcgttcttttgtcgaaaagcaacaaaacctaactctggctgtcttaagcaaaaagggaatttattggaagggggccaggtgtgcccagaattgatgggatggctggggaaccaggctagggaagggatggcatccaggctcactcctgggagtggaggagccaccggaaggtgtgtgatgggagactggccatggcactgtcccaggagctagtgaggtatccagtgagcactttatctgggtatccagtgagcgctttgaaaatacaaaacatttaattaaagaccctatcttgaagaagtgtatacttatttggggaggagttataataaggagttaacttattaggagttagtgactgtctttctgtcactcacccaggggttcaggtcccaggatggaagattcagctgtccgagcttaggtgatatgtccaccacctggtggtactggaacaggaagaagggtggggtgtctgtctccagggacccttgccttctatatgtgaagacaggccaagtaagtatttaacagagcagacagtactataaagaaaaataaaacaggatagagagcattcatttccaaagagtgttattctaatgacactctaatgaacaggatgcacctgttccatgaaccctctctctcttccctagaaggagacacccagatcctcatcagtggcagcagacacctccaagtctaggacctcttaggataactagtcctccagttccatgcagtgcctcttcagcgttgattaactagaggcagatttaagcaacacatccctaccagaatggcaaggcagggaaaggaaggaaatagagaatttgggatgctgtggagaataaaacgtcatgcaaagtttacatttcagcatttgaacagattccataagtcaatatgtaggatgcaccaaggcaccagtgacggccctgcagaagatgactttgggtaatgtgaggagtaggagcaggtgggggagatagcctcctctccaaggaggtgacgctggggacaggtgagtaggaggcagtgaggcagagatccgagggaggagaagtcctagccgaaggagcaccagaagcccaaagacaggcaggaaacatgatgtgtctgaggttcagcaaggaggccacagtgacaggagctcagggagcaagaggcagacgaggatgttgcaggctgggaggtgggctgaggctggaaagggctctgcaggtcatgaggaggctgagcttgttctaagtgtggtgtgaagccattggcagcaggagcatattatgttccggtttatgcttagagagggagggcagtttgtggggggaaaggaagaggaatggagattgatttgaaggcgattgcattagtccatttgagaaatatggtagcagtgaccacaaaagccatccccattttccgtgggtgctcattttcccagtggtacgaagaggcaaaaatggccagccttggttctgattcactgtggccaggactgtgaactctggaggaagtacttctcccttgggcactaaattcagtttcaacagagcagagttcctaggtgggaagaaaacattttgcaagtatattattaagtaatcctaagaagccgcttctatgtttacccttggtttccggccctgcatcttctgctgtgggccagcctctccaaattagtcactgcttcagagcttgcgtcccatccagggcagtatggcaacttctgggtgtgtctcccagctgcctctgtaacttcatttttatttggttgttattgggtgtgatggggtcatgtgcttccttctctgtgacgttctgggcctggatggcgtgtgagatgctgcgacaggataggggccttctagaggatccacagagtgcaggaaaacaaatccaagcccagcataagtggcccttccagtagggacaaatcaccaccccctctattatgaaaaggccccactgcaatcagctttccgcaaggggctgtctggttcctgcggggaaccgtatcatcagctttgttgaggggaaggcccagacttcctgtggtttagcccaggcttggcatccatttttgccaccatggcctttttcttgcttgcttctttttttttttcctttttatgaacccactgagcaagtatcaagatgactaggaaggaagactggcatctagctgcacattgggacagcatgtccacatgatgattgattagcctctcttgcaataaggattcatgtaggatggacatcatctcatgctctgcgggtattctgaggtagccagttatactccttccccaaacccatcctcagcccatcttgttctttccacattcctccaggccattcagccaggccattagctcctaaccaggagtgcgcacgagctaaatccttgccttgccaaagccatctctcctactcagaaaggcttgggaagagtattgcttacatttgccgccgggagtttccctgtcctgaggacacagtcaccaggctgatggtaggagttctctttgagaagctaggaagaagacttgtagtaggatgcctaccctgaggctccctggctctgctccatcaagaggcctgagtctgggagttgagtgagggccctcccttgtcttctctgtcatggtggctcaggtcgggctctgcttgccagccctggagagttcctcctacacaatgttgtggtacctttgtggaatcactcatctgttttgttcctggggaccccgagatcagttaacagcacaaccagagatttcacaggtcaaaccattcagatgaccaagctggccctgctgtgtggtatagtaactatgcccacctttttcccatgacagatgtcccacccccatggaggaccaggtttgcattgcagtggaaccatctctcagcagcatctctggcctagagagattagcagtacattaattataaaagctgctgtcacatgggagatgcagcccaaggggtggtgagactcacatgatagaccatctctagcatttccatcccagtcctggaactccttcctttctatgcactgagggttttaggtttatataccaacgaagtgctagaatggcatccagctcagtaagcccacaaattgagctcagcaaaccagctgtaaaagcatcattttgagacacgttggggagattttcagatgaactgaatatttggcaacatgaaggaattatttttaattttgttagttgggataagatagtgcagttatttttaagtccttgtttgttatacacagatagtgaaatactttctgcataaaatatgatatgtgagatttgttttaaaatactccaaaaaagttggtgggaaatagttgaaacaatattggcaaaagactgataatcgtgggttcatggtattatctgcttttgtgtgtatttgaaattttctgtagtatcaacttttaaataataatgaaagtatatttctcctccctggtcaagtattctcaaaatcttgataaccaaaggttggtaaatggatataaaaatagagctagacaggaagaataagtcctactgtgccacagttaatgacaatgtattgtatagttcaaaatagctagaagagaggattcaaatgttcttaatacaaataaatgataagtgcttggggtgatgatatgctaattaccctgatttgctcattccacattgtatacatatattgaaatatcacactg

SEQ ID NO: 1885449 - DNA, 4001 bp, Homo sapiens
gaaattctacatgttttaaacacattcatctttatggctgttggaaatttaaaaaattctatttaaatgtatgtactttttaaatgtaaagaagtagagtagatgaccaataaaagatttcctttctttttttggtgggggccagggggtacagggtctggctctattgcccaggctggggtgcagtggcacaatctcagtcactgctgcctctgcctccccagctcaggtgatcttcctgcctcagcctctggagtaactgggactacagatgtgtaccaccatgcccagctaatttttgtgtttttttgtagggacgggtttcgtcatgttgcccaggctggtctcgaactcctgggctcaagcgattctcttgcctcggcctctggagtagctgggactacaggcataagccaccaagcctggccaatatttgcaagactaaagaaatattgacatacaatttcacaatatggaacggaaatatgagttcaagaagaaaagaaatgatgtaaaatttccttctgttaaaagcttgttcatgtagttttaaaaattgatgattttagatattaaattggtatttagattccactggctacatttaaaagttatataacttttattttaaaatgttaatttataataaaacagaagttgcttcttttgtaactatttaagtcagatgagaaattgtgatggtcaatccaaaaacgtggaagtgagaatacagtcatagtctttggggactcctttgggggtataagagcaaaatcattttgaaaccactgtattaatatattcctaataggttttgctttttgggatgactgactgctacctttctgagatttgagggagtcacttaactggtcctaaggccaggcgcggtgactcacgcctgtaatcccagcactttgggaaactgaggcaggtggatcgcttgaggtcaggaattcgagaccagcctggctaacttgaggtcaagctttcaagaccagcttggccaatatggtgaaaccccgtctctactaaaaatacaaaaattagacgggagtggtggtgcacagctgtaattccagcttctctggaggctgaggcatgagagtcgcttgaacctgggaagcagaggttgcagtgagccgagatcatgccactgcactccagcctgggcaacatagtaagactctgtctcaaaacaaaacaaaaacacaacaacaacaaaactggttctaaatgctccgggcaagtacatactgctttttcttttttctgtttttttttccctaaggcagccctattgaagagtctgtcatctacaatattttactaatttaaaaacacttgtcaagaagggtaaagtatgttcatcttgattttactctttgtatcccggaatcaggaactaacagttttatgatagtgatatagactttacacacacaccaagacttaaaacacgtggtgcaggcgggcttttggaaattaactgtgctctggatacagaagtcacaaagctcaggctgcagagacattgaggggataatcagcctttattgtctctcgtgcactgtgcccagcgctccctctagcggctacaagcgctcactgcccacactctctactaggctctccggaggcctcggtttcgctggagagaaagagattgcgcaggcgccgagcagccgacgtggccgcaggggaccgtgcctgggggggtctgcgcggggccgctgactcgcgaggttctctgtcgcctgccgccctcgctccttttctccccttctagagtgttacggtgactcttgggtccgaaggggacggacgtcctcccacgtaccatttagaaggtcagagtgggcagaacctagtctgagcaggccggtgatgaatccgctggcaagacgcgcgcgtgggtactcacgtgacctaggctgcggcggcggcgtgctgcgggctctgtggcgggagcgaggccgacgggcggggccgcgcggccgcgtgacgcgaagcgttcgagagcgcgcgtcgtggaacgtcttggttgccacggcaagcgcgcgcgcgaggccttgggaacctcgggaccggcccccggcgagcgcagcggcgcccagtgtaagggagtgggagctggtccgtgccgcggcggccgcgcagggagctctcgaggcaacgccggggcgcccgaggtctggaaggcgcaggtggggcgcgggggagttcacccctgcgcggtcccttgggtgggcggggtgggcgccccaggccccgcggactcggctgggaggctgagcgggcgacggtcacgggacaagggtggagggggtggggacctcatccgagtctcagagatggaattttcgaggaagggagcgatttcgagagagaatagtttgagaagttgttctcagtcccttctctcgcgggagtgtggtatttagggaagcttcggcctcttaacccatggactgttaggatggagggaatccttcccgctcgattcctatcgcggagtcctttcggagcatcgctattgatcattctcgccgccccaaccccgttgtttactttggcttcgcagatctctgtggtcttttgccctcccgcagcgcccatggccccgtcaaggttgggcagcctttctctgcaagaaggcccacgaacaactgcggttatattgggatggattgcgcgtgattttactctttacaatacattctttcatgcttcctagggattgagctgcgcggcggatccctccgacttaattctgggcctgagaaaagtttctcttggaatgcgcagtttcgtgacgcagcattattgcgtgactctagggctgacccagtttttcactttctaattgtaaggaagtgcgctagtagtccaccgaggatcctcgaggttggccttattgtatcataatttaacgaatttgcgttccaggttgttacagcctttgaaataatggcctcatatttaagaatgtagcaatttttctttgaaatttccgaaagtggggaaaaaagtaatagaagactgcacctatatggaattattttctgattcgcagttctttataatcgtagacttaatttggtggctttattggacctgtttgaaacaggaagcctttctgtaatgtggtttcgggtcggcttcacctctggcactctctgaaacgtcgttgtctatggtttccctaagaagctagaatgagcgggatgctacggagggaggtgtatacaggtgttagacaaagccccctccgcttttttggtaaagggccaaataggcattagatcaacttgtgctagctctaaggagttaaatgcggtattattaaagactgcttgtaatgttgactgttaagtgagagtgttacttctttcagtgtttatggaatcgaactaaattgctaggtattttaatgcagaattttaccttttctcgggtattttttaagacatacacagacatacatgtagttatgttgaaataaatgtgttttattagaacgttaaaaaattagaatttaggtgaactactggtatcggaacagattttggtttgttgttgaagactgtacactggtgtaggtactgtttaatacatcagattgtcatttcaaagactttgtcttcttaactttgaaaattaaataatgtgaaataatgtgataatggtttttatcttttcaggacacttgattgacacttaattgtgcttaggaatagaataggcttttttttaagtcaccatcctccaatccttatttctgtaaaatgtattttctgagaccgctgaggatatagcaaatcccagtcacaaaataaaaatgtgatattttaatataaacctttttctttctgtgttgagattccccagagattagactgaaattgaccattagacttatatataacctctagatacccaggctcttctctcgtgtatcctttttttctctttaagatggagatgtagcaaggaaggtt

SEQ ID NO: 1885450 - DNA, 4001 bp, Homo sapiens; identical to SEQ ID NO: 917461

SEQ ID NO: 1885451 - DNA, 4001 bp, Homo sapiens
aacagagaagtctagtaagcagctggagatgtcagaaaatgatgaacaaagtataactagttcaaactaccaaaggtaggctgaggacagaccccttaccatatagcagctggtaaattaataatagtcttcaaatatggtggtgaacaaactgtcttcattgaaaatgactgattactaagaaagttgttgaaaaggtaataaaataacactacgtacatccttctgcctaaaattaggcccagttttatttagatgaagtacaatgtcctctatatctcatggacaatgtcctggaatcacatcgcttactgaaatactttttgaaatatatgtcctcggatggagaagtggaatcaaaagagaaaacttcagaatctatgctatcaacttttctttttttttatcctcaaatgagttatgtttgcctcgcactaataacttttatttcactcaaattagagcaataatcttccacacataagtatcttccctgcccaataattcaaagaaaaaaatccaaaatgattagtaaagaaaaatataagaattaacagaccctttaaatttgttttaaatattttgaagatttaaaaagtgtttaaagtttgtaattcctagtaggaaaacattatctgaatgaataccctaatggcaaaccactgtaaaatgcttcagctgcatttgggggagaggggtagggattatcttcaaagcaccccagctctcttgatgagaaggtcagaggtacattggtttgtattattgcgacatccataatgtgatctaggttgcttttccttcagcaagggctttatttatcagaagggcgttatgcttgacctccaaatttggctgacaatttactgatgagattcataacctttgggttgctctggtactttgacatatttgctgggttctgagccacatcctggaaggccaccataacttctggatcctgcatggctgcaagaacctctggatcactaagaatttcattgagtccaggcattccggccattccaggtatgccccctcccattccagccattcctccaggaaaattaccaggcattcccccaggaaagccacctggaaaagagccatactgagctcctgactgtcatctggcttcttcctccctctgggctctctcatgctcttttcgagccttcttaactcgttctattctttctttgatctctcactcttcacgttttcgctcatactttctctgatgttctgcaattttctgtgccctaggttgaacttctttcagcattgcactagcatcttcatcataatcgaatttacaggcaagggcaagatcatgggctgcttcttcccagtggcctagaagtctgtgtgctttcccccgcctcttgtaaggctgagctgaatcaggatttatttcaatggctctgtcacagtctcggatggctgcatttggcttctgtaatttgacgaagacactggccctcttggcatacaaaatggccaagcgaggattcagcttgatggcatctgtgaataagtcaatggctttctggagttcaccatcatttagggcttcaatagcagccacttttttatcatttgcctgatccatcacctcctctgttatctccgcattttcatctcccatttcttgaggagcatcagtgtctggttcaatcacaccttctttatcaatttctagatcactttcctcacttgatggttcgtctgcctttaagtcttcctccaccttactatcaggtttttcttccttggtattttcttctgatttagctttctgagtagcagtacctcccatgctctccacccactccctcaggaagcgcatttcctgggtgtgcagaatgcttggatccttcttacacattttcacaaaggcccgaagctcgttcactttgcgggggtccatggtagggagatggtgggcgaagccggggggctgcggcccggttccaggcccaggcgctggctcggcgtgacagcgcagaagggggcggctgcctatgctatcaacttttcaagccaggtttctcaatccagttttctgaaatattcaacctgaggttgcctagtctagtatcaatatgcattcattctaacaatataatgtacaaaggactgtaaataccctatcctttggtgatactgtcattcaacaaacatgtactaagagctcactacagatccagaggcagaattaagagtgccaggaatgcaaagaggaatgccacatatcccatgccttagaaaacctcacagtctagaggggaaaacagggtgaatgaagcactgaccctgaccgagcacacttagaacctgatccaggttcctggaaaagtctcctaatacaaatgctcacttataatgtttaccttagtttttagaaagatttgatcatattagtcgcttgattatagaaaaccatttttttgttttgttttttcattttcttttgttttgagatggagtctcactctgtctcccaggctggagtgcagtggcgcgatctcggctcactgcaacctccgcctcccgggttcaagcgattctcctgcctcagcctcccgagtagctgggactgcaggcacgcatcaccacccccagctaatttttgtatttttagtagagatggggtttcaccatgttggccaggatggtctccatctcttcacctcgtgatctgcccgcctcggcctcccaaagtgctgggattataggcatgagccaccgcgcccggccgattatagtaaactgttaaatccaattgttacatccttggatacatatgtaatatgtaattattataattattactttagattatagcgagagataggcagttagcaagaaaggaaggaatgagctatcaagttaccaaattattttgaagttcctccctacttgaatttttaaaactttttctttgattaacccacaatcaaaaacactactcagtccctccagcttttgcaacttttactgtctatgttcttcaatccagcatgtaaaaaagaaagattgattcattctatgaactaattatttcattaatgtatcctcagatatcatgtcggctcctcgaggataagaatcacatcttacttttcttttgtgactcctatgagcctagaatggttcttataaatatttacttaatctaattaaaataaattatgtgctttaaaatcctattacatcatactgtagaacactgccaaatcagtaattaaacatgccatccttgcttagtgccaaatgattttttcattttttgttgttttttaatatccaaagtgttacttttctttctcacagctagttcctacaactctggaatttacagtattttcatatttccataatgacacctgctggtaggagaagaatggatgaactgcagggattttattcaactacttataaccagccattgtccagtctgaaacaactaatgttcctgcatatacaaagagtaaatctcaatgactccaaatacccaagtactaaaaatttgaaagaataagacaagtgctgtttcagtactattttccaaccagaattaaaatttattcccataatctctgtccaaaacaaaattgctgcaattaagagtagttattaacaaaggcctcaaaattatcaattcaattctgttaaatattttactccatttgtaaattggcatttaaatatgactattaaagagattatcattataaggaataagttctagtatttgatactacagtagggaaattatagttaatgataatttattgtatatttcaaaataactagaagagaagaattgcaatgttcccaacacaaagaaaaaataaatgtttgaggtgacagataccccaattaccctgatttgatcattacacattgtatacacatatcaaaaatcatatgtaccccaaaaacacaactattaaaaatgaataagaaaattttaaaacagattatcattctctgaa

SEQ ID NO: 1885452 - DNA, 4001 bp, Homo sapiens
tgccaatcgtccaggagttactctgttggcagaatgttgaaacttctgttgttcagatgcagacagttgccaaatttgggttctgtaactttagcttaagtaaataaaaattcattttttaaaatgtctttccctctcccaccttccccaatcatcagtgctttaattcttagcaaattttggacaatggtcaactcttacaatgcaaaattcctcatttcattagcaaattaatcatgaacacagaaacacaagttagaaaaaacagtcactgctagtggtcttaatagtatcaattgatgacctaaaacagatttaaaaagagaacaaatgataagtgggttttggcaaaactcttatataaagggacataaatagatggagatttagtggagacatgtcattaacaagagtacacactttctctgtgtttcattagctatgacaacagggtagtgaggcaatcaagaagacttaagaagataggagaacctgaacatgcattgcacaccagatatttgaatgatctaaagaccacataaaaaatatttgccgtctcccttggagcaattgaaatatgattttggtatggggaaagatactatatattaatttacattccacctcattacctagaggatttgaggtcatttatagaagaatatataactaaagattgcaaaaaagataaatctgatgaaaagagaaatgttggccaattaatgaggtaaaactaggaagatatatcacatggaaatataaaatgtaaggccttgaataataatcaaaaatgggctgcaaatttggcttgagcttccctgatctaagcaaagaggaaaacacaaccaagggaagattttccctgttcttaaggtaagaacttaccagccaagattttcctgggacttgctctttgggagaattttctcccaagaacttgacctatgagaggaatttctcatacaaatctcataaagggaacactgcaagctatagtgaatggtgccttcaaccatgcctgctgtgaattcagtagtgagtctcatttcttataacatcctgcagtggaaatgggggcgtcacaataaattatagtccagtagaaatatttgggtgtgggtgggtgggtaggtaaaaacgagaggtcaggtatgcagtcttcagattctctgtcttaacctagaaatagcatggagattatccacaggcaatttctataagtctgcttcacagaacactaggcccattagacagatattcaagggagaaaacatttctgtggttaagtcatttttggaaatgctacattccctttcccttggaaattcagacttatgaaaggctcaggaaaatcttgcacaaagtagtttaactgtgtttaaactggtatatttcatcttgaaaccacttttcacaggatactgggaagtcacatattgcaaaaccagctttccctggggaacacattttggaaatgctgatctaggagagtatgtggcctacgcttcccttagataattctctctgaatatacttcttgcatagatttggcagtagatactttgaagttgtgttttggagaggaacattgcaagtattctatgttttccaaaaaggccagccacaaatactttaaaagtcaactgagtaaaggccagatgaccatctttttatgaaaattaacaaccacacaaagattctatcttgggtaggcagaacagaaagctgagtcggtatatgggtagagttaataattataacatcaagaatacaaccattcctcaaataactctacaagataggtactgttgagccagaaggaagaaattattgccttctagctctggctttgtcttaccataatgtagttgaagtcctgggtgaggtccaaatggttctaacattaatgtagctaattcaggatattccattactgctgggaagtggagtcactgccccacaggaaagaagcaagaaactcttcagaagtcttagagtctcctttgccgtgggtgacatgggatatggactcactgaagctcaggcactgatgggtggctccgagaatttctgaattcatggtccaaaaatatctttggttatataaaggctctcctagtatgacagaaagaagtgaatgaagtaaaattatgtagataattctaattagtaaaatctgcttgctttagttatggagacaacttatcaatttccaggaagtctacaaatatattcttcagatgtttttcctcctgctggcaaagagatacacattagcattcacattatgaatgacgcttctggagagaaatcacacaacatccaaaaactccaacagaatgcatagggaattaccatactgcctagcccaagccgccacactgtgaagtcactcaagaccatggtggtcattctggactggtgcagtctagggaaggaccaagtaccatgaaaatttatatactactgtttgaaaagacatgaattctctctcttttttttttttcagaagcttaggatctaaaataatctaaatggagaacttggaaaataacttcaaaattacagaaaatgctaatgctgttagcaaaagaaaatcaatagaaatagatctacagtgtctggctagactgtcaaatgattttcctcacacagcataggaatcctgagaattttaaaggtctgacagaggcagagcttactaaaatacaaatgatttgtgttgctttgcctcctaacagttggataaaacacaagggcgaaacaatgcagagagattggaaaggaacttggcagtcaccaagtacctaatttacatgtcaggatttcgagctgaagtaggcattctcttcctgcattccaactctccccttcctgcttacttctgaaaatcatacatatggacagcaggaacctttgattagtattcaatctctatgagtgaacagtagcatttcatatacatttatattcaccaaacgacacactggatacaaaaagtatgtatagtcataaaatcacattttcctctgagagttataccaccctgaaattatgtataatatgtaaaattattataagaaataagaacgattcacaaatcctgcgttaatgatattccaacgattctcactcaaatagacggagttcttatttgagaaaattaaagaatcttctccagatgctttgagggacacaacacatttcccactacatgcatttctcaaaatagagtgtgaaatccatcgcaaggcccttactgtctggacttctgtaaacccatgcgttatgtttaacaggttcttaatcatcaaaccaccttcattttcaccattggtctctttcagataggaaagtctactgacctccttccctgaaaatttggatcctcatattagcattccattccacttgctgtacttttagttggaaggtctaaggcagacaaagctgcttaaatatttttatcactgacttcctagaagaaggaggaaaaaatcttggcaagaagaagggaaatcagtcttgcagaatatcttgaagaagcctgcgaaggaattccactgactgtgttcattatctattggtcccaatactgagtggaatttttatgtgttatcactggccagggtggccaatccattggagttgcctggagcagcacatgacatggtagcacggggtgtacagagatgggtatttaccttgtgccttcttctgtgccaatcttccaggagttactctgttggcagaatgttgaaacttctgttgttcttaggagcaaataattgaaacatgttggttgaatttcaagacaccttttcttctctttttcaaatagccctgtgattacagatagccttgattcctgtgggatcaagaatgtcttagggatgttgtccatcaacccaaactccaaacttactataactctaatttagagcactttcagggctttggagtcatgtacacgtgaatttgaactctagctctacatcatc

SEQ ID NO: 1885453 - DNA, 4001 bp, Homo sapiens
tctcaaaaataataataataataagtaaaataagatggaaaatgataatgaagttcattatattaatattctttaaaagcaacttttttttttttttttgagacagagtctctctctgtcacccaggctggagtgcagtgtcatgatctcagctcaccgcaacctccgcttcccaggttcaagagattctcctgcctcagcctcccgagtagctgggacaacaggtgcataccactacacctggctaattctttttttgtatttttagtacaaacagcgtttcaacatgttggccaggctgctctccaactcctaacctcaagcgatccgccccacttggcctcccaaagtgctgggattacagacatgagccactgcgcccagcctaaaagcaacttttatataaactagatttccaaaggaagcactaggcctaacatgacaattaagaaatgtaaattcaaagtaatagctatctaatataaggaattatggagaaaaattctcactgcttcctgtaacattatcccaaaactgatcccagaagacttattgctggtatctaaaggtctatatatttagattcaaaaaacatacctggaccccaaaaggccttacaggacctggctcctagtttcctgtccaaccttacctcctaatcaaatgggccctctaataaaaaagggcctttttgctgctccatacacaggcccacttcattcctacttcaggatctctgcactggctcttggtcctgactggaatgctctttccccagaggttccaagctaattctcttgttccttcaggtctctgctcaaatatcaccttaacagagcctctagtaccctgtggcacatttcttataaaagccatagctagaaaagacgctgtcttgcctcaaattgttaaccttacttatgttagatcataacaacaaaacagggtttcctttttttctgtgctttaaagcaaaaagaaacaaacaaaacaaaaaacaaaaaagatctcctgttaaaattctgtgacccacagcatcatttatctttagcttagtctcttcttcaactcttatcaactcttgctcttttacattcctttacagctttatagtttgtcttcactgcacacctacaagcagtgatctctaggttagctaagtatataactaagactaacccatagcaatgagcgcctttgcacacagcaactcctaaaaaattttttgataaataaacaaatgagtgaataatgaactatgacaagacatctggaaagtttccgggacgtgagggaagaggtttttgttccagtagactgacttcataccgacacttttacataagaatggcaacaatgattgtcaaaagaaaaaattaattttcatcgagcccagagtccacttttctcttctagtcattaaaaaaaaaaatcctttcagcccaactgcagatgccaaccatgctcccaataaatagaggaagtttttctcagaagcttcaggaatgcaagagtctggaagtggaaagggcaagacaggagtctgaggtaacgcggctaccgtgagagagagaaaggagaccgagaatctcaatactggggctgagacgcagcatcactagagcctgagtcctaatcaggcggtgctggaaggaggcgggtcagccgggagtggaggaagcagaaaaggctctcccacctctaacgccgcctgggggtcctggtcgattagagcatctgagaagctctggaaaaacctgtcaggaaaacaacgacttcagcagggcccactaaccaaggaaaggggtataaaataaatagcaaagggaaggaaaaacacgcacctctgggatgctgcaggtcctgcggcagccgccgccattcctcgtagtcaatgttgctgccgccggagctgctactatcgcgctcagcagctccgccaccgaccaagggggaaaacttctgcagaaacatcaaccgagcttccgtcttaagcagccaacgagcagccacgcagcgtgctgctagcgggacgggaggcgacacgcgggcgcgtggccggctgggacagtggaggaccgagtcctcccagcccgcaacccggcccgggacctgcgctcccagtccccgcccatcgtagccatgtttacggaggcctgggcctacaggttctccctcttttccaccgcgcccacgtccgcgggcactccgaccgagcctccaggagtagtagctcagaagcacttttgtaacatactgttatccctcaagaacgtgtacgcgcaggggcgtttccttgtccgttaataacacaagctacaggccgagcgtggtggctcacacctgtaatcccagcactttgggaggccgagacgggtggatcacgaggtcaggaattcaagaccagcctggccaagatgctgaaaccccgtctactaaaaatataaaaactagccgggcgtggtggcacgcgcctgtaatcccagctactcgggaggatgaggcaggagaatcccttgaacccgggcggcagaggttgcagtaagccgagatcggaccactgtactccagcctgggcgacagagcaagactccgtctcaaaaaaaaaaaaaaaaaaaaaaaaaaaaaaaaatatatatatatatatatatatatatatataaaacacaagctacttcgagctccgttttccctgggttttatcatggctttcgtctccgtgatgtcactggcggctgcgtggtcttttcagtgaacagaggggcctggatggcgcctggattcccgcgatcattgcgctgggaatggaaaagggctgggactcgctagaagtcgttctgacctagcagcggctaaaagccttctggtgcccggggagacgcgcccggcgcccgcgtactattcattcccttcctcataactccacagcccaggctttcttcttagtgggcttcccagatcaagaaggaaaaccttttctatacgaaagcactgaggggcggaaggtggcctgaagtgatctcagggccgctttgtttcccaacccagtcgttcaggtcctccctcagcgccctttgacccatgcacatcccatggggaaagctgccagcgcgttccaggggtggggtcagattgaggagctggagggagtggtctttatctgactttataccactaccaaactgtgttaattaacgtagctttataataagtcttgaagtcctttattctcccaagattgctttggcttattctaaggccattgtatttctaggtgattttggaattagcttgtcagttttaaaaaaaacaaaactgctgggacttgtactgggcttgcattggatctatagatctgtttggggataactagtatattaacaatattaagtccttcaatccatttaagtggccgtttatttaagtggcctctaatttctcctggcaatgttttgtagattatacacatatttatactttaatgcagctgtgtttggatagactgcagtatagagatcaaacatatctttcattagatttctttttgaatagtgttttgaatgcgatgttaaatagcattttttaaatattctcgtttgttgtaagactatagaaacgctattgatttttacatattgatgttacattcaagcatcttgctaagttcccttattatttgtaatactgtgtagagtcttttggaatttatgtgatgacaatcttgcaatcgtgaataaagatggtttaacttctctgtaatctttatacgttttagttttgttgctggctagtatgtccactattgaatagaaatagtgataatggacttccttgtcttggttgtaacatcaagaggaaagcattcaatatcaagtgctttttctgcctttattgaaatgttcatatgtattttttaataataatatgttatatagtaattttaaaaatatttttaataataatgttacaatgtaaccaattacattggttaattttcactt

SEQ ID NO: 1885454 - DNA, 4001 bp, Homo sapiens
tacactttgaagtagaaagactataaaaggaatgaagatcagaatagcaacaagagcaatatcttagatttgtgtgattttacaatttataaattattgttagaactcatcatgtttacagcacagtgaggtgggtgctggtattctcatttacagataaggagaccagggatcagggaaggatttgcttacccctaagggcctgcagtgacagaaagatcctttggctctctatttggttcctaccgcaccatttcacagcttgcctaaaatgagacaaattgtaagatattaataagaattcactttcaaaattctatatacttgctgctctattttaaacatatatttctcttaaattatgctatgctaattagctctaccatttccagacagtaatctgttattgggtgctactttttaaatttagatgccactactaaatcctaatttagactcattccttttaataacatctatgccttctaatgtgttccaccctccattgcttcaaaacatgagagtttataatgtgttatattcattccattatatggatagaactctaccttcaggaaattctagtttagctcttcattttaaagacattccttgcacatatatttgggatccttaccttgatgctttttctgtctcctttgataaattcctcctttgtcacactgcactgtttctctgaggtcttgtattagaatagccccttaagaataaggaactgttgtaaattgctttgtaaacaggttgccagccaactccaaaatgtatttcctgtcttctcttttcacccaagtgggtaataactgtgttgtaacctggagacagtcagtagttactaaccacctagtatgtcaaattaccaggtaaggttatccagcaaaaggggctcactgcactagaagccaacactatgacaccaagtttttgagaaaaggaaagcttcacattgcaagttaacttctgaggaaacaaaagtccagttcaaatctgtcttgtactggctttagggcagtaattttattacaaaaggtttagggttggatcctggggttagcaggtgattggtggaagcaaagggaacatctgggaagtcttcaggcatgcatggctctctcttcatgcttcctggtgggtcccatgtgcaaatttggagggagttggtatgaaacatgcagtagaaattcaggctgtgacatcagcaagcttgctgtgcgcaaactgcatttggccatattgattccggctgatttcagtcagttttgttataagcagagggagtttcagcaaattgtttcttttcttatctgcccctgaaaacaagaatttctgttagttattggtgtctttgactctttgaaacagtttcagtagttcccaagatatgaagataaaagacccccttcatcagtgaaaactcttacaaggggatgaaagacacagcttcctctatgagagcacaagaacaattaaattgaccctcacaaacactatggttggtgccaggaacgtggcctggtgaggaggacagtgtcacatcctccctgcccactcctgtttccacgcgtgcatttcctcttctgcccctctcctaagccaggatgacccttctgaccgcgtggaactatcacagaaactgcttccatttataccagatgacttgggattcagtcttcttgcttggtttttattgactgcaaaaatccatgacaactttgcgcacatttgcttaagctgaaagcaaatggatgaaagtttgtagttgaaaatctactttctcttcaatctcttccctttttgcttttcttaggaaacatacaagacagtggtccggaaagctcactgcaagaactgtacaaataatgtaaaagtaaggcatccataagatcaaagccacatttctttgctctctgcaccccattcccgcgccggccaggttaagcctcctgcgtggccagcaccccttggcaggggcagaactccctggaacccgatccttgtctccatggcgacgcgtcacaaagcagcccgcggctcccgcaagcgctgagatagctggagccagggccccgcggccgcctcctggggcagaatggaacagcctgggcccagggctccggatccctctctctgccaccacaacctccagccaagtaagacagcagactctgccggtctgcggggcggggctggggtctttcccggggaaagggtcctgttgagaaaaaggggccttagtatttaagggtgtggcatcgctcttaggagtatgctcaactgaggaaaagacggggagtcagggagaatgacagggccttcatgacgctgccccttttcagtccttcgcataacctttgccaaatccccgctccctaaaacgcgcagggtttttaaacactcgaggaagtgcctggctaagaggggacaggaaaaaaggaagaactggtgattttccaaggaaaacagggccaaaggcaaagaagaaagagaagtcctggaagctctgaagagaacaggtcctgcctgagtcccgatccccatataggatcttggaaacagcaaggaaagtgggggaagggttggctgctgaatggagtcccagctgtgtctgcagaggcagacgccctccctgggctgtcgcaccaggctgggagccatggccttcagctgccgcctctaacctgaattgatttttcttccacagagattttgtatttcacagaggtagtgcttttcatcctaattctgcccacagatgcagcaggttcaccagttcagccttttgggtctgtggagggagaaccactctagctgtgacgctagtggcatgattaccgtgtagtcagctccatcatagtctcttgtggcaataattggccattgctgctgtatagttgggtaactgtgattccacagtggctatggagcagtgaaggattgttcaagtacaaattccctagaattgtgctcccaaaagagtgaatgaaatgcatattttcattccaattcattccgttgtaaattaagaatggaaaatgaaaatacttaattagtgcagaaaatatctaatacactcagtttctatatgatgggaaggcaaacaggagagacagaggagggaggatcccctcctagcatcccgacagcacccctttggatgcttctcttccctttctaaccaccctgttttcccactgtctccccatttcatccccttcttgtctgggaactgttggagtcccccaggattgatccttctaggcttaccttctctttgtgaccatatcctgcacagggcttcaagtgctgcataaaggtgccaacaactctctaacctttatctctgacttggactttcttcctactttttcagaccagaatatctaactgtctaccagacagttccatgtgggtgtcacagcagggcctccaacttgacatgtgcaaaatcacactccttgtcctcctcaaaccttccagactttgagagttcagttaagagggtcctagctgctcaatttagaagggaaggcagcttccttgagactgcagtttgatcaccaggtctctttgattctgcctccaaagctctttttcccccaggtgaattcgcccctttacctccaggcttgggcctctaatggctactctgtgccacttcattccccactgctgggagagtcaccctccaaatggtaggcttgatgtgtccccactgcccaggtttggtccgaaataggatgaggttgatggtgactgatgactaactgttattgaataattactacagatggggctctcaggtgttgtattagtttcctgtggctgctatgtgttcccacagactggtggattcaaacaacaaaaatgtatttgctcacagctctgaaggtcgagagcctgaaatcaaggtctggacaagtctgcactccctctacaggccctaggggagaagtggtccttacgtcttccagcttcaggtagcc

SEQ ID NO: 1885455 - DNA, 4001 bp, Homo sapiens; identical to SEQ ID NO: 917478

SEQ ID NO: 1885456 - DNA, 4001 bp, Homo sapiens
gctccacactctggacgcattttcgctacagatgtatctcaggcagaggcagcatgtgcggactctttccaactctgtgcggtaagtaggtaaacacatcaacagcacctttcactcagttacaaaacgatgcacggtgggaaacactaaagaatccagctggtgtttcagtgactgacataaccaagcacggtaaagaaccgcacaccaataaaatagactaaatttctggctttaaaaaattttcaaaatattctatagtttcatgacaactgcaaagcaggctaagtagcattttttaccagatttcataaatcaggaaatctcatccttctgagaaaaaaagtggccaaaacaagtccttagctcttggtccacccaagtggaattaacttcctctgtaggaagacaggtgccagcaggtggctacagcctgagccctgagcctggcccccgtccagcgtctcatgtggaagccccccaagaaatgcaggattcgctgcggtgctgcaacaccctccacctcaatttaattaaggcgtttatttaaaattatcaattaacacagtcggtaaagataaggaaaaagtcagaaggcaccaccccatcaccacccaactgcagtgtggtatccaaggccacaacttgtgggtggtgaccgcagcttcagagatcagatccttccatctttcaccttcatcccgcttcagacgctttaaaagtctgaaaataaacactactgtagcttatgtgttgtcattctgaaataaaggcagagaactacaaagaatttagtgcgaggcaaacattcgtgtgcagcatgaagcaaacatacttacatcttttgccatgttaccagatccgggaaatcaatgctacaaatgttcaccttcccagagaagaaaaatgatttttctggtaaaaaaaaaaaaaaaagtaaggaaaaacaagaaataagtaagaatgaaaaacgaagtttaaaaaataacacatctcaaaggaaacgcggaccttccttcccaaaggcaccctccatcctgagagcggagctggccaaaccgactcccacactcaggattttcagtcgcctcgccagacggaaatgccccctgcggaaaagtggcccgcgggcccgcagggtcaccaccactacccccaggtccccgacggcccgcccagcggccgagggtggggccgagccccaggagccagggcgcagcgcctccctcccgccgctgcaggggggtgccccaccacccacctgggcacagccccggggtcccggcgcaacgtgcaggctcgcggcgtccaccccagaccccggcggcgcccgcccggctgaccggtaactctgacaggtgggcttccggggtccgcgccgcgcgcctgtcactaggcctcgggccgcctccgcacgaggcgcctcccgcgcgcgccggaaccgggtccccgcgggccgccgtggggcggcctcccctcccccgccctgcgcgctccggccgaccctggccccagccccggccccggccccggccccacctccagcgtggggcgcggacgctgctgtcggccgggagggccgggcccgggacccccgccccgcggtcacctggggagcccctaccagcgccgagcgcgcggggtccccgaggcacaggagcgcgcagggcgcgggagggcgcgggtcggggccgcgcggcgcctacacgcggccggggcaagggatggggtggccgggggtcccgcccgcacccccggctcccgcccgcggctcccgcggcatcccctgcccacccgcacctggctgcccggtccggccgcgcgggcggggacgcggagagggcgcggtgcggagcgcggggcggcgcggagaggcgcgggctggggccgggccgggcggtcccggccgtggcggggtccctgccctgggccgagtggcgccgggacgcggggctcaccctggccgagcgtcgggccggcgtgacgtgcgcgcggcgcggtgacgtgggcggcggcgggcccgctccgcgcagcgcgcctgcgcgccttttcgcgccttcggcgccctcctcctcctcttctgctgctcctcggtctcccgctcctcccgccagtgctgcgcgccctgggagagcggggaggggctgtgcgcgcgtgtccgtgtgtgcgcgtgcgcgtgcggagatgtagctggggcctgcgccgggacgggcagtgcgcgcgcgcggcgtgcgctcggcggccaagggactgtgtttgtgcgcgcctctgactgtgtgtgtccggagagagaggtggccggctgtgtgcaagagtgtgtgtgcacatgggggagcggggccggctatgtgcacgagtgtgtgtgcatgtgggggagcgggagctggtgtgtgcacgtgggggagcggggccggctgtgtgcaagagtgtgtgtgcacgtgggggagcagggactagtgtgtgcactagtgcatgtgcacgtgagggagcggggactggtgtgtgcactagtgtgtgtgcatgtgagggagcggggactggtgtgtgcactcgtgtgtgtgcatgtgagggagcggggactggtgtgtgcactcgtgtgtgtgcatgtgagggagcggggactggtgtgtgcactcgtgtgtgtgcatgtgagggagcggggactggtgtgtgcactcgtgtgtgtgcatgtgagggagcggggactggtgtgtgcactcgtgtgtgtgcatgtgagggagcggggactggtgtgtgcactagtgtgtgcatgtgagggagcggggactggtgtgtgcactagtgtgtgcatgtgagggagcggggactggtgtgtgcactagtgtgtgcatgtgagggagcggggactggtgtgtgcactcgtgtgtgtgcatgtgagggagcggggactggtgtgtgcactagtgtgtgtgcatgtgagggagcggggactggtgtgtgcactagtgtgtgtgcatgtgagggagcggggactggtgtgtgcactagtgtgtgtgcacatggggcagcaggtagggggccgggtatgtcaggatgtgtgtttgtgtgcagggagcagagagtgccggctgtgtgcgcgagtgtgggggggggagcagggactagtgtgtgcaggagtgtgtgtgcacttggaagagcggggccgggtgtgtgcttgagtgtgtgtgctcaaagaggagagccagctgtgtgtgcgcctgtatgcacggaggagagggggccgcttgtgtgcacgagtgtgtgtgcacataaagggccgactgtgtgtggggctgtgcatgtatggagagcaggtgtgtgcatagacgtgtgtatgtggacacacggaggagagcaggtgtgtgtgcgtgcgtggcacagaggcctctgcctctgctggacccggtggcctccaagcccacgacgggcctccgcccagattcccaacaattctgggcgtcctcggtgcccaccggacgcagcctggcccgggactcgggagggaaagcagggacaggaaaactccagaaacagtttcattgcatggtgagcctggtggtcccggagtcttggagacttaatccaccctggagggccccgccgctagggccaggcccgagcaccccagccaagggcgggctaggccagagaagagtccgaagttcagggccacagcaggcggcagaggctggtgcgcgccgagggtaaggaacatctacagaggacttgaggagctgaccaaaggcctctctgcctgtgcggtgtattattacatgacagcccactttgcacgttttatgctgattttggccactcctgcccctcaggcaacgccgcaccccctaaagctctggtcacttggcttaaactgcttacaagttagcacccgtttcttctttgaagactaccagaaacgctcactttctgcgagctggttcacacaaatagatacttagagaacactgatgttcctcaaatggccctatcttcctaggtccgtt

SEQ ID NO: 1885457 - DNA, 4001 bp, Homo sapiens
cgcttgaacccgggagtcagaggttgcagtgagccgagatcatgccactgcactccagcctgggcaacagagcaagaccccatctgggcggggcggggtagaaaataattatactgtaataatctggaaaaaaaatgttcacacagtattaatgtgtgataatcatctcatacattccagaaatgaggtttgagagccttcactgaccatgtgtcatatccatttattttgggatccctttcaccccatttttaacttcctcccagttgcccaatgtcctctggagttttccatccaagacccccatctttttttttccctttcccccctttttagcttcctcccagttgcccaatgtcctctggagttttccatccaagaactccagcttctttttttgggggtgggggaggacggggtttcactcttgttgctcaggctggagtgcaatggcgcgatctcggctcactgcaacctccgcttcccgggttcaagcgatcctcctgcctcagcctcccgagtagccgggattacaggcgcgtgtcgggatcacacgtgtgagccaccacgcccagtccccccatcttcttaaaggggttaatttcttggctcttgcattttgacttttccatcattccaattgccatcctgtgtcctgctctttcccaagggttgcattcttactctgctgaatgctatattattggatttatgaacaattgttaatgtattataattgtctgatactttgatttaccagaatgaacacttctataagtaggactggatcgaacttgttcacaattggaatcttggtgcaaatcctagttctaagggatacaaagcacaaaatatttgcgaaatagaacaagctttcagacttcatactggcatgtatctttgccttatgccaaagatgtgacgatgtgactaaatacggaagttttgttttgctattgagccaaggtcttgctctgtcattcaggctggagcgcagtggtgcaatcatagctcagtgtaacctccaactcccgggctcaagcgatcctcccagctcagcctccctaatagctgggattacaggcaggcaccaccgcacccaattaatttttaatttgtgtgtgtgtgtgtgtgtgtagagacagggtttcagtagttgcctcccaaagttctgggattacaggcatgagctaccatgcaggacctgttttgttttaatacttagtaattgggtgtaaagtccttcaaaaaacaggtggggcaggtgggaaactccctttgtgtgaccctctagcaccagggataaaatttcaacttcatcttaaagcgacaacatacttttccaagaccaagtgcgaaatagtaaagggaagagctagctccgtagccgtccgccacagaatgccacaagctttcaattatgggacaaaattggaacacatggaaaccctgtgcagactcccgtgacatcttccctcctctccaagtcccttcccacagaccttgcgccccacacgattattccccaggggccgagcaggacgacttgggtcccactatccggactcagcggtgcccccacaaaagcgtcccaaaaactccagctggggcagccctggggcagatgctgaaaagttgtcagaggccctcgggcagtcccgagatctaccccaggccagagggcctgaccctccctaaatgcgacgttctcctaccttggttgatactcacgttcccagaaaagggtggaacctaggctggacgaggcgcagggccaaagtttaattcctctaagctccacccagctcccagcacctctccaggcggccccgtggggtagggcggagccgggtccaacgtactccgcttcccccgctccacccacccagggctagggagcgccccgagagttggcctcctcccacgctgcgcgcgcacctccccgcccccacccctacccgctggcgtgcccagtggaacggagccttgtgtctccgcctcaagtccccggatgctcacctccccgactcgcccccgctgtggccccgcccccgcgcggctcttcgtgccacgtcaccgcctgcgtcgcttccggaggcgcagcgggcgatgacgtagagggacgtgccctctatatgaggttggggagcggctgagtcggccttttccgcccgctcccccctccccccgagcgccgctccggctgcaccgcgctcgctccgagtttcaggctcgtgctaagctagcgccgtcgtcgtctcccttcagtcgccatcatgattatctaccgggacctcatcagccgtgagtcctcactgcactatccttactgccgcacacgggggtctggggtgcgggtgggggcggggaaggcgcagccgtcgcgggcctaggggacgccggcggtcttagccgagcgcggaggggtcggtgcccggggctcgcgcccagctctggtgtgctacggaggggcagatcccgcgtgcggccgccggcgcgggaaatgcgggaaatggcggcgccaggcgcacggtgatgggcggctctgtgtatccggcagacgatgagatgttctccgacatctacaagatccgggagatcgcggacgggttgtgcctggaggtggaggggaaggtgagtcggtcgggcctgcgcgtgggggagtccgggccgagcgggctcgggtttcctccgctcccccgcctgaggttgtgcaatcctccccgccgcctcctggcggaggagacgctctttccgggcttgggtttttctagaaaactggaggcggagctgatcctggaaataggcccgccgcctcggcgcccatcctcctcccggggttgtccgggacatgatgcttccggcttaggagcctggagtcctttcgtgtttgtcctgtccccacttaccaaccggaggcatcacatgcccgcaactggaaacaactttttaatgaccccattttttgttccggccaacagacaactcttttaagttaggtcgttttgagaaatccacgggtcacaactttattcccaaaatggtgctttttttattttcagcaagaactaagaatacttcttatccgtgaactattggcgtggaaggtgctttggatgcgtttgtgtcttttgcaattatactgctttttcttaatgcagatggtcagtaggacagaaggtaacattgatgactcgctcattggtggaaatgcctccgctgaaggccccgagggcgaaggtaccgaaagcacagtaatcactggtgtcgatattgtcatgaaccatcacctgcaggaaacaagtttcacaaaagaagcctacaagaagtacatcaaagattacatgaaatcgtaagtgatactggcagtacctagctgatgtctagaatcttacaggatttaaagattggctaacttttgaggttctttcgcagtgggtatacttttgtgaaagtccttgcttttttattaatgagttcacggaaaagagtggttgcttttctataatatgagcatactgaagcctgcagtctgtttccgtttagaattagaatagtattttgaaaatagtcaacaagaaatgtaaacattcttgaaagataccttctgtgaactagtaatttcttaacagctggttgcctttttcagtgttttctttttttaagcttggatattttttactttaaaaattgattttactgaaaattcaatacttcaacctgttaatgaaatgttgttttagaatcaaagggaaacttgaagaacagagaccagaaagagtaaaaccttttatgacaggggctgcagaacaaatcaagcacatccttgctaatttcaaaaactaccaggtaaataccttaagtatctggatcaaaggattgtacaattttaactgcaagagcaaaaattaagttgattaatcttcaattctatactagtattccaggtgtagaaagtggctttcccagctcgcaggtgtttccaaatcttgtcttctgat

SEQ ID NO: 1885458 - DNA, 4001 bp, Homo sapiens
cttcacagaattggaaaaaactactttaaagttcatatggaaccaaaaaagagcccacatcgccaagtcaatcctaagccaaaagaacaaagctggaggcatcacactacctgacttcaaactatactacaaggctacagtaaccaaaacagcatggtactggcaccaaaacagagatatagatcaatggaacagaacagagccgtcagaaataatgccgcatatctacaactatctgatctttgacaaacctgagaaaaacaagcaatggggaaaggattccctatttaataaatggtgctgggaaaactggctagccataagtagaaagcagaaactggatcccttccttacaccttatacaaaaatcaattcaagatggattaaagacttaaacattagacctaaaaccataaaaaccctagaagaaaacctaggcattaccattcaggacataggcatgggcaaggacttcatgtctaaaacaccaaaagcaatggcaagaaaagccaaaattgacaaatgggatctaattaaagagcttctgcacagcaaaagaaactatcatcagagtgaacaggcaacctacaaaatgggagaaaattttcgcaacctactcatctgataaagggctaatatccagaatctacaatgaactcaaacaaatttacaagaaaaaaataaacaaccccatcaaaaagtgggcgaaggacatgaacagacacttctcaaaagaagacatttatgcagccaaaaaacacatgaaaaaatgctcatcatcactggccatcagagaaatgcaaatcaaaaccactatgagattgccattctaactggtgtgagatggtatcattaaaaagtcaggaaacaacaggtgctggagaggacgtggagaaataggaacacttttacactgttggtgggactgtaaactagttcaaccattgtggaagtcagtgtggcgattcctcagggatctagaactggaaataccatttgacccagccatcccattactgggtatatacccaaaggactatcaatcatgctgctataaagacacatgcacacgtatatttattgtggcattattcacaatagcagagacttggaaccaacccaaatgtccaacagtgatagactggattaagaaaatgtggcacatatacaccatggaatactatgcagccataaaaaatgatgagttcatgtcctttgtagggacatggatgaaattggaaaacatcattctcagtaaactatcgcaagaacaaaaaaccaaacaccacatattctcactcataggtgggaattgaacaatgagatcacatggacacaggaaggggaatatcacactctggggactgttgtggggtagggggaggggggagggatagcactgggagatatacctaatgctagatgatgagttagtgggtgcagcgcaccagcatggcacatgtatacatatgtaactaacctgcacaatgtgcacatgtaccctaaaacttaaagtataattttaaaaaataaaaataaaaataaaaataaatctctcttgttgaagccaaaaaaaaaaaaagaagctgcttactaggaactaagggtgacaaatacactaacaggaagcagcagccctcctgtgacctgctccttttcctatgactccattagaaaaggatgcaatgttacctacaaaggctacattgaaaagaattggaaaccctgttaaaagcttctcagaataaactccacaaatgtccgtccatctgtctccttgtatgtttccactgtgtgcatgggttagtggatgtgtttgggagaagtgtgtatggatggatgcatggatgcatggatggatatatttgtttatgtgcctgtgtgtgtgaatacttctatgctcagttataattagataaataaagacacatgtatgcataactcacctttcattcatacgtgcctctgggttcactcctgataattcatttgtgggtggactagaggatgacaaaagaatacagtcagacaggagacacaattcaaaatttacttttctcgtaaaactagctttcattactctgcacataaaccagttaagttttgactattcatgtgtatagcactatttggtctgaaatgtcatttttttattagaaaggaggcaaccaacaagatggcaaccaacatcttaggctggggaaaatagtaatactttcagatttaaataaacctctttattatgacctcagtcccaatgcgtgacagcctttgtggtggcagttatttcaaactaaacttttgtgtggaggtagtcagccctcttattccactaaatgtgctgccttgaaagccctccattacttcttcatttgattgtctctcttggtccacaagtagggtaaagtaactgcaggtctgagtcaaggacacaatccaatatgatggtatttggggtttggagtaccaccctatattgtggcagagttctgcagggtcaaaaacatttctagggttgttagcttttttctcttctcctgaggagttctgcctcccgggttcacgccattctcctgcctcagcctcctgagtacctgggactacaggcgcccgccaccacgcccggctaattttttgtatttttagtagagatggggtttcaccgtgttagccaggatgggctcgatctcctgatctcgtgatccacccgcctcggcctcccaaagtgctgggattacaggcatgagccaccacgcccggcctctatattgatttatttatgtctcacagttcactgatagctccactccagggtactgatttgaatttagacttggcagcgctacagaatttaaatatatatatgtatcgtccaacaccaatatgacatcctagacttcactttctggtttgaattactcacaagcgatgtttagttctttacaattgaaggaagcacaaactaagcatttggtggtttatttcaaattcagctgcagtttctatgtacaaatccccttgacctcatctcatttcctgacactaaaatcccttcatcagtgccttcttttcaccatcatgggtgtcttctctgctctcacacagggtcaagaaactgccccatacaatgtgatgatgggtgtgggcttgtagtgttagcctcacatggtggtagagctctgggtgtgaggaaccctgccagggccattagctctgttttttttccccgagggctccactgctccctgtccactgctactcgcttgttgctctgcatagggttttcttcccttggtccactctagtatgtctcatacacaggaaatctgactttcctaagtatgtgcctgctactaagggtgacaagacaataacaagaagtttcccttttttgccctgttccttttttatccaatttaatcaaaaagttggataagagacctgcagggcctatagtgaggagatttataaatggtgtaaaagacattctgtatggccatggatgatcctgagagtaaagcacataatcttcatccctctttctgttgtttctctctctcttttctctttctctccctttctctctctccctgtgtttgtgtgtctagatagacagaagtagtatatctgcacatacatttctttacatatttgtgtacacatattttataattcacatttcattggtggttctatcacaggtcattgatgtcaattctgtatgcaggctaaaggaatataaaagtagatagttggacacacatataattctaaacttactttttggatcaaacagctacagttactctataatgtactatctggttgatatttaaatattcatgtgtatatcactaattcaaactagatgtatccttttttttaggcggattctcactctcatcgaggctggagtgcagtgatgcgatcttggctcactgcaacctccacctcccaggttcaagcaattctccttcctcagcctcctgagtagatgggat

SEQ ID NO: 1885459 - DNA, 4001 bp, Homo sapiens; identical to SEQ ID NO: 917493

SEQ ID NO: 1885460 - DNA, 4001 bp, Homo sapiens
gagcaaagggagcatgggcctttgctctccaagtcccactctgctctgaagagggggtaggattaagcagcagcaaaagcatcacccactgggagactgtggcctgcacccccttccctccctgagataggcttctgcctcccacacatcccctgcagccccctgtggcttcggcaaggccccctacactcttggggcacgctatggcttgcaaggggcagcactgtgcccagagcccggacacacgtttccagcttctgacatcccctaggaggggggaggggagggagtggggcctgctcccaggggctgatggcattgccctggccctgccagcaggctgtggcactgcccagaccccagctccgccccagcccttggggctgaccccatgctaggcaggtcctgccagaacccccaccagtcccacccctcgcctcagtccatcatggcctcgagcatctccaagaacagcttgtgcatgggcaccttgccctccagcttcaccccatagaaatgggccagcactttgcccgctgtctggtggaggagcggtagcgtgaacagcagcctgcctggccgccgccgctcagcaccccctccggtgccagctcggccggcttcatactccagcagggcctcgtgcggagcttctggcagctgctccacagcctcggcatcttcgatgggcacagagtctgaattggcaagggccagggccttcagtagaacgtactcccctcgctccagccgcagggactgcagccgccgcaccagttgcagcagggcagcccccagttcccccaggccagctgcccgtgccccctcttcatccaggactaagtcctcagcgaaggccaactcatcctgcagtggcagtgagcgctgggccacacccggcaccagcacctccattcatactctctgcagtactgacatctggtcagacagcgacagcgatgagaagcctgggatgctcttggcccagctgatggtgaccacgatctctcggtcaaagaggtcacagagggtagccacggctggaaggtgcccatcagggccagcagggtcgggcaaggcatagagcttctcaggctcaaccaccattagatgagacaccagtgcattcactgggcctgtcgtctgggggcctccagcgactgccaggggcccagcagggaaggcgcccgggaagggcagcgggtccacctctggcaccgcttgtactcccgcccaccccggacgcggtccaggcgcgctcccgcaggctcttggtgaagcggcaggcctgacaggccttgcgtctccgcttggtgatctcacactcgttggaggccagacagctgtactccatactcccctggatggtcctcttgaagaaggctttgcagtcctcacaggatgacacaccgcagtggtagccggaggccacgtccccacagaccaggcagaggcgcttggacagggagctgagcaccagcttcccaccgccctgctcgccaggcccagccccctccccatcctcctcttccttgtggcctgggaggcagtgggtgggagctggaccaggggccagggccacaggaggctcgggtctctgtctccgaggagccctttggactgtcaggcctggccggctctgccatgatgtagtggctcactgcccaccacctggctggacatggcgctggtcacctgacacgcggctgccctcctgccccagcatgccgatcccaggcacacggcgggggccgctccacctcctcgcgaccggcctgcaggtccactctaatattcccgctgtcgcagacgccgccacctcccggggcgccgcgccccgccccccaacctaagcacacctttgggaagttgcctaaagttgctacgcctccccgcaagccccgacgcccgcgggagaccgctaccaggttatcaggaagtaagtggggagagccaaggaagaggaagttcttcccggccgttgcgatgacctttgacccagagaggagggtggccccaggccccttcgagcgcccccacgtggtcttcagagcccctttcccgacatagagacttccccgtcttccaccccggccagccccagggacttcggcaagcgagggattgaaccctgccccggggcgggctggatcggaggcccaaccctgacccgggccaggacccgcagccagagccagatcttgccccaggccggcccaccagaactcggacgccagatcccgcctgaaccctgaccagtccggacctcgactgggccccgaccgtggcccagactggccccagagccggcccccgcctggagcccgccctgccctcctccctgctgcctcatcacacaatttcaagaactaagtggccggaagcggtggctcacgccggtaatcccagcaggccaaggtgggcggatcacgaggtcatgagatcgagaccatcctggctaacacggtgaaaccccgtctctactaaaaatacaaaaaaacaaaaattagctgggcgtggtggcgggcgcctgtagtcccagctactcggatgctgaggcaggagaatggcatgaacccggaaggcagagcttgcagtgagccaagatcccgccactgcactccagcctgggcaacagagcaagactccgtctcaaaaaaaaaaaaaaaaagaaaagaaaagaaaaaagaaaacaaaacaaaacaaaaaactaagatatgtaactataaatattgttatgtctttgcaggttatctcaacttccatcaggcctcagctgaaagctcatctgccaaaacgcatcagcactcatgtaaaataaaaggagtagggaggtgactttgtacacatactgtccagtgtttggctgccagtttccctcttgtgtgtaactattctaggtatgactccttgagcatgaaatgaggggtagatagaacagcacagctgttgggctaacaagaattggtgtgtagactgggcacagtggctcaccagtgtagtcccagcactttgggaggccagggcaggaggatcacctgaggtcaggagttcaagaccagcctggccaacatggtgaaaccctgtctctattaaatatacaattattagctctctattaaaaatacaaaaattaggctgggtgtggtggctcacgcctgtaatcccagcactttgggaggccgaggcaggtggatcacgaggtcaggagttcaaggccagcctggccaagatgctgaaaccctgtctctactaaaaatacaaaaaaactagccgggcgtggtggcaggcgcctgtaatcccagccactcggaaggctgaggcagagaactgcttgaacccaggaggcggagcttgcagtgggccgagatggcgccactgcactccagcctgggggacagagcgagactcgtctaaaaaaaatacaaaaataaaaatacaaaaattagctgggcgtggtggcgggtacctgtaatcccagctacttgggaggctgaggcaggagaatcacctgaacccaggaggcagaggttacagtgagccaagattgtgccattgcactccagcctgggcaacaagactaaaactctgtctcaaaaaaaaaaaaagaatcagtgtataaaaagttttctgctgaatatctgttctgttcttactatggttatgctgtgcaacatataacctgtacaaccattttttcttgtttatctatttgtggaaataagtcagttcaataaaatgtgaaatacacattagtttgctttacatgcaaagattacctgtttttggcttaactgtatcataaccaaaaaagtctatgccttgataatacaatatgaaaaagttcacatatgtacatgggtacattccttcattaaagtttttccttaattctatctcaatgtatttttacaactgatacaactcatctttacaacaaaagtcagaaaggacaaaatagaaaatgatttcattttacagcactttaggttttctgaagt

SEQ ID NO: 1885461 - DNA, 4001 bp, Homo sapiens
ataaatcatgatccatagcttgaaaaacaccatcctagaacacccattttcaaaatctttgtatctcaaattagagaaagcaaaggtggtggaatgggagtgctgggcattgtgcacaaccaccacctcttccctagactgcaggccaaacaactcgagcagagctgctggaaatggtagcatctcagcaagaaaatggcagaaagaaaaatgattgagaactctgctttaagtggaaacagcccaccttgtcttatcagaaatttctagaggtcacagactccacatgtattgactaagcaaagatatttacattcaggagaggctttgttttgagttgtgaaatgttgctttttatctacctaagagttgtgaggatgggcaaggctctttggagaatttatctaattaagcttgatactattctcacgaggaaggaagaagtcatggtactggcaggagtaagagcagagccaggtgaagtgagggaagtatcttgattactgaattttttttctgtgtaacatggctttactcccctcaccttaatcctgccccatcaggtcttgtctttatttaaaatgttgatattgtatacagcatagatattttgcattaatttttattaaaatattgcgttaaaattatttattttaattattacaatttttagcattcccttaaatgttgcacctcattgacctcactctagtcctggcccaaagagattctgcagtcagctactaactagtgcacattaaacaagaaagtatcaaaaacagactttctaaaaactgcttctctaattacagttttactaagcaccatgaatcaaataatcatcttaacgtcctaccagcgatgtttcagaactagcaaactcaatcatcataagacaaattttgtagaacatctttcatacctctgcagttaaaaatattttggaggcaataaggcaggcacaaaccatagttccggttcttcctagaaaagaaaagtatttcaaggaacatacgtggtataaaaatacactcagaaatattcaaggagtgcattttaagttgatttttcttttttttgagacagggtcttgtgtcacgcaggctggagtgcagtggcacaatcttggctcattgcaacctctgcctcacaggtgaaaaatacgcaaattacatttacagtaaaaatatctctcaccatctctccataaaaggacacgatgaggtttttactaaatctgtaagaaagcaacaattatgtcttttataatttttttggataatagtaaaaaagaaaaattcccaactcattgagtacattaatataactgattccaaaattgcacaaatacagtaggatatttttacaccagtctcacatataaatgtagattttaaaatatacatatattttcaaagtgaattcagcaacgtagaaacaccatgtatcaacaccaagtgccatttctcttaaggatgcaaggatttttttccaagatggcagattacaggcttttagcatgcctcagtcatttggaaatagcaagcaagtacataaagaccaactctgtgagctttaattcaagaaagaaaatggcaattccccagaatgatgaaggacatcccagatcctggggaggacattgcaggcaagcagccctcaggacagcatttgactgataaaagtgagtgaagcctcagtatgtgagagaggcagacagcatccctctgtctcacctttccactggagatccacgcaacccgggcagaggaagagattgtttctcccaaaccttgacgatcatttgaggaaagacttggagactttgtgggggaaagacacagggaaacgctgccggcattgtcccaaacctggactgggagcaggacaacactgggggaatcttccctatctggctccacccatcttgtgcccccaatccccctacccctagggctgagggagctcagattaatgtgtactcaggaaatcagcccattcctggggcagcagagagctcctcccaataaacaaggatcaagtacacagccagcagcactggcaacagccagctcttacccatggcgccatctactggcttgtaggtcaaaccacacacccaatataaaacctgctggcagaagtgcatagggctacagaagcaaagccaaaagaccctacccagcatgctctacagccacaccccctagagaggagggaaagggaaagaagaaaaaaaataacaataatattatagaaaaggaaagaaaaagaaaaaatcctacccaaacaaaaataattacacaaattagaagtgctagcatctccagatgagagggacccacgcaagaattctggcaccatgagaaatctgaatgtagtgacactaccaaaggatcacactagctctctggcaatgcttcgtgccaaaatgaaaactcagagatgacaataaacatttcaaagcttgggttgcaaggaagctcaatgagattcaaggttgaaatcaacaaaaagaaacttctacatcaatccaggaaatgaaggaagagataaacatcttaataagaaatcaatcagaacttctagaattaaaaaaactcacttaaggaacttcaaaatacaactgaaagctttatcaatagactggacaaagtagaaaacataatttcagagcttgaagactggtcttttgaactaatccagtcagacaaagataaagaaaaaagattttttaaaagtgaagaaagtcagaaatatgagattatgtaaagtgatcaaacctacgaattactggcatgccctagagagaaacagaaaaagaaaacagcctggaaaacatatttgatggaataattcaagaaaatttattgaatcttgctagatagacatctaagtacaataaagccagacagcacctgtgagatactataaaaaatgaacattaccaaggcatatactcaccagactgtccaaggtcactgtcaaagaaaaagccctaaaggcactggagaaaaaggccagatcacatacaaaggtagccccatcaggataacagcagacttctcagcagaaaccttagaagccaggagagattgagggatctattttcagaattgttaaagaaaataaattataatcaacagattcatatcctgccaaactaagcttcatgagtgaaggagaaataaaaacatttttcttttttttttttttaaatttattttttatttatttttttttattgatcattcttgggtgtttctcgcagagggggatttggcagggtcataggacaatagtggagggaaggtcagcagataaacaagtgaacaaaggtctctggttttcctaggcagagtgtgtgtgtccctgggtacttgagattagggaatggtgatgactcttaacgagtatgctgccttcaagcatctgtttaacaaagcacatcttgcaccgcccttaatccatttaaccctgagtggacacagcacatgtttcagagagcacagggttgggggtaaggtcacagatcaacaggatccaaaggcagaagaatttttcttagtacagaacaaaatgaaaagtctcccatgtctacttctttctacacagacacagcaaccatccgatttctcaatcttttccccacctttcccccttttctattccacaaaaccgccactgtcatcatggcccgttctcaatgagctgttgggtacacctcccagacggggtggtggccgggcagaggggctcctcactttccagtaggggtggccgggcagaggcgcccctcacctcccggacggggcggctggccgggcagggggctgacccccccctacctccctcccggacggggcggctggccgggcggggggctgacccccccacctccctcccggacggggcgtctcgcctggcggggggctgacccccccacctcccttccggacggggtggctgccgggcggagacgctcctcacttcccagacgg

SEQ ID NO: 1885462 - DNA, 4001 bp, Homo sapiens
agtactattcagccataaaaaaagaatgaaatcatgtcgtttgcagcaacctggatggaactggaagtcattgttacgtgaagtaagccaggcacagagagacaaatattgcatgttatcacatacgtaggagctaaaaaagttgacggtggacagatagataccagaggctaggaagggtgtgtgggttggcagggaagagtggttggttaatacagttagatagaaggagttaagttctaatgttctatagcagagtagggtgactacagtgaacaacaatgtattgtatatttcaaaatagctgtaagagaagacttgaaatgttcccaacatatggcaatgacaaatactcaaagtgacagataccttaaataccctgattgatccttacatattctatgcatgtaacaacatatcacatgtacatatgtaccacacaaatatgtacaaatatttgttgtgtaccaattaaaaataaacaaaacttgaaaaatacattatatctacacaatgaaatattattcagcattaagacactgcaagttggatgaaccttgaaaacatgctacatgaaagagtgcatgaaagatcacaaattgggctgagcgtggtggctcacgcctgtaatcccagcactttggaagaccaaggcaggcgcatcgcttgagctcaggacttccagagcagcctgggcaacatgacgaaggccgtctctacaaagaaattaggcaggcgtggtggtgcgcgcctgtggtcccagctactggctactcaccagggtgatacaggaggatcacttgagcctttcctgcctgcttcgctgaaggcatcatgcactttcacggctgggatcaactcttctggaagcaggtcctagcaggactgtgggtgtccacatccaggattagggtcctgcatagagcttggaatacttacccctcaatctggggggaggagcaggggctggcgccttaaggacttactgtccttctgaccaatcctgatgtttccaaggcactggggttttcaggactggataagactgttctaaggccacagtgtggcaactgcagtgtggcaactgcagcgagtcagaggccaaatcctcaactctggcactgtctaaagtgcctttcttggcactttctggtgaggtggctcacacctataatcccaacactttgggaggccaaggcgggtggattagtggagatcaggagttcgagaccagcctggccaacatgatgaaaacccgtctctaccaaaaatgcaaaaattagccaggcatggtggcgcgcgcctgtcatcccagctacccgggagggtgacgcaggagaatcgcttgaacccgggaggcagagcttgtagtgagccgagatcgcaccactgcactccagcctgggcgacagatcaagactccgtctcaaaataataataataatcatgattctaaaaatcaaataaatcgagtgcctttcttgcccattccatgtctcaccacaactctattaagcaggtattaatggctctccatggctataatagaggaactctgggccttatattccacctctcgcccaacccgtgacagccagtgactagcggaggttcaataaacagtagtcggtcttattactatcttattaccagtctctccgtggagttccagcaagaaggggttccacacctcgttggggaccagctcccgagcagggctccgagcaccctcttgaggcagtgacgcgagggcctgcgggggctccgaggctcctccaggcctcgtgggccctcacagaaatggcagggcattgggacaagctgctccggctgcgcaggccgaaaggtccctcgagcatccagaaagctcgcctgacccttataggcgaggtgaggcccccaactcatatcctggggaaaccatggagggggaattcggtttccacaggcgaagtcaaccgaaacggcccgccatgttgaagcctgagcagagctcccgtcaggccccgccccccggcgccaggctcgctgggcagcgcctcctcccggaggtccctccgctggttccttcattccgctggttccttcatttcgctgaatggtgagtgagccaagcacaagctgaactgcgggcaggcagtgagcagatacacaggggccccgaactcaagataaataaatgaataaatactcaaacttgttcttataacccaaggcaactgataggcccatttaggctctggcttccagtgacaatgagttctagatgacaagcctcagaaggaagagcccctctccttgtctgcgctcctgccctaagcacgaagactcagctttggtcctcacagataatcattgccattcaccattggtgattaactcagtcatcactctggagattccaaggacttcaggagctgtgtgtcaggaactaaggacaaggaccaaatgttatttttattataatatcaacagccaaaaatttcaacaccctttgaatttcaacatcttttgaaaaagatgggagatgaatactctcatcttttaccactgagttctgatgccatgtctgtcatttatatttccatatatgatttgggctctttctaggccctctttcatttcattagcttatacatctatctctgcaccaatactacactgtttaacttaactttttaataattatttaaatctggtagaacaagtctcccactttggtgctttgtttttaaacataggctcttcctcatgaattgtgacattagcttgttcagtattgtaaaaaaatcctcttgagtttgtattggaattgcatcaagtttatggattaattttgggagaattgacatcttcatgattccataatgattatgttgttatttttagtagtgttgcatttaaaattatgttttctgagttgttgttgctggtatatagaaatgcaatctttttttgtatatcaattctgcattcggaaaacttgttgcactcttttattaactttgtctatagattgtccaagagaggcagcaaagtgtgatggtaaacagtagacagccccttctactttctttattttgttgccctttatctaacatcttaaactgaatacttaactcaataagtagtccttattccttttcaatgccagcatctgaaaaaaataaatgcttctctaattactttatctagtgtgttgagggacccaatgctgccaccgtattcaataaggagctagaaggactcacagaacttagacaagctgttctattcacggttatggtttattacgatgaaaggctatagaatacattcggaaggaaaaggcacttagggcagagtccaggcagaaccaggagcagcttccagttgtcctctccctgtggagttatatgaacagaacttaattctcccagcaatgacgtgtgacaatatggacaaagaattgtcaaccagggatgctcacacaaacttttgtgtccaaggtcagctgcataggcatgaagacccccgactattgacccttaatactcagtctccaacccattcctccctatgaagtcaaactcatacaatatgacccagggctccaggcaagcaaaaacaggtgttcaccataaattacattattagcacaaactctggcattgcccaaggcccgaggtatacaaagacactcttatcaggcaggatatttcaagagctaatagttggtcaagagtcagtcttttctttgaggcatgcaatcccatagctgctgagtcaaccctttactattcacttatattttatgagttcgatttatacttctattgttaattttatttctaagtctataaagtatattttttaccttttaaaaaatataaatgatagatactatataatattatacaactcctacacattgcttttgtcacttgaagttcttccatatttgtaaaataattgttttttattcttttggatggctgcattttatttaccaattttctatt

SEQ ID NO: 1885463 - DNA, 4001 bp, Homo sapiens
cctgggtgacagagtgagaccccgtctcaaaaataataataataataagtaaaataagatggaaaatgataatgaagttcattatattaatattctttaaaagcaacttttttttttttttttgagacagagtctctctctgtcacccaggctggagtgcagtgtcatgatctcagctcaccgcaacctccgcttcccaggttcaagagattctcctgcctcagcctcccgagtagctgggacaacaggtgcataccactacacctggctaattctttttttgtatttttagtacaaacagcgtttcaacatgttggccaggctgctctccaactcctaacctcaagcgatccgccccacttggcctcccaaagtgctgggattacagacatgagccactgcgcccagcctaaaagcaacttttatataaactagatttccaaaggaagcactaggcctaacatgacaattaagaaatgtaaattcaaagtaatagctatctaatataaggaattatggagaaaaattctcactgcttcctgtaacattatcccaaaactgatcccagaagacttattgctggtatctaaaggtctatatatttagattcaaaaaacatacctggaccccaaaaggccttacaggacctggctcctagtttcctgtccaaccttacctcctaatcaaatgggccctctaataaaaaagggcctttttgctgctccatacacaggcccacttcattcctacttcaggatctctgcactggctcttggtcctgactggaatgctctttccccagaggttccaagctaattctcttgttccttcaggtctctgctcaaatatcaccttaacagagcctctagtaccctgtggcacatttcttataaaagccatagctagaaaagacgctgtcttgcctcaaattgttaaccttacttatgttagatcataacaacaaaacagggtttcctttttttctgtgctttaaagcaaaaagaaacaaacaaaacaaaaaacaaaaaagatctcctgttaaaattctgtgacccacagcatcatttatctttagcttagtctcttcttcaactcttatcaactcttgctcttttacattcctttacagctttatagtttgtcttcactgcacacctacaagcagtgatctctaggttagctaagtatataactaagactaacccatagcaatgagcgcctttgcacacagcaactcctaaaaaattttttgataaataaacaaatgagtgaataatgaactatgacaagacatctggaaagtttccgggacgtgagggaagaggtttttgttccagtagactgacttcataccgacacttttacataagaatggcaacaatgattgtcaaaagaaaaaattaattttcatcgagcccagagtccacttttctcttctagtcattaaaaaaaaaaatcctttcagcccaactgcagatgccaaccatgctcccaataaatagaggaagtttttctcagaagcttcaggaatgcaagagtctggaagtggaaagggcaagacaggagtctgaggtaacgcggctaccgtgagagagagaaaggagaccgagaatctcaatactggggctgagacgcagcatcactagagcctgagtcctaatcaggcggtgctggaaggaggcgggtcagccgggagtggaggaagcagaaaaggctctcccacctctaacgccgcctgggggtcctggtcgattagagcatctgagaagctctggaaaaacctgtcaggaaaacaacgacttcagcagggcccactaaccaaggaaaggggtataaaataaatagcaaagggaaggaaaaacacgcacctctgggatgctgcaggtcctgcggcagccgccgccattcctcgtagtcaatgttgctgccgccggagctgctactatcgcgctcagcagctccgccaccgaccaagggggaaaacttctgcagaaacatcaaccgagcttccgtcttaagcagccaacgagcagccacgcagcgtgctgctagcgggacgggaggcgacacgcgggcgcgtggccggctgggacagtggaggaccgagtcctcccagcccgcaacccggcccgggacctgcgctcccagtccccgcccatcgtagccatgtttacggaggcctgggcctacaggttctccctcttttccaccgcgcccacgtccgcgggcactccgaccgagcctccaggagtagtagctcagaagcacttttgtaacatactgttatccctcaagaacgtgtacgcgcaggggcgtttccttgtccgttaataacacaagctacaggccgagcgtggtggctcacacctgtaatcccagcactttgggaggccgagacgggtggatcacgaggtcaggaattcaagaccagcctggccaagatgctgaaaccccgtctactaaaaatataaaaactagccgggcgtggtggcacgcgcctgtaatcccagctactcgggaggatgaggcaggagaatcccttgaacccgggcggcagaggttgcagtaagccgagatcggaccactgtactccagcctgggcgacagagcaagactccgtctcaaaaaaaaaaaaaaaaaaaaaaaaaaaaaaaaatatatatatatatatatatatatatatataaaacacaagctacttcgagctccgttttccctgggttttatcatggctttcgtctccgtgatgtcactggcggctgcgtggtcttttcagtgaacagaggggcctggatggcgcctggattcccgcgatcattgcgctgggaatggaaaagggctgggactcgctagaagtcgttctgacctagcagcggctaaaagccttctggtgcccggggagacgcgcccggcgcccgcgtactattcattcccttcctcataactccacagcccaggctttcttcttagtgggcttcccagatcaagaaggaaaaccttttctatacgaaagcactgaggggcggaaggtggcctgaagtgatctcagggccgctttgtttcccaacccagtcgttcaggtcctccctcagcgccctttgacccatgcacatcccatggggaaagctgccagcgcgttccaggggtggggtcagattgaggagctggagggagtggtctttatctgactttataccactaccaaactgtgttaattaacgtagctttataataagtcttgaagtcctttattctcccaagattgctttggcttattctaaggccattgtatttctaggtgattttggaattagcttgtcagttttaaaaaaaacaaaactgctgggacttgtactgggcttgcattggatctatagatctgtttggggataactagtatattaacaatattaagtccttcaatccatttaagtggccgtttatttaagtggcctctaatttctcctggcaatgttttgtagattatacacatatttatactttaatgcagctgtgtttggatagactgcagtatagagatcaaacatatctttcattagatttctttttgaatagtgttttgaatgcgatgttaaatagcattttttaaatattctcgtttgttgtaagactatagaaacgctattgatttttacatattgatgttacattcaagcatcttgctaagttcccttattatttgtaatactgtgtagagtcttttggaatttatgtgatgacaatcttgcaatcgtgaataaagatggtttaacttctctgtaatctttatacgttttagttttgttgctggctagtatgtccactattgaatagaaatagtgataatggacttccttgtcttggttgtaacatcaagaggaaagcattcaatatcaagtgctttttctgcctttattgaaatgttcatatgtattttttaataataatatgttatatagtaattttaaaaatatttttaataataatgttacaatgtaacc

SEQ ID NO: 1885464 - DNA, 4001 bp, Homo sapiens
gaagaagacatggtactggcaggagtaagagcagagccaggtgaagtgagggaagcatcttgattactgaatgtttttttctgtgtaacatggctttacaccccgcaccttaatcctgccccatcaggtcttgtctttatttaaaatgttgatattgtatacatcatagatttttttacgttaatttttattaaaatattgtgttaaaattatttattttaattattacaatttttagcattcccttaaatgttgcacctcattgacctcactctagtccttgcccaaagagattctgaggtcagctactaactagtgcacgttaaacaagaaagtatcaaaaacagactttctaaaaactgcttctctaattacaattttactaagcaccatgactcaaataacaccttaacgtcctaccagtgatgtttcagaactagcaaactcaatcatcataagacaaagtttgtagaacatctttcatacctctgcagttaaaaatatttcggaggcaataaggaaggcacaaatcatagttccggttcttcctagaaaagaaaagaagttagttcaaggaacatacgtggtataaaaatacactcagaaatattcaaggagtgcattttaagttgattttctttcttttttttgagacagggtcttgctgtgtcacgcaggctggagtgcagtggcacaatcttggctcattgcaacctctgcctcacaggtgaaaaatacgcaagttacatttacagtaaaaatatctctcaccatcgctccacaaaaggacacgatgaggtttttactaaatctataagaaagcaacaattatgtcttttataatttttttggataatagtaaaaaagaaaaattgccaactcatttagtatattaatataactgattccaaaattgcacaaatacagtagaataaaagatatttttacaccagtctcacatataaatgtagattttaaaatatacatatattttcaaagtgaattcagcaatgtagaaacaccatgtatcaacaccaagtgccatttctcttaaggatgcaaggatgttttttccaagatggcagattacaggcttttagcatgcctcagtcatttggaaatagcaagcaagtacataaagaccaactctgtgagctttaattcaagaaaggaaatggcaattccccggaattatgaaggacatcccagatcttgcggaggacattgcaggcaagcagccctcaggacagcattcgactgatagaagtgagtgaagcctcagtaagtgagagaggcagacagcatccctctgtctcacctttccactggagatccacgcaacccgggcagaggaagagattgtttctcccaagccttggagctcatttgaggagagacttggagactttgtgggggaaagacacagggaaacgctgccggcattgtcccaaacctggactgggagcaggacaacactgggggaatcttccctatctggctccacccatcttgtgcccccaatccccctacccctagggctgagggagctcagattaatgtgtactcaggaaatcagccctttgcctggggcaggagagagctcctcccaataaacaaggatcaagtacacagccagcagcactggcaacagccagctcttacccatggcgccatctactggcttgtaggtcaaaccacacacccaatataaaacctgctggcagaagtgcattagggctacagaagcaaagccaaaagaccctacccagcatgctctacagccacacccctagggaggagggaaagggaaagaagaaaaaaataacaataatattatagaaaaggaaagaaaaagaaaaaatcctacccaaacaaaaataattacacaaattagaagtgctagcatctccagatgagaaggacccacacaagaattctagcaccatgagaaatctgaatgtagtgacactaccaaaggatcacactagctctctggcaatgcttcgtaccaaaatgaaaactcagagataacaataaacatttcaaaacttgggttgcaaggaagctcaatgagattcaaggttgaaatcaacaaaaagaaacttctacatcaatccgggaaatgaaggaagagataaacatcttaataagaaatcaatcagaacttctagaattaaaaaaactcacttaaggaatttcaaaatacaactgaaagctttatcaatagactggacaaagtagaaaacataatttcagagcttgaagactggtcttttgaactaatccagtcagacaaagataaagaaaaaagattttttaaaagtgaagaaagtcagaaatatgagattatgtaaagtgatcaaacctacgaattactggcatgccctagagagaaagagaaaaagaaaacagcctggaaaacatatttgatggaataattcaagaaaatttcttgaatcttgctagatagacatctaagtacagtaaagccagacagcacctgtgagatactataaaaaatgaacattaccaaggcatatactcaccagactgtccaaggtcactgtcaaagaaaaagccctaaaggcactggagaaaaaggccagatcacatacaaaggtagccccatcaggataacagcagacttctcagcagaaaccttacaagccagcagagattgaggtatctattttcagaattcttgaagaaaataaattataatcaaaagattcatatcctgccgaactaagcttcatgagtgaaggagaaataaaaacatttttctagagaagcaaatgccaagagagttcattaccactagaccagtcttacaaaagatgcctaagggagttctaaacatggaaatgaaagaatgatacctgctatcataaaaacacacttaagtacatagctcacagaccctataaaacaaccacacaatagaaattacaaaaaaaccagctaacaatttcatgatagggtgaaaagctcacatgtcaatagtaaccttgaatgtaaacacaccacttaaaagtcacagagtgggctgggtgcggtggctattcctgtaatcccagcattttgggaggccaaggtgggtagatcacgaggtcaggagatcgagaccatcctggccaatgtagagaaaccctgtctctactaaaaatataaaaattagccaagcatgatggcacatgcctataatcccagctactcaggaggctgaggcaggagaagcacttgaactcaggagtcagaggttgctgtgagccaatatcatgccactgcactctagcctgatgacagagagagattctgaaaaaaaaaagaaagaaagaaagaaagaaagaaagaaagaaagaaagaaagaaagaaagaaagaaaggtcacagagtggaaattggattaaaaaaacaaaacccatctgtctgctgtcttcaagagacccatctcacatgtaacaacaccaataggttcaaagtaaagggttgaagaaagatctatcgcacaaacaaaacacaaaaaagagcaggggtcactattcctaaaacagataaaacaggctttaaaccaacaatagtaaaaaaagacaaagaagagcattacataatgatacggagttcaattcaacaagaagccttaactatcctaaatatatatgcacccaacattggctcacccaggttaataaaacagatacctctagacctatgaaaagacttagccacacaacaatagtcaggggacttcaacaccccactgataacatcacacagatcataaagacggaaaactaacacagaaattctggacttaaattcaacacttgaccaattggacctaatagaaacctaaagaactcccagcattttgggaagctgaggcgggtgggtggatcacgaggtcaggagtttgagaccagtctggccaatatggtgaaaacccattgctactaaaaatacaaaaattagccaggtgtggtggcaggtgcctgtaatctt

SEQ ID NO: 1885465 - DNA, 4001 bp, Homo sapiens
ctgggaactgaaactcgtgatgctgttgctgcggagaaaagcctcattacccattccgcaggcgggggacaccacccaaggcgcgcacaccaagcgccggcgctcccgccgcctccgccggcccttccgcgccgcgccccctcctctgccgcgtgcccgcgcgcgccggccgcgagtgtgaaaagagcggacacacctaacctgggcgcgcggcaggcgcgcaccctgcccgcccccaccgggccgaatcacgcagtccgacccggattcgctccttcggccggaattccccacccccactatcccctccggctccaccactcccggcttcggcgcctctgccagccttcggtaatttccgtcgggagacctggcgctcgcctaggcccgaagacccgccgcctcctgccccgccagacccggctttatgtctgcggcgccgaggcgcatgcgcagacgccatcttccctcctcctcctccgcctgccccctccccccagccaccaccgcctcctctcgccggcggtcgcccctcctcctcctgcgctccgcgctggtccctcccctcccgatgccgcgagagactgggggatacggtggagccgggggagccgaagaagagcactagtaacaaccaccacagccccctccccgcccgacaccctccctcggcacccactcactcccccgccccgtttgccgacaccgaccaaccccacctcgttcctttgaacggcgtcggctgcagtcgctgcaccagcccgtctggccaccaacgccgcggagaaaggagccgccgccgcctgcggccctctcccgcccggtcgcgggagcagcggggtgaggaagagccggctgcggaggaagaggataagagagggtcgcaccctccgccctagcgcacgtcccgccgccctccggagaggctcgggtgccggccccttcctccccgaggacgtgtgccgagtcgaggcgcctgccctgagggaggaaaatgctcgggctccatggctgccagtgatggagcggtccctgggctcccgctgccaccgccgccgccgcgccccggccgtgctccgcgaggacccggcgtctctgcgcgcccgcccgcgcctcgttgctgggctcaccgtaccgggcgcctcgccgccgccccgctcgcagccgcgtcgccccggccccagccgcggccagcgtttcctcaccgagcagccgccgcgagcccagggggtttgaaagggtctgcggggcgcggggggagggccgagcggggccgggaggggaggtttgagcgacactgagctcggggctcgctggcggcggcggcggccccgggggtggcgaggggaaggcgacatttgcttggcgctgcctccgtgcagagcggccgggagggctttgcagcggccgccgacgcggcgggaggagggggctgaggcggcttcggagttggccggagaaggtgggcatttctcgcttttcctccccttcctgcgctctccccctccctcctgccccgcaccccacgtgaagcagaatataaaggggggtgtgaggctagaggggaaagtgaatggcgaaggactgaagggatccccccttcgggtccccggccgccctgttcaccctcgttcatcctcctttccgaagctcgctctcgaaggcaggagcgaccggcgcctttggctgaggaggaggagaaggaggaatcgcgccaggcggagcgtcaggtcccgttttcctctccggcgtctccaatacaaagattacggtgcagaaggaaattgcactcgtctcctccgcgcccccggtacccaacacaatgcaccagccgcctgagtccaccgccgcggccgccgccgctgcagacattagcgctaggaagatggcgcacccggcaatgttccctcgaaggggcagcggtagtggcagcgcctctgctctcaatgcagcaggtaccggcgtcggtagtaatgccacatcttccgaggattttccgcctccgtcgctgcttcagccgccgccccctgcagcatcttctacgtcgggaccacagcctccgcctccacaaagcctgaacctcctttcgcaggctcagctgcaggcacagcctcttgcgccaggcggaactcaaatgaaaaagaaaagtggcttccagataactagcgttactcctgctcagatctccgctagtatcagctctaacaacagtatagcagaggacactgagagctatgatgatctggatgaatctcacacggaagatctctcttcttcggagatccttgatgtgtcactttccagggctactgacttaggggagcccgaacgcagctcctcagaagagaccctaaataacttccaggaagccgagacacctggggcagtctctcccaaccagccccaccttcctcagcctcatttgcctcaccttccacaacagaatgttgtgatcaatgggaatgctcatccacaccacctccatcaccaccatcagattcatcatgggcaccacctccaacatggtcaccaccatccatctcatgttgctgtggccagtgcatccattactggtgggccaccctcaagcccagtatctagaaaactctctacaactggaagctctgacagtatcacaccagttgcaccaacttctgctgtatcatccagtggttcacctgcatctgtaatgactaatatgcgtgctccaagtactacaggtggaataggtataaattctgttactggcactagtacagtaaataatgttaacattactgctgtgggtagttttaatcctaatgtgacaagcagcatgcttggtaatgttaatataagtacaagcaatattcctagtgctgctggtgtgagtgttgggcctggagttaccagtggtgttaatgtgaatatcttgagtggcatgggcaatggtactatttcttcctctgctgctgttagcagtgttcctaatgcagctgcagggatgactgggggatcggtttcaagtcagcagcaacaaccaacagttaacacttcgaggttcagagttgtgaagttagattctagttctgagccctttaaaaaaggtagatggacttgcactgagttctatgaaaaagaaaatgctgtacctgctacagaaggtgtgctgataaataaagtggtggagactgtaaagcaaaatccgatagaagtgacttctgaaagggagagcactagtgggagttcagtgagcagtagtgtcagcacactgagtcactatacagagagtgtgggaagtggagagatgggagcccctactgtggtggtgcagcagcagcagcagcaacaacaacaacaacagcaacaaccagctctccaaggtgtgaccctccaacagatggattttggtagcactggtccacagagtattccagcagttagtataccacagagtatttctcagtcacagatctcacaagtacaattacagtctcaagaactgagctatcagcaaaagcaaggtcttcagccagtacctctgcaagccactatgagtgctgcaactggtatccagccatcgcctgtaaatgtggttggtgtaacttcagctttaggtcagcagccttccatttccagtttggctcaaccccagctaccatattctcaggcggctcctccagtgcaaactccccttccaggggcaccaccaccccaacagttacagtatggacaacagcaaccaatggtttctacacagatggccccaggccatgtcaaatcagtgactcaaaatcctgcttcagagtatgtacaacagcagccaattcttcaaacagcaatgtcctccggacagcccagttctgcaggagtaggagcaggaacaacagtgattcctgtggctcagccacagggtatccagctgccagtgcagcccacagcagtcccagcacaacctgcaggggcatctgtccagcctgttggccaggctccggcagcagtgtctgctgtacctactggca

SEQ ID NO: 1885466 - DNA, 4001 bp, Homo sapiens
gacaacatatccctagggtgcggggggcctctttacgcctttgtctctctgtatgtctctctctctgtctctccatttctctgtgtatttttctgtctccgtctctgtctctctgtgtctgtttctctctgtctctgtttctctttctcttgctaaggaacagctcttgccactttatagtggcaagactacttattctctgttttgaaatgcagaatatgccagggattggggtatctagcacatcacctcttcagacttcatgcactgtgcccacagtgcccctccgcaggcttgtgctgggctggacaagccttcccttcgtccctccccaagcctagattccagcgtgccctccctgcagaagctggtctcccttcccctctccctgcatgctccctactgacctcttcccgcagccagggagcatctggggcaaatgcaaacagttctgtggtctgcttatttgcttttcttagtgcaaaggtggaggcagaatgtggttagtgcagccaccatggctgccaggaacaaagtcagttctggggaaggggagcgccagagcctgccagcccagcagccagccctgccggaaggcccccaagccaggatcctgtcagtctccatctagaaaccagacagaaagcacttttgtaaatgttaaccaaaaaggtccccctgtgatggctgtgctgtaaatcaaagtagacaatgtggggtgggggcagggcacacgtcttgtctctggagccatcgcaaagcagggaggggatgctccttcaactctcaggtggggactggagctccccgctagtccacgctggagaaaggtttttagggcctggagtcacccaggacccatctctgtccagggggtgctgtgtaatattcaccattaatcctacacatctgggaagcattctcctgctaaagataagataaagcccaaatgatttgtgttgggggctggctggggggctggggggaggccagacctggaaggctgggcacacaggagcaccctaaccagcaagcgggggacgcagcctccgcggcatactcccacagtctgtctgtgttgccgggcagattccctaagcatggtgcactgaggtacacagggaatctggaaaattattttgctttacacaatggagactgtgttatttaagtttaaaataccatgggggaggaaggtaagcataatcagctttataagagaacaagcaggcaggggagcttttcccagattccacccttttgttaaatctctgaggtttccagaatgtagttcttcctcgctcctgccgcctcccaccttccttccccactctcccctctccctctctgcctttctctgtgtctgtgcctctataacaataaaaatcatcaacgcagccattgctgtgagcaaggtactgtttcaagtgcttttcagatcacgtaacccccaaaactctatgaggaaggttctgctttcttctctgcattgcgctctctttctctcccgctgcctctgcctctctcatacacacactcaccccctgacacacacacacacacacacacacacacacacacacaccccttaggcctctctatatcacctccacacactcagacacatacccacagtcttgtccacatcaataagaagcagttcacctccaccggaagggacagcctcagagcctgaagaatgccagcctttgcactcctgcgctcggaggttctcctgagctacctggggtgcagtggctatgaaggcctcagtattcagacctccctgaacttggctgaagatcgtgaacaggaaagcaagctctatccctgctgactctacctgccaggctgcccagcctagcagggccaaggctggatctactctctcttctgtccttggcactgctctgacctttgaggggagagagaggcagccagaggtgagagggaaaacaaaagaagactctggtttccagcagcagcactgactagagaacagggaagcagggattctggtcccggccacgcccctcactgcacctggacagcgggcaggacatttagtcttcgtgggttttcatttctctcacaggaaaatggattatccccatttttattttaggggcagtcagagaagcccaatgtaaaaatacaaagaaggtgcaggctctgtgcagcccagccttcaccctccttctggagcagccctttccagacttgctcactgaataaatcctgctggggcacagactgtgcgccttccatggcatcagggggtgcagtgccaagcaccactccctattccccaggaacttacagctgagaggagggaaacaggtgagccgatcaacacgctctccctaacagtgacataaactaacaaggggcagcgtgcaaagcacagtggatcaactcaaggaaaagggagctaaaactgtctatctacttctaggaatgtccccaaaagaactgaaagagggacttggagagattcttgtacagccatgttcatagaggcattatccactatagccaaggggcagaagcaacccaggtgtccaccaaccgtagaggatgaacgggtaaactaaacgtggcacatccacaccatggaacactattcgtcaatgaaaaagaaggacattctgacacatgcccccacatggatgaacctggagaacattatgcttaagcgaaataagccactcacaaaaagacagatactgtgtgattccacttgtgtgaggtacctggagtggtcccatttatagagacagaaaggaaacagtggctgccagcagctcaggggaggaaggaacggggagctggtgtttcctgggcacagagttctggtttgggattataagaacattccggaaatgatgacggttgcacaataataaatatatttaatgccgccaaattgtacacttaaacatggctaagatgttaaatttatgtgcatttcaccacaattaaaaataataatttaaaaaattgttgggtatgtgtccaaaaagtggccagggtttggcaagcgttgagggggagagaaatgacgctgcccagacctctatgataaggcccgaagcctgcctccaccccccggcgtgagaccaaagggcctttgcacatgctcttcctttcacccgatgcttttcccctcaatatttccatgactcaaattcactcagctctttcttcaaatgtcactcctcaaaaagccctcactgacaccactaactatagtaaagcatgtacatgcacgtgcgcacgctcacacacacacacattctgcccaccacgtgccgtagcagatttctgcacagcactaaccaccatctcctatgctggtatatatatctttatttatttattttctgtttccccaactagaatataagcttcaggagcacaggggctctgttttgttcactgttctctcccctatgcttgaaagattgtaggtgctcatatgaatttgaaggatgatgaggaaacaaggaaatgggagtgtctgcccagcttgccagggctccccttggaaatttgagcccagtgcccccacctggccacaagcccacctactgagccttaccttttttgcatttttctctctcaagaaccttgcagggaggtgatgacagggtttgggaatttgactcagaatcacagctatatatctatgatcatcttctacccttttaacttgaccttacggtttagatatcagaagaatgacagggaatgaattaagaggggagattccattttagcgaacatacgtaactcagtttttaaaatagaatcatacgatttttgaggtggacaagatcacagacttcggctgagtttgaagcattgagagaatatccaaccgcaagtgggtcacagagacctggcgatgcggatgggcctgtgttgtgcattcagtctaaccctgcacataaccagggcactaagaaatgtgtttgctaaagagaagctgctggtgccag

SEQ ID NO: 1885467 - DNA, 4001 bp, Homo sapiens; identical to SEQ ID NO: 917504

SEQ ID NO: 1885468 - DNA, 4001 bp, Homo sapiens
actggtgtattttatggttcaaattaatcttttacccacataagatttcataacattatgcatcggtcaactggaaaatccagttatgtagctctgtacagtggaaaatccagttacgtagctctgtacagttgtccaattgtacaatggaaaactccactatatacttgagagagtagaaaataaaactaatgtcttagcattattatgaaaatagttttggactttgcatccccttaatgggtcagggtgtagtccatcaacagcttctgcaaacataaaggaccttttgactgtcgttttcctgaaaaataactcgaacgaacctaaaggtaaatgtaaaatgtacttcaagactgtgaaaatgggctgggcccagaggctcacgcctgtaatcccaacactttgggaggccaaggcgggcggatcacgaggtcaggagttcgagaccagcctgaccaacatggtgaaacctcatctctactaaaaatacaaaaaatagccagggtggtgtcaggtgcctgtagtcccagctacttgggaggctgaggcaggagaatcgcttgaaccggggaggcagaggtatcagtgagccgagatcgcgccactgcactccagctggggagagcgagactccgtctcaaaacaaacgaacaaaacaagactgtgaaaatgaactttacgaataaagcctaaagaagcaaataaaagtcatacttttgccttctataatcagtgttaacattttggcccactggaacctctctttgagggtagggactgtgttgatctacgaatcacagatttagcacactggctggcacttatgagcactgaaaatgcttttttttttttagtactccatagcctatccctttcatttagctgggtagtgtggtcaattttccccataacatgcgttctcacataattgcatgtatttctggggtacagtgtgatggttccatacatatacacattgtgcaaccatctaatcagggtaattagcacatccatcaccaaaacacttgtcatttctttgtggtgagaatattcaaaatcctctcttctagctattttgaagttaacattatcgttgagtatagtcatccaaacgtgcaagagaataccaaaacttattccttctaactataactttgtgtctgttgaccaacctctccccatcttcctccccactaactctcctctgtacaagaataaccactcttttactccctactttcacgagatcaacttaaaaaaaaactttttaaaacgactgcatgatatgttttcaggctcacacatttaaaaaccgtgactttggcaaagagtaacttcattctgctggggaaaaaaatttaaatggcctgagtccggaagctcgccagggcagaagcgcagggtcgctccgccgggctcgccgggccggggaccccccagccacccgccaccacggcggggagggcagggtgctgactccagggaccacgacagtcggccccggtggtggggattccgcgcgggacccacgcgggaacaaagaggcggctggacggcccagctctccgcacccggaaggacctgttccacctctccggctcccgtacccctctatccgcatctgagtgaccagatcccactgcagtcaacagcccgcggggtagccagcttcgagggaccgcccggaaagacacaacgcgcgtggaaggcgccgggcgtccagtctcgggagagattagaagtggcgctcctgcccagcgccggcaatccaggggaatccgcggccatcgcggatccaccaggggtgaggcggcactgagcacaagtgtgaggctctcgggagctacgcctccgcttccccagtgccacccgtttttacctcaggcggttctgaccgccatcgtttcaacctggagaggtgagccctcccctaccgacgcacttcccttccccggcaggaaggagggcgctgacccagcgggcgcacgcccctgactgcgcatgcgccgggtgcgccgttcgtcagcggcgagtggcctcgcggcgccggattcgtcgctccgccaagagtgcgcctgcgcggtcgctggggctcgcacttcagcttcccctcccccggcgccctctggggctccgagcccggcgggaccatgttcaccagcaccggctccagtgggctctgtgagtaccggcctccgccatcctggctgccccctacacgccaccctaggcacctctttgaggaggctggggcagcggggaccctcgggtttgccggaggtggtggggccgaccctccagacccgcgtccgaaccctgctagttcccggtcttgggggtcagcggaaaccgcccccatttcggcctggaggggcgaatggggacaaagccccgccgcccgccccgaccccacctggtatccccaggtgctctgcccaggagtctcttggggccgctgcaagtgggcaggtgccctggtgttctcgtgggccggccccaggccctttgcggagcgtgtgccgcgctgaaggaaggggccgtcccccttaccatgccccattcttttaggcttgggggaccgaactaactccccccgcccccacttgcaaagttcagcctccgctttagaagctgacctctcagtttcacttggatgtgtttcttcttcagtctccaagaagagtttttagacaaacacacactgatgagagtgctttcaagtggagggaagttaggaagtcgtggcgagggagcgcagctgtgctgctggatgttgctgttttcctggcgtgttagcggtggtcagcaggtagggggcggagtatttttacagccagttaaacggcttttctcactgagtgtgtggaattgactttcggtaaggtagactgcgtgttaacagttaggcacgggtacagcaacggagaacagctctaattttgcaattgcttgtcactgttcatactccatgtgaagttaatgctgctggaggacagaaacatctgacatttccaaatattaaagatctgttggccgggcgcggtggctcacgcctgtaatcccagcactttgggaggccgaggtgggcggatcacgaggtcaggagatcgagaccatcctggctaacacggtgaaaccccgtctctctactaaaaacacaaaaaattagctgggcgtggtggcgggtgcctgtattcccagctactcgggaggctgaggcaggagaatggcgtgaacccgggaggcggagcttgcagcgagccgagattgcgccactgcactttggcctgggcgacaaagcgagactccatctcaaaaaaaaaaaaaaaaaaaaaagatctgttgggaatgtcatgaatcttctgagaatgtgtgtctcgtcttatagtctgacagtgagttagtatcagcgccacaggcataattttaaatcttcctcacttctcaacttctcaggttttgaagtggtttcaatatttatgatttcctttgtttcataattaatttgatttatggcatctttcatggattggtcccggagtatgttacaactactaagtaatcttccccaaactaccctttagataaagagcattaggactgtagctgaagctgacagttcaagaaggcaatgtggttttcctgggatcacacagtgagccaggaactactggttatgaaattaatggtggaattcttcaatttcaattgttctttagcattttgatctatccttgctggccaaagtacatataaaaaaataaagggcaagagaaatcttattggttgctgtactgtattagccatgagattatattggccaagtgtattcaaatttgatacagggcaactgtggggaagataatattttgttatctatggcacatggtggtgagtgttgaattctaggaaccaaactgttgcccagggagaggcgtaggtctggagcccctctgcagctgtcttggcctgtttctaaaattaagtgcttctgcagt

SEQ ID NO: 1885469 - DNA, 4001 bp, Homo sapiens
tggtgtattttatggttcaaattaatcttttacccacataagatttcataacattatgcatcggtcaactggaaaatccagttatgtagctctgtacagtggaaaatccagttacgtagctctgtacagttgtccaattgtacaatggaaaactccactatatacttgagagagtagaaaataaaactaatgtcttagcattattatgaaaatagttttggactttgcatccccttaatgggtcagggtgtagtccatcaacagcttctgcaaacataaaggaccttttgactgtcgttttcctgaaaaataactcgaacgaacctaaaggtaaatgtaaaatgtacttcaagactgtgaaaatgggctgggcccagaggctcacgcctgtaatcccaacactttgggaggccaaggcgggcggatcacgaggtcaggagttcgagaccagcctgaccaacatggtgaaacctcatctctactaaaaatacaaaaaatagccagggtggtgtcaggtgcctgtagtcccagctacttgggaggctgaggcaggagaatcgcttgaaccggggaggcagaggtatcagtgagccgagatcgcgccactgcactccagctggggagagcgagactccgtctcaaaacaaacgaacaaaacaagactgtgaaaatgaactttacgaataaagcctaaagaagcaaataaaagtcatacttttgccttctataatcagtgttaacattttggcccactggaacctctctttgagggtagggactgtgttgatctacgaatcacagatttagcacactggctggcacttatgagcactgaaaatgcttttttttttttagtactccatagcctatccctttcatttagctgggtagtgtggtcaattttccccataacatgcgttctcacataattgcatgtatttctggggtacagtgtgatggttccatacatatacacattgtgcaaccatctaatcagggtaattagcacatccatcaccaaaacacttgtcatttctttgtggtgagaatattcaaaatcctctcttctagctattttgaagttaacattatcgttgagtatagtcatccaaacgtgcaagagaataccaaaacttattccttctaactataactttgtgtctgttgaccaacctctccccatcttcctccccactaactctcctctgtacaagaataaccactcttttactccctactttcacgagatcaacttaaaaaaaaactttttaaaacgactgcatgatatgttttcaggctcacacatttaaaaaccgtgactttggcaaagagtaacttcattctgctggggaaaaaaatttaaatggcctgagtccggaagctcgccagggcagaagcgcagggtcgctccgccgggctcgccgggccggggaccccccagccacccgccaccacggcggggagggcagggtgctgactccagggaccacgacagtcggccccggtggtggggattccgcgcgggacccacgcgggaacaaagaggcggctggacggcccagctctccgcacccggaaggacctgttccacctctccggctcccgtacccctctatccgcatctgagtgaccagatcccactgcagtcaacagcccgcggggtagccagcttcgagggaccgcccggaaagacacaacgcgcgtggaaggcgccgggcgtccagtctcgggagagattagaagtggcgctcctgcccagcgccggcaatccaggggaatccgcggccatcgcggatccaccaggggtgaggcggcactgagcacaagtgtgaggctctcgggagctacgcctccgcttccccagtgccacccgtttttacctcaggcggttctgaccgccatcgtttcaacctggagaggtgagccctcccctaccgacgcacttcccttccccggcaggaaggagggcgctgacccagcgggcgcacgcccctgactgcgcatgcgccgggtgcgccgttcgtcagcggcgagtggcctcgcggcgccggattcgtcgctccgccaagagtgcgcctgcgcggtcgctggggctcgcacttcagcttcccctcccccggcgccctctggggctccgagcccggcgggaccatgttcaccagcaccggctccagtgggctctgtgagtaccggcctccgccatcctggctgccccctacacgccaccctaggcacctctttgaggaggctggggcagcggggaccctcgggtttgccggaggtggtggggccgaccctccagacccgcgtccgaaccctgctagttcccggtcttgggggtcagcggaaaccgcccccatttcggcctggaggggcgaatggggacaaagccccgccgcccgccccgaccccacctggtatccccaggtgctctgcccaggagtctcttggggccgctgcaagtgggcaggtgccctggtgttctcgtgggccggccccaggccctttgcggagcgtgtgccgcgctgaaggaaggggccgtcccccttaccatgccccattcttttaggcttgggggaccgaactaactccccccgcccccacttgcaaagttcagcctccgctttagaagctgacctctcagtttcacttggatgtgtttcttcttcagtctccaagaagagtttttagacaaacacacactgatgagagtgctttcaagtggagggaagttaggaagtcgtggcgagggagcgcagctgtgctgctggatgttgctgttttcctggcgtgttagcggtggtcagcaggtagggggcggagtatttttacagccagttaaacggcttttctcactgagtgtgtggaattgactttcggtaaggtagactgcgtgttaacagttaggcacgggtacagcaacggagaacagctctaattttgcaattgcttgtcactgttcatactccatgtgaagttaatgctgctggaggacagaaacatctgacatttccaaatattaaagatctgttggccgggcgcggtggctcacgcctgtaatcccagcactttgggaggccgaggtgggcggatcacgaggtcaggagatcgagaccatcctggctaacacggtgaaaccccgtctctctactaaaaacacaaaaaattagctgggcgtggtggcgggtgcctgtattcccagctactcgggaggctgaggcaggagaatggcgtgaacccgggaggcggagcttgcagcgagccgagattgcgccactgcactttggcctgggcgacaaagcgagactccatctcaaaaaaaaaaaaaaaaaaaaaagatctgttgggaatgtcatgaatcttctgagaatgtgtgtctcgtcttatagtctgacagtgagttagtatcagcgccacaggcataattttaaatcttcctcacttctcaacttctcaggttttgaagtggtttcaatatttatgatttcctttgtttcataattaatttgatttatggcatctttcatggattggtcccggagtatgttacaactactaagtaatcttccccaaactaccctttagataaagagcattaggactgtagctgaagctgacagttcaagaaggcaatgtggttttcctgggatcacacagtgagccaggaactactggttatgaaattaatggtggaattcttcaatttcaattgttctttagcattttgatctatccttgctggccaaagtacatataaaaaaataaagggcaagagaaatcttattggttgctgtactgtattagccatgagattatattggccaagtgtattcaaatttgatacagggcaactgtggggaagataatattttgttatctatggcacatggtggtgagtgttgaattctaggaaccaaactgttgcccagggagaggcgtaggtctggagcccctctgcagctgtcttggcctgtttctaaaattaagtgcttctgcagtgt

SEQ ID NO: 1885470 - DNA, 4001 bp, Homo sapiens; identical to SEQ ID NO: 917508

SEQ ID NO: 1885471 - DNA, 4001 bp, Homo sapiens
gcaatggaacaaatggttttcagaagacctgtgataggaatagaggcaaaggccctttgatcatgtgattattagagcttgataactggttgtacaatatttcatttctctcagacttagcaacatgttctgacttctccattagtgttggcagctgaacctctctgttcccttttatgtcattggtaccatatatcttactgagggtcactttgctttgtgccgatttctgattttaagccttttgcaagcttctgccatgtgtaccacaatggtgcaatgccagttttaggtctagacccttctactttttatggtgcacattttaactttgatgggatagttaaaaactatgagatttctttcagtagctcattgtctcattgtgaacatttacagatcaaaagcttgttttttgttttaacatagaggaggccactagaggaggaagtatagaccaagactcttaggatgactgcagatcagtgcagaacccccagatactttccctcccagccacagaaattgtgtcaggactgtgttttttgaaagactcatctgaaggaaggagtaatagatggcattgtagttgggatggaggaagatgggcaaaggaagtttgctttgtgcctgttgtgccaggcattgttctgaacatcttctatacatttttcacagaaacaagccatgttgcaagtcttgtttgcccttttttgcagattagtaatttggagctcaaatgtttagaacaaatatttgttctaaatttaaactttggtaactctacagtagtgctgctattttagaattgtagcattttgggtttgcaataggtgctacaaatctggtctcctgtcttgctgatgagaaaactgaggcagtgttttattgcagtggctcagtagtttagtttatattagaatggggacacgaatgcagcctcctggtttgaaggctgtcacccagtcccctgcccagcctgcggttggaacgtttaaatgcctactctttgtagttcagggttttcattgtaccaacatgaaaagctataatgaaaatacccctaaagaaagagtcaaagcctggcttgtttagttccatctgtttgtgctattcctttctgtttgtttgttttccttctcacaggcccctcagctgcaggtctgttggagtttgctggaggtccactccagaccctgtttgcctgggtatcaccagcagaggctgcagaacagcaaatattgctgcctgatccttcctctggaagctttgtcccagggggcaccagcctgtatgaggtgtctgtcggcccctactgggaggtgtctcccagtcaggctgcactcccagtcagggacccacttgaggaggcagtctgtctgttatcagagctcgaaacaccatgctgggagaaccactggtctcttagacctgtcaggcagggacgtttacgtctgcagaagctgtctgctgccttttgttcagatatgccctgcccccagaggtggaatctagagaggcagtaggccttgctgagctgtggtgggctccgcccagttcaagcttccctgctgctttatgctgtaagcacagaaccacctactcaagcctcagcaatggcggacgcccctccccctgccaagctccagcgtcccaggtcaatctcaaactgctgtgctagcagcgagcaaggctccctgggcgtgggacccataagccaggcacgggagggagtctcctggtctgccggttgcaaagaccgtcagaaaagcacagtatttgggcagtagtgtacccttcctccaggtacagtcactcacagcttcacttggctaggaaagggaaatcccttgaccccttgcgcttcccgggtgaggggacgccccaccctgcttccgctcaccctccgtggactgtacccactgtccagccagtcccaatgagatgaaccaggtacctcagatggaaatgcagaaatcacccgccttctgcatcgatctcgcagggagctgtagaccggagctgttcctattcggccatcttggaagcaactctcagttccatctgtttgtgaagcctttccaagttctccagcactcagtgttgttcctgtccagacttgctatagtacatcctgtgttgtgacatagttttgacacttattctcttatctctacatctttaaatttatttttaaatggatttttatttatatgtaatcatgaaaagctaatttttattcactctctactccccagttgaattatgattttgaaatttttcttatgcttttgtatataaaatttaaaaaatttcaacttagagtgataaataatatgaaacccaatacatacatacatacttacatattgaaacaaaagtttcagaagactttgtttactcctaataaagatgtgtgtctgatctgttttactgaaaaagaagatggtagtggtccactgcaaagacctcaccactcactaatgggtgtcacactttaaaagtcatgttctccagttactagcacagggctagagagaacacaggtagtcagatactgaatttcacataacccaaggcctactactttgatactctttttatgattcctcaaactcattgtataatgtgttttgtcataaatattctcattgcctttgattcagtttctgggcacatggtgttttctagaacaggtatgagggttaagccttctctttgactcttcgccctttctcatttatgagatgaacttgtttcacctttatactttggattcatctttttacagctcacattcacttctttgttgtgtttataccttcacaccgtcacatgggctgcttcctgtgcctccagaacttttcttattttaccaggtcacgtgcttttcccacctctgggaagcttttcctgcctgatttggcggttctcctttgtgtactgacctgatctaacttaaaatgatacatgctgcattctaaaatatgacttgaaacatgaaactggaacagtgtattgaattttctctttatttatattaaagttgtgtggaaactaatagtttggctatttaaatacattttccaaatgatagatgcacattcttttatgttttcatcatttttaatttcttggtaaggtgtattgttctctactttataaaatagtatatactgaatataacttttcaaaatgacatatcctcatagacaccattttttagccataatctggttttagatgtagatattgtgggccaggagatttttaagttaaggaattacattaattccagattgaattgttttcttgaaaacattcctggttgttagtttacttttgtgtgatttttatctttttcataatggcagagtgaaaggagtgaaaggtagttagttgtatgttttccatgattgactatgtaaaaattatttaattgcaggatagccatctcccagattatttttttcctatttgcagatatttttgggttgctcacacatttaatatatagttacttttatattatcaaaataataggtcaaaggtatctttgtaatttcaacctattattatttcacttggatggtgatttctgggtgtgaaaaggacaagacctcatcttttcaagaattcatactaggtaagttaaaggagatacttgccccattgcctatgtattagtccattttcatactgttgtgaagaaatacctgagactgggtaatttataaagaaaaagaggtttaatggactctcatttccacatggctggggaggcctcaaaatcatagtggaatgcagaagatcagcaaaggcatgtcttacatggcggcaggcaagagagcgtgtgcaggggaactgccctttgtaaaatcatcagatctcatgagacttattcactatcacaagaagagcatgggaagacccatgcctttgattcagttacctcctactgggtctctgccacgacacgtgggaattatgagagctacaat

SEQ ID NO: 1885472 - DNA, 4001 bp, Homo sapiens
caggttggtctcaaactcctgacctcaagtgatccgcccgccttggcctcccaaagtgctgggattacaacaggcgagagccactgtgctgtatttttgagatactgtttcagtctgtcgctcaggctacagtgcagtggttcaatcatggctcactgcaacctggatatctcgggcttaagttatcctcttacttcgcctcacaagtagctgggactataggtatgcgccaccatgcaccacgtatttatttttatttttagtagagacaaggtctcactatgttgcccaggctggtcttgaactccctggtctcaaggaagttggaagccatcctcctgcctcagcctcccaaagtgctgggattacaggcctgatccactgtgcccagcctagaaatttatttatttatttatttttgagagagtctcactctgtcacccaggctggggtgcaatggcacaatcccagttcactgcaatctccacctccaggatccaatctattcttatgcctcagcctcctgagtagctgggattacaggcgtacactgctacgcctggctaatttttgtattttagtagagacgggatttcaccacgttggccaggctggtctccaactcctgacctcaagtgatccacctgcctcggcctcccaaagtgctggaattacaggtgtgagccaccatactcagcctagaaattcattttagaaaggccttgttcttatataaacttatatgtaaagccagtggcttttgttcctgtgacatgttcggattaatggacaaggaggcatatgggtggttagcgggatggaggcaggtctaaaattctggcacatcagacctgtttgctggaatagaacagcaagtgggaaggacaggatgaccacagctatttatcaggacgggcacacagatgggcatggtgacactcggacaaggcccaggtaggccctagaggtctaagatgtagaaacccttgtccaaacagggggtagaaaagagcaagaaagaattcaggtgggtgatgcttgcaagtatagagaggaaagcccctggctggggtatcagggctcttggcttccatggaggcaggcgcttggagatccagtccggctaccatggggcttggctatattcaatctgcattccccccccaagcaagcttataatggaatcactatggaaacagtattcatgtaccagaagtctatttttcacttaaattttgtttgaatgctttttgtttttgagtgctttgaacccttgaggtgaggcatttctgattttacagctctgcctgaattcagatcctcaaccccactgaattaggggaacccagaaaagtaccccatcacgagttcaatcagaaaatatcacaagctttctaacataataatttatgaagttattctactcacttgaactactttctcaaataggaaaaaataaagctgagctgccaggcatgaagaacagggtgcaaatatgaattttataaaaggagaaagaggaactacccatgccagtagccagcactgcctaaggatttctcacagggcatttttcttgcttgcgggcttcctgtctctggtaatatcatcatcactgctggcttgagatcctccctattttgcagctcaatgtgcagatatttagaagcctattataaatttatcgccaacaggccaacaggtttcgctcctctccttcccccattacttatctttcttcttaattcaaagagttaaacatgtgtaatttgttctttgcctcttcatttttgtttaattattttgtctttttctaagttgtgtttgactccggtgattcatccaatatacgtaaaaagaaacaaaccaagtgcttgggacgcatacccgggttatcttaactgtgcagagcaggtttcctcccactccgcccgtagttacccagatcatcgcctccgttttctgtttaggcagcgggggctcgccgtcccctcgcccgcggtgggtgtcgcagctggtcccctccagggttctcccagatcgccgccgccacccccgcgcctccccgccgcaccccttcctacgcgggggtctctgggtccccggctctaggaccgcagggacgcgggcaggaggtggcgcccgccttcggtcctgccctctgccgcgcgcggggtggggacggaccggagttccccggctcgcgcacaagggccgcggaggggttgccgaggggtgggcggggctgcgccgcctggccgcgccgctgcctggcaggccgggcattagggcctcggcggagcccgctcccctgtgcgctgggcggggtgggcggagggcggcttcgcgtgcaggcgcgggcccggaggcagcggctgcgccctgcgccggggcggagccgggggcgggccggcggccggcaggcgggggctggggcccgaggccgggagtgcctgagcgccggcggcgacgacggcagcggcggcccagcgggctcggtggttgggtccgcggcggctcggggtccgcccgcgggctgcggtgcgagcgggcggcccggctcccctcctcccccgcccgccgccgccgctgtgattgggtggaagatggcgctggccggatggaaatcctaatgacagtctccaaattcgcctccatctgtaccatggtaggtggcggcgagcgggcggccggggctgccgggacctctcgggcgggcgggcggcgctggacccgcctctcccagtggccgctcgcggggcctagcgccggggcgggcgggcgggctgggcggcccgggcggcccgggcgggggcggttggacggcgcgcaggcggggagcgcgggggtgagcggcccaggcggctggggagggggcgccgcctggtgggccagggcggcgcgagggtagcggtgagtgggcgaccgtgccagacgcggcgtcgggcgggcaccggcctccgggagtccccggctgaactgctggggtccgctcgggacgcggggacgagggccgaggcgcgcccggcctgtgccggggtgaggggtgggcgcgcgcgagccagagcgcggccccgggccggggtcgtcggggagggggcgcggagccgcgcgggctccatttccttctggtcgcgcgccgagcgggaggggtccccgggaggggtgggggtcggcgggcaggaaggaagggtctcggccggggcgggcagcgctcattcccgcctgggagaggacggaagtcaagtgcagatttcctcgcgccgctggctgggccgagtccccgaccccgcgctgggggaaaggggcgtgtgtgaaggtggaaactttaaataagtactgttgaaattctctccattttctcctctgagaggcacgagctctcccgtttccagccgtgtgtccaggtggcagtcttgtctctgggaatgcacgttaatcttgaaaagcagcattagctttcctgtcatttgtttacttcagcccaccagacacatctgtatgtggctggagctaggtctgtctgtgcggggaccgcctgccaaggcgatggtatttgttttcctagggcgtttaaatagactgtaagggaaaagtgctaatgcccgctggaagtcccgaattaagcaaaacgtgggcgcgtttaaaacttggtgttttgtgcgtggccagaaggaccacagttttccacatgatgagacaaattcgtttcattagttcctcatgagcttatatgtagggatcataatttatgagtcatcaccgaaaaaagttgttctttgcaacgtgggcctagtggttgttattagagacttctgaaatcttgtgtttcatgcctcactggccctatttatgcaactgatttcatataggagatccccaagaaattttccatctaagggtggtacattgtatatatttttctttaaggagtggtgaatcagatctgaaagatgccttaaaaagcagattctctactacacgctgaggaacagtacaaa

SEQ ID NO: 1885473 - DNA, 4001 bp, Homo sapiens
tttgacttgtctcagcctgacaaactcttgtataatatatcctacatgaatcatttcaaacactaccttctctgtgaagactccaggtgcagcaatccactccacagtatgttgaacctaaatctcttgacacgtgtctcactgtattgcaattctttatttgcatatttatcatcaatacctaatgtgagcccattgattcacagtatctagcagggtactgtttatacagcagttactcaataaatgttgtcgttgggaggctgaggcaggaggatcacttgaggccaggagcttgagaccagcctgggcaacataacaagactccactgctacgaaaacaaaaacacaaaaattagccaggcacagtggtgcacgcctgtagtctcagctactagggaggctgaagcaggaggatcactcgagcccaggagttcgaggttgcaatgagctataatactgccgctgcaccccagcctgggcaacagagtgagactttgtctctaaaaaaaataaaactaggcaaaaaatgttgttgaatgctctaacttgtgttgatctctccattgtcttaactccaagagctcttagtgcttatatcaaccactttgcaaaattgccttaggttgttctcccattctttcaggtgtctactgagttccagcgagattaaatggagatatcttgaccaaggtattcaattcttctagcctcagtttcttcatctgtaaaacggaggataataatagtacctcaaagcatttttatgtgaaatgggataattcattaaaatcttgatacatacaatgtgctcaaagtaggaaaagcattttataagcttacatcctaaatttatgtcttagggttgctatgaggattaaatgagaagatacacatgaaacgaagtcataatatattgtgtaactacttattacctttattttcactgtctcctcatctaggttagaagcctggttcagccttcattcctcaagttcttccgctggatgcccaaagccttccttacctagccttgtttgacttttacagtctccactctaacactctcttctcagcactcatcacagggtcaggcgcagggtaggtgctatgtatttagacagtggcagctctagaattagcaaggtctttagctgaaagtgaggtcttctgccttctttttgatgtttgcttgtataacttgtctcaaatattttgccttagtcaattcactgtgacattttggggatgcagtctaattacattaggcttagtttgctttgtggtaggaccatttccgatgttggaatgtacaagagggaggcagccttagccagtgtcctactttttcctttactaaagacataaatcatctttatataacttttgtattacagcatgactagaaaagtgcttgatctggatcctttctgatatttaagcaatttccatctatcactaagatgtgaattttttccttagaatttaggaagcggtaataaaacacagaaacaaacaaccaccaccaaaaggacaaagggtaaagctttcacgtacggtttggaaacactagtgtggttacaatgaatcaagacagttgtgaaagttcccatcatcttgtgcatgttttctccatttccgaaatctgaagccgaatacagggaaagctccctatacttactgggcctttaactaagaaacgaagacttggggcaagcatctgaagagtcacaccgacaaatgctcctaaaacccttggcatttactgaactcctgagattctgtgggatcgcagggaaacggcgggtgaaggcctggtgcatccaggtgaacagacagtctcacggactgcgaggcgcttgccagagcccagcgccgcagctcggagcacccccgcggtgcgggcagtcccgggacggtgccggctctttgggctggagctccgcaggctctttccgcccgtctgggccatgcagggccgggtagggccgggctgagtctactgagccggccgcgccgcgggggaaggagtttccggcggactcggctaggtgccgcttcctgtccccttctccgcgctgcctcacggtgcctgcacgggacgccgctcgatccccgagccccctcgccgtccccgacagcccccccggcgccatgcaatcccggcttctactcctcggggcacccggaggccacggcggcccggcctcgcggcgcatgcggctgctcctgcggcaggtggtgcagcgcaggccgggtggcgacaggcagcggccggaggtcagactgttgcacgccggctcgggggccgacacaggtaactcggggtgcgcccctgtcctccctggtgcccctgcgctccgtgccgggtccccgcgcgcccccgcccctcctctctgttgcttcgctgcgcttggaaggaccgtttgccgagcggggagctgaaagattgaggttctagtcccgacctcggcgctaactgctgtgtaacgtgggggcaaggcgctcgccctctctgtgcctgattctgcaacccgaggggtctggactaaggtttctgatgacctagaagagtgatttctccttcccctgccgctgcctttacccccagaattctgacttaggttataatactcgtagaggttaatgcctcagccctatggaattattgaaagctggatttgaccttgctctctgagcctcaagggcctggaagccggtctgtgtcatgttctagccagggcttgtggcggcttagaagggaacattcttgccaaagaacccatagttcacggtgttttaaatgcatccccgagcctttccaagttttacaggagttttccttaaagtttcacgtaattcttagagctgacagttacaccttaatttagttaaaacacttgcctctacaaatgaggtaattgaaacccagaagggaaaagtgattcgctggagaacacacaactaattactatgctagaatcacatgctttgatttctaagctcagtattttttggctctacttgagctggttttaggaattctttttcttgtgtgttggtggagttagagttactgtgatggttaaggaaaggatatctgttgttgctacccttgaatggtgaagtgattccagacaagattttgtcaatgtcagtgctgcttggaataacaggttttcactatgaaattgtaggtttcgttgtcctcttgcattttccccgcaacccccagttttccttgctaagaaatgagcatatgggccgggcgcggtggctcacgcctgtaatcccagcactttgggaggctgaggcgggcggatcacggggtcaggagatcgagaccatcctggctaacacggtgaaacccccgtgtctactaaaaagaaaatacagaaaaattagccgggcgtggtggcgggcgccagtaatcccagctactccggaggctgaggcagaagaatggcgtgaacccgggaggcggagcttggagtgaccggagccactgcactccggcctgggcgacagagcaagactccatctcaaaaaaaaaaaaaaaaaaagcatatttaggtcccacgtatttcgttttattcattgaagacatacaccacccccgtcccccaccatagtgttgcaatttcaaattttactttttgtttttttttttttttttgctttttctcaattactctcacttctgggctgtttattcatttgttttttacattttttgtgtgttctttatttgttttttgctcctttgccctagaaggcagaggtcaaaggtggaagtatagcataaactataggttgggttttggagttaaacaatttgggttggaatccacttatccactatctaaccatgggtcgttgagggtaggttacttaactttgtgtcctagttttcttaactgtaaaaggataagaagaatatatctattatggttgttgtgaggatttattaattaatataatctgtggcacatattaatgct

SEQ ID NO: 1885474 - DNA, 4001 bp, Homo sapiens; identical to SEQ ID NO: 917524

SEQ ID NO: 1885475 - DNA, 4001 bp, Homo sapiens; identical to SEQ ID NO: 1241080

SEQ ID NO: 1885476 - DNA, 4001 bp, Homo sapiens
gcgcgctccaggtccagctcgccaagagtgtcggcgcggtagcgcgcgtgggcctggaaaagcgcgcccttctcgtcgcgcagggacgcgcgcagcgtgaccggctgctccggggctaggccgcgcacggcgattcgcaccggttcgtcccagcagcagcggcccgcaggctccaggatcagcgtcgccgccatccgagcaggaaccctaatgatctgaccaacctgcctcagctgtggagaccccaggaactgcgccgaactcttcaggctccattggtacagccgggacgctcgaaggacagcaggagatgaggccattttgaattcagacctgagaacaactgaatgggggtggggagaaagaagcttgttagacatcctctcgggctgccgtcgcaggctaagcgcccactagggcagagctgtctgctaacgtgagcggggaaggccagagtccagccgatcagccagaccaaatatagacacactggaacttgcttaaagtctcctgtgttgaaacctccactttatgttggaaagctacttcctaggtttgcttttcagaagcttgctggcctgcggaatgggctggaccagggctggttcttaaagaaccaggcagctagcagtctccaggctccaaactcctgatggcgaagaggaatgcagagctggagttagttttgatcactttgttgaataattcacactcattactaatcttagggcttttctttcaaaatctgcaccatggtgttttgcttttgtgttctctgtatatgcctatcctccacatcaatcccacatcgaagggtgctggcttcttactagctgtgtgacctctgagcttcattccttacaagtgtaaaaatagccaaatggggtaataggtagtaatttctcaaactcctgactttgtaatccgcccgcctcagcctcccaaaatgctaggatttacaggcatgagccaccgcgcccggctaatagttattattttgttttactggtttctcaattattgtcccagtcaggcaagggttactttttttttttgagagacagggtctcactacattgccagactggagtacagcggcagtttaccatcactgcacttacaaacctccaactcctggtgctcaagccatcttcctgactcagcctctcaaatacctcaaaggactaccggagctccccatgcatcgcgcttttttctactttttcgtaagctattggtttcaccagaggtgtggtgtttttttttttcatcacttaagctttaggcccctgccaagcccttgtacctgattttataatttcctacctgtgtaattagagaaagctataaatgtgtaggcttcaaacccacaaaacctgtgtttgcctctgctcctaataaggctgtcctcaaggtaagcctttttatctcgttccaaatctctcatgtcccacgtcattaatcatacaattccctgtcagttctaattacctttgtataacacctcaagtatgttctgtgcctagaactctcaggaagtaagaaggcaaataattctgtgtctggaattggttccttctggtggattcttggtctcgctgacatcaagaatgaagccgcagaccctcgcagtgactgttacagttcttaatacagttctgaaaagtagtgtgtctggagtttgtttcctctgatgttcagatgcgtccggaatgtgttccttctggtgggttcatggtctcgcttctcaccgacttcaagagtaaagccacagaccttcaaggtgagtgttacagctcataaaggcagcaggtccagagttgtttttcttgttcctctcagtgggttcatggtcttggcttcaggagtgaagctgtataccttcacggtgttacagctctgaaatgcagtatggacccaaagaaggagcagtagcaaggtttattgtgaagtacaaaagaacaaagcttccatcagcctggagcggaactcacgcaggttaccactactagctggggtgaccagcttttattcccttatttggccctgctcatgtcctgctgattggtccattttacagagcgctgattttccattttacagagtgctgattggttcgttttacaaagtgctgattggttcgtttttacccagtgctgattggtgcgtttacaaacctttagctagacacagagtgctgattggtgcatttacaatcctttagctagacaaaaaagttctccaagtccccacccaacccagaagcccagcggtcttcacctctcaatagtagctaatggttaatacttacaagaaccctatcagtaaattaaggcccagagaatttaactgattttctgaagatcacacagctagaaagtggaagttgggcaagatggctcacgcctgtaatcccagtttacttggaggctgaggtggcagggttgcttaaggccaggagtttcgcaccaacctggacaacatagcaagaccctgtctctaaaaagaaaaaggggatgggcgcggtggctcacacctgtaatcccagaactttgggaggctgaggcgggtggatcatgaggtcaggagatcgacaccatcctggctaacacagtgaaaccccatctctactaaaaaaaaatacaagaaattaactgggcatggtggcaggcacctgtagtcccagctgctccagaggctgaggcaggagaatggcgtgaaccccagaggtggagcttgtgagaggtgacagcgtgctggcagccctcacagcacttcctctgcctgggctcccactttggcggcacttgagaagcccttcagcccaccgctgcactgtgggagcccctttctgggctggccaaggccggagccgtctccctcagcttgcagggaggtgtggagggagaggcgcaagtgggaactgaggctgcgttccgcacttgcgggccagctggagttccaggtgggcatgggcttggtgggccccacactcggagccgccagctggccctgccagccccgggcaatgaggggcttagcacctgggccagcggctgcggagggtgtgctgggtcccccagcagtgccggcccactggcgctgtgctcaatttctcgctgggccttagctgccttcccacgggaaagggcttaggacctgcagccctccatgcctgagcctccccccgcctccgtgggctcctgtgcagcctgagcttccctgacgagcgccgccccctgctccacggagcccagtcccattgaccacccaagggctgaggagtgtgggctcacggtgcgggactggcaggcagctccacctgcagccccagtgcacgatccactgggtgaagccagctgggctcctgagtctagtgggaacttggagaacctttatgtctagctaggggattgtaaatacaccaatcggcactctgtatctagctcaaggtttgtaaacacaccaatcagcaccctgtgtctagctcagggtttgtgaatgcaccaatcaacactctgtatctagctactctggtggggacttggagaacctttgtgtcaacactctgtatctaactattctggtggggacgtggagaacttttgtgtctagctgaggaattgtaaacgcaccaatcagtgccctgtcaaaacagacccctgggctctaccaatcagcaggatgtgagtggggccagataagagaataaaagcaggctgccctagccagcagtggcaacccgctggggtcccccttccacactgtggaaactttgttctttcgttctttgcaataaatcttactgctgctcactctttgcgtccacactgcctttatgagctctaacactcaccaccaaggtctgtagcttcactcctgaagccagcgagaccatgaactcaccgggaaaaacgaacaactccagacacgccgccttaagagctgtaacactcaccacgaaggtccgcagcttcagtcctaagccagcgagaccatga

SEQ ID NO: 1885477 - DNA, 4001 bp, Homo sapiens
ctctctccttgcgtctaactcatgacatcatatttttgtttctgtgtctgtctgctgggctgtgtgcgacagggactatggctttttcatctctgtatacatctagtacattccctgatatgcagatggtgctcagcaaatatttattgggtgaatgaatggatacagcactaccattaccctctgtgttaggtttagagccacagtttagaagcggtgataaaatggtccataaatcagctgtctctgtggctcagaagcagtgcttcctcagccaggggcttttggaaggcacagtgctggagggtaacactcatatgaatatgtgtggttgacgaatgatgcagccagagacaccatccgatatctgctcacaacagcagcagtggctcttctgagaaccagggggcactttcttcaccttttccatgggtggctttcaggtatccaccatcgcctggagagaaggtagaggacaaaatccagcccataattcagggcccttcctgtcagtgaacttcttcttctaactccttcactcacttctgaattgacatatttgcattttaaatttaaatttaaatttaaatttttgcagttgatgcagccattcatcctacaaatacagtcctcccttagtattggcagggtattggtttcagcatccccatggataccaaaatctgaggatgctcaagtccctcacagtcagcctgggtatctgcgggttctgaagcctgtggatataaagggccaaatgcatatatgtatgtatatattttgagacagtcttgttttgtcacccaggccggagtgcaatggtgaaaatgcacctcactgcaacctcgacctcccaggctcaagggagtctcccgcctcagcttcccaagtagctgggactacaggcgtgtaccaccatgcccggctgatttttgtatttttagtaaggacggggttttgccacgttggccaggctggtctccaactcctgggctcaagcgatctgcccgcctcagcctctcaaagtgctgggattacaggtgtgagccaccgccaccgtggccagcctcaaatccataaattaagctctactatgtgctgggtgctggggtggaagactggcacatctgttgttcacaagacagtgcataacctaggagaggtttatttgctactgttcttcggaaccgggatcccatagaggagcctgccagaacgcgaggcctgctccttcccgggcattagcgcgtttagactctcctcttactaagcccagggaaaggagtcctggcaggtggcaagcagaagttagagctatttagtcactcccgccctccatcctcctccaatgacaataaggttttgtttgtcaggcataaggttaccggattggcctgtgaagtccagaagctctttccgcgctcggctctttgagcctcagtttccccatctgtcaggcgtgtgtatgtgggaggggggtacggagtagatttacctagatcactcggggttgtcccttccagttttgagggtgatgtcggggtgtctgtgaggaggagggaggaccctgccacgcgaaggtagttttggtcgcagcagccagccaagtgtgcccgcggagaccggcagggaattccgggaggccccgctgtggagcggtccccagagcccgagggcgagctagaagagttcctgcggcgaggcgggaacgctcggtagcctctgagagcagttcgctggcgagaaaccgggttcctgcagggcagggatcagccgggtcgcgccttgtagggtggggtggggtggggcggggccggggggggcggcggtggagtcgtgaaattcccaagaaattcctttccattgccccactccgccccctttcctagggtgccgacctgcccagacccaggttccctgggaaagagaaaatgaatgttcttcgggtttcctcgcgtcctttctccagccccctcccaccccggggtttggagcgcgcgtgggagcgcaataacggtggcggggaacgggtccaatcccggcggctcctggggttcccaagcgcgctgccactcagtccccgagctcggggaggcgtctcccggcttcggtcccgttcagcttaagctggcgtcacatgagccgcgggggaacgggcaccgcgggagtgggcgggggtgtgcgcgccgggagggggccgcccagtccacctatatgcgccgcagcccggctgacggatgccaggaattcccaatgagaggcgatggggggaagtttgggcaactcggcctggccaatggagagcctcgggagggctctgccccttccccccgcccccgcccgcctcggctcccgcagcgctagtgtgtccgcctagttcagtgtgcgtggagattaggtccaagcgcccgcccagaggcaggcagtccgcgagcccagccgccgctgtcgccgccagtagcagccttcgccagcagcgccgcggcggaaccgggcgcaggggagcgagcccggccccgccagcccagcccagcccagccctactccctccccacgccagggcagcagccgttgctcagagagaaggtggaggaagaaatccagaccctagcacgcgcgcaccatcatggaccattatgattctcagcaaaccaacgattacatgcagccagaagaggactgggaccgggacctgctcctggacccggcctgggagaagcagcagagaaaggttagcagccgcccccgcccgctgcagcccccagcccccagcccccagccccgacccgctctgcctgccgggctctcggctccgggctctgaaccggttccgggcgcgcacgggagggggcgggggcggtgcggccgttgcgaggtggggtgttgggttacaggcgcctggcggaagcgggagcgcccctgccccggagcccgggaacgccgggccggagcgcggggaggtggcgccgctggcgggcaggtctccttgggggtccgtggtccaggccaccctgcggctgttgcaaccatccccgcgtgggctgtgctcgggggcggtggtcttcaggctggggctgagaccccggctcggggctgcttgctccggatcgattttcccttttcttccgcccctggccacctctccatatggcgtgcggtggcagcgccgcttcctgggccgccctgggttcaacctgagcggcgggcctcccgggaccctgctgccccttaggcggaggggagagcgccggagagatcggcggccgcctccggatctgcctggagaaggaccagctggagtgcggctggggacgagaaaactggggggcgtacgcgggctcccccgcgggccctgtgggggcggggtcaggacagcagaccgttttattgcttaactcagtgggttggaagctgtaaccccgacatgggcttgcgctacgtcctgcccctccgacccccgggaaaggtgggcagctcggttcgagttgaggggctgcagaacgagggtcagtcttaggggatatttggggccagtcactggggatccctacttagccacggagctgcatcccaggcaggcgcggtgtgccgggtgcgcgccccgccacgggagctgggctcggagctggcgatgggacccgggcacagtggccagtggcaggaagaggtcagaaaccactcgtggtggtggggggagggcgcctcaaccctaccgctgcttcctgcctgcgcggtgagcctgtgcccccaggcggccacgtaccctgaatacccctttccctccccctcctcccggctgcccacttccatccggtccctccccgtttcataccctccccacccccaggctgatctgggaatggggttttgggtgggggggggacaggatggcgcgtccctttggatagtgcggttagggctgggcttgagggagaacgctcatgtccaaaaatggtaacattcattcccttttttaaacttaaaaggggggtagtttatag

SEQ ID NO: 1885478 - DNA, 4001 bp, Homo sapiens; identical to SEQ ID NO: 1241091

SEQ ID NO: 1885479 - DNA, 4001 bp, Homo sapiens; identical to SEQ ID NO: 1241092

SEQ ID NO: 1885480 - DNA, 4001 bp, Homo sapiens
cattcaggacataggcgtgggcaaggacttcatgtccaaaacaccaaaagcaatggcaacaaaagccaaaattgacaaatgggatctaattaaactaaagagcttctgcacagcaaaagaaactaccatcagagtgaacaggcaacctacaacatgggagaaaattttcgcaacctactcatctgacaaagggctaatatccagaatctacaatgaactcaaacaaatttacaagaaaaaaacaaacaaccccatcaaaaagtgggcgaaggacatgaacagacacttctcaaaagaagacatttatgcagccaaaaaacacatgaagaaatgctcatcatcactggccatcagagaaatgcaaatcaaaaccactacgagatatcatctcacaccggttagaatggcaatcattaaaaagtcaggaaacaacaggtgctggagaggatgtggagaaataggaacacttttacactgttggtgggactgtaaactagttcaaccattgtggaagtcagtgtggcaattcctcagggatctagaactagaaataccatttgacccagccatcccattactgggtatatacccaaaggactataaatcatgctgctataaagatacatgcacacgtatgtttattgcggcattattcacaatagcaaagacttggaaccaactcaaatgtccaacaatgatagactggattaagaaaatgtggcacatacacaccatggaatactatgcagccataaaaaatgatgagttcatgtcctttgtagggacatggatgaaactgaaaaacatcattctcagtaaactatcgcaagaacaaaaaaccaaacaccacatattctcactcataggtgggaattgaacaatgagatcacatggacacaggaaggggaatatcacactctggggactgttgtggggtggcgggaggggggagggatagcattgggagatatacctaatgctagatgacgagttagtgggtgcagtgcaccagcatggcacatgtatacatatgtaactaacctgcacaatgtgcacatgtaccctaaaacttaaagtataataaaaaaataaataaataaaaataaataaaaataaaaataaaaaataaaaaaatactttctttcttctagcgtttactctaagcagttgatagaagccatacagattattaatattttgcttagatatttctatggccagatgtctatatatatatatatgtattatgtattacttttattttatttggttgttttttatatatgtgtttatatatgtgtgtgtgtgtgtgtatgtgtgtatgtatatatataacagaaatatctaagcaaaatattaataaaatatttttgtctatatattcatgtgtacatatataccatatatatgtagtctatctatctatcatctatctatcatttgattgtttgtttttgtagagacaaagtctcactatattgctcaggctggtcttgaactcctggctcaagcaattcttctgcctcagcctcctaaagtgctgggattataagcatgagccaccatgcctggtcagtgcattgcttcattgctttttaattatttttcccacaacgtcctctgtcatgaggataattcagccaagtttattgccactttataacaaggatgaccttaccttcagtttctaataagatattcctcatttccatctgagacctcatcagaaaggccttcattgtccatatttctgccaatattctgttcacaagctcttaatctttaagacttaggcgagagataagcaggaacaaaccaaactcaaaattggcaaaattggcaatctaaaaaggaaataataaagctcagagaagaaataaacaaaaaaagactaaaataaagatcaatgaaatgaagagctggtttaaaaaacaaaatccacaagcctttatctagactaagaaaaaaagagagagaaggctgaaataaataaaatgcagatgaaaaggagatgttacaactgatagtacaggaatataaagggtcataagagactattatgacaacaaatttcataacacagaagaaagggatcaattcctggacagatataacctaccaacattaaattatgaagaaatagaaaatttgaacaggccagtgatgagtgaggaaattgaatcagtaatacatgagcgaggaaactgaatcagtaataaaaagtctttcatcaaagaaaagctcaggaactaatggcttcagtgctgaattctacaaacatttgaagagctaatgcctattctcctcaaactattccagaaaaactgaaaaggaatgagtattgccaaactagttttaccaggccactactgccctgattccaaaaccaaacaacacagcaacaacaacaaaaacaacaggccaacaaaaactccttgatgaatgtacatgcaaaaattcttagtaaggtgttagcaatccaaatccaacagcatattaagaagactattcaatatgatcaagtgggattaatgccagtgatgcaagatgatttagcatacacaaatcaacaaatgcactacaccacgttacaagaaagagtgacagaaaccatgtgatattttaatagatgcagaaaataatttgacaagattcaacatcctttcatgacaaaatttctcaacgaattaggtatagagttatgcacctaaacgcaataaagaccatatatgacaaactcccagctaacatcatagtgaaaagggaaaagctcaggaaccaaataagaaggcccactttcaatattttactggaagtcctagccagatcaattaggtaagagaaagaagtaaaaggcatccaaattggaaaagaggaagtcaaattggtcctgtttgcagatgacttcatcttgtatagagaaaaccctaaagactccaccaaaaaacctctagaaataataaacaaattcaattaaaagttacaggctacaaaatcaacataaaaattattaccatttcaatatgctaatagtgaactatcttaaaaagaaatcaagaaaacaattttatttacaatcgcaacaacaactacaacaacagcaaactcctaggaataaacataaccatgcaggtgaaagatttctacactgaaaactataaaactttgatgaaagaaactgaagaggatacaaataagtagaagtgttcatagattggaagaatttatgtttttaaaatggccatactacccaaagcaatgagatttaatacaatccctatcaaaataccaatgacattcttcacagataaagaaaaaacaaaccataaaatttatgtgaaatcataaaagattccattggagtgtgaagctggaggcctcacactacctggcttgaaaatatattacaaagctattgtaaccaaaacatcatggtagtgacatagaaactgatccatagaccaatagaatagaatgtaaaacccagaaacaaatcaacaaccctgatccttgacaaaggtgccaaggacacacattggagaaaagacagtctctttaataaatgatgctagcaaaattggatattctatgcagaagaatgagaccagatccctaactctcaccgtatacaaaaattaacttaaaatggattaaaatcttaaatataaaacacaaaaactatgaaactagtagaagaaaacataaagaaaatccttcccaatattgggctgaatttttcaagaatttggaaaaataagacctcaaaagcacaggcaaaaaaagcaaagatacacaaacaggattatatcaaactaaaatacttttgcactgcaaaataaactattaacagagtgaggagacaacctgcagaatgtaaaaaaattttaagactatttatctgacaagaggttaatatacagaatatataaagaacttaaacaattcaacagctaaaaaccaaatacttcaacctaataatgggcaaaaagacctgaatcgac

SEQ ID NO: 1885481 - DNA, 4001 bp, Homo sapiens
atgcagatctttcctgggccacacacagtaccatctttcactgcaccaatgtcagatatgtgcatccttaaatgatagtcaataccccagcaggtgacaccattgatatgagtgtgctgcaaagtaaaatgatcttggagaagaggaatgtctctcacattctcacattgaactctcccacaaaagacatcagagatatgacattttaggtatgttgtgccatttataccacagtgaccaaaacggtttccctgagagttgatttctttatagcaattctgagatgcactttttgcatctttaccaaaaatctccctgcaatgctggtcatggttattacacctcttttgatagcagtaggaactgtcactacaggggatcccgtcctgcacatatctatcttctggacactgaagggatgttccattgcaccattctggaaggtcacattcattgacctcttgtctacagagttcccctgatggcatgaatttgcagtctttgcaacaaagcccaaaagcacagggagccccaggccttagagtgcagttcaatggacaacaggcatcttgttcacactgctgtacggatccacagtcacactgctcttctctttcaaccacaccattcccacagcgctttagcataaagatttcccccaatcttggaggattttgcagacatgatccctggtttaaggtggtcttcataaaatcagcgtaactgcaattggtgaatttctctgctggcactctaaaagtattcatgatgcaacctctttccccacaaaaacagaattcttcatcatgctgcatacccaacgtatgacctaactcatgggccacagtgttggcaaaaagagaccaggtatctccttgaaaattatcaactccacaatcaataggtggacgacatattcctgcaatgtaggctaggccaagtatacttataagtgaattttttatgaacgtatgtgcagcaccatgttgtagctgggaacgactgatttgtttccgttgagagaaatcatttaggatctgttctatgcttgtcattgggaaaacatttccttgattccaaatttcaattccaatcaaaattatgtaagtacctaactgctgatacatggaatccactatgttgacaacaagaaatacatcctcttgcacctttgagatgttgctttgagagtaaatgaagaaatcatggttcaccacaacaacgagctccagaaaccatgcatgagtccaccagtcaccagcaaattttggttccagagctgagttctcagcctcttcaaattccaactgttggcgtgctacttccttctctgttaagctacatctcatagctgggaattgtgtctcattactgtttactttgtaaaccaggtgttcaaatgtggcagagtgcctgatgggttcaatttcatgagtgaggccgtttatttttaatactcctcaaaagcccccacaacaagcactgaacacaaccagagactcaggggcaccctccacgtaaccatgatagtaacagtcatctgggatgaagagctgatcctccaggagtgcacgctcatctgtgtaggtgaacactgggaggtgtctagaaaccaagagcttcttaaccctcatatgaacaacatgtttctggtccccaaaccgcagactataggagagccatccaggagcctttgcacttctgcccctgctgatcaccttcaaggggatcaccacttccagggaagtgaaatgctgggagggcccagcctgacagtagccagaaatagacaaaaataccccaagccagagcagcagaagagtgaccctgatgtacactagggtcccatccactgccattatgaagctgtcgttatggagccatctgtccagagcagaagaggacaaggtgtgaggcactgctggtctggcttctccctctaagctgctcaggatgcagggctgaccctacggatctgtgtcctggcagagcaatgttggaagtaaaaataaaaagatgggttggaaaggtgataagtaaggaaatcaggagagaaaaagaatggagtggtgaaaaactggttgatgaatcaagaaaatgctttggatttgcttttagtaaatgagggtggggatttagggggtatagaggagacaacattggccacgtggtgataatagttgaagttggaagatgggtacttaaatagttatctcagtctttacaggcagtatgaaaatgtccataataaatagtaaaagcaaaagtaaagaaacttaaaagtagggtggctctatatctcaatttgtccaagatagtattagtttatgcctgttgcccttgcaatatctattgatagtgtctcctttgactatcaaaactggagacatcaaaaataatcaaaattctgtgtcaagttgcatcagtcttatgatttactttagtttctttatctcaaagttatttactattccacattgtattcatctttacttacaactttattagactgcaagattcttgacggcatggtttatgattttcatttattttagtatcctctataatgtcttgtatagttctgcttacaatgaaaaatgaaaatgggaggaagggtggtgaagtgttttgcattataaattaatgctactaaaatgtattcatattgtattataatttttagaaaagaaaaataattcttgaaacactgacatcctttaagggtatggagaacataatgtttttctccccagttactgacaggagagtcccaaagacaaaaggaaaagctttcagaagagaaaatgagaatctgtgcagtttaaaggtcttcggaaaaggaactcttgtcttattagggcaaaaccattggagagtctggtattttaggatcgccagggaagagtcccaatgtttgctcaaatatatttaccaacagtttttgaaagtggggaatttctgcacctgtcatacaatctggctggcaacgctcatccatttctttttctatttattaaacaagtctttatgtgtttggagcatacatagtgcaggacattgtgctagatattagagaaagaaaatcaaaatacagagcattaaataaattatcaatttagtgcagaaacttgtggcaggagcaagaataagctttaggaggcctataatattgtattcaatattttatatattttgtgccttttttttttgccgaggagagagtccatatatttcatcatagtctgaaatgactgtcaaaagtgaggctaataagcactgagcatgtgtagaaacaaacaaacaggtaattgtaatatgatcaaaaccagattaatctgaagataacaaagtttatgcttcagggatcctcattgtacagacctccataaagaccctgaaaggggctccgcaatggactttaagaaactcctcaaattatgagtgatcaaaattagtcactatacaagaaaaatcagaaatattataactgaaaaactctgaaatattataattcatacataaaagacttaataaaggctttctaaaatttgacaatagtaaatttaattatttatctcattaccaataacaagctatgaagctgaattttcttttctaaaccattaataatacaaaacaaatttttattaaacataccagggaaaggcaaatgcctttcagttcttgccacagaaattataacaaaataattctcttaagggagacaattaaataagaagcaatttaaaaactgtagggaaaaggtatcataaaagtgagtcaggaagttgattaatataaatatgaagggattaaattttttgatgtttatggtgttttcaaccttttaatatttataatttgttgcagcttctttcttatgctaaataaatcctcattttcatacttattttctgcaattgtaacttggtattatttttcttaaagtggggccctcatcttgtacgtgcatcaggcccaaaaacttaatttcacctctg

SEQ ID NO: 1885482 - DNA, 4001 bp, Homo sapiens
agtgatagtcacattgcactgggtgttattacagaagtttccatgaacacaaggagtgccatctatcacacgcccaacatcagtcgtgtctgttgcatggtgttcatccagtccaaaacactgaaaccctcctctcactgagtgatggaatgaaacacgttcctgcagccggggaagatgggtcacattggtacactgcagtcttccacaaaacttatctattcctgcacaagcctggtagctgagatatgtttgttgtctaatacaatgtccaaatcggtagctttcaagatttatgtcatagcagacctcgggagcatcctcagcactgacaccaaagatcgccttgcagagcacattgcgatcagtgcagttcccacgatagcagtagccttcttcagtgcacggggttccatcttgcgtataaacgtttgcgggacatgtcacggtggtcccgtgacagtactctggaaggtcacatatattttggataggtctgcagagagtccctggtggggagaagctgcagtttgtacagcactctcctatatggcagatgctccccggtgttaagtgacagtcactttggcagcaataactggcataacactgcttgaaggagccacagtcacattcctccctcccctccactatgaggtttccacagcgaaccgttgtcatggtttcgttatacacaggagcaagtgtttcaaaaacacactggcctgaatgtataaaacaattttgtgcatgtccataagaacagttactgaacgcatctgtcatcccaggaaatcgctgcataatgcaggaggcccttctctgacatgtgcagtagttatcatcatactccagaccaatacttctcatctgtgtctgggttattatgacggctaccaataaataatgtctgcctggagtaccaatgtgtaacagggctatacgggaacagaagttatacctttcaggttcatagttagattcatgtggcacgtatttaataagtagtgtggatgaatgaacatgaaaagtatcaaaaaaagttgttttaaaataggtaaacattgcactctgaattcgatattcattcacaggggctgggtcacgattattatatatggtcaaaagataaatatagtaccgcagatcaatattttgagcaatgctgtcaatgagactgaacatctggaccacctctttggaacaagttgtaatattgccatatatgcgataatatgaattggaacattgaacgtggccttttatattgcctctatgagaactatacagcgaattagatatcctgggattcatgctgtcatttgcttcagagaacagggggtctgtctcattgtcatcatctctaaatgtgggccctgttgcgttgggctcggccactatctgaaaaacaacatgttcaaacctgcgggaatcctggaggggtttgatttcgtacgcaaggtcgtccagcctcatgatgcctctgaggtccccatagcacgtgtcgacggtgaccatggacagaggcacctcctccaggtagccgaggtactagcagtctggagggatgtaggggtcacccatctgcaagactccttggtcatcctgagttgtcaccagcagatgtctaggccaaagaaggtgtttcctccgcatgtgaatgacgtgtctttgaccccaaaacacaggctgtaggacagccagccgggaaactgaaggcctttgctatggtgtgtctccttcctgggaatcaccacctcggaggaggcgtagtgccacaagggacggccttgagaacaccggaccggagccaggagcgcccagagccccagcagcaagaggggggtcctaagggtgacccgcgcctctgcccgcctcatgtcccagcccagcgatagtcatccaaagacaatgggaaaggaaaggactgtcctgggcgaagccaggccccaaccagctgcggtggctgcgtccctcccagggagaccctgacagagaacaaagggcctccccaggctcccgcaccacaccccggggggcacctggactccgggagggaatgaggtaacagtcccagggcggggcagggggtgggcctggacaggacggcagctgctgcactgcgggatgaggctgagggtcatggctgtgaggcctcatcggggagggaaaagggagagggaagcagggctgtctcttttaccaccgtcaatcttttccgtttctttctgaatctacaaaatgcaatgatgtgcgtccaatgcccttgcatcacccgtgttattctcggttgctctgtgggttaatagtgctcctttctgtggctcacactgcttactcctttgtcatgtggaggtagacactgccaatattttccttggggactgaatgtttttctactcttaataagtacccatgtcttattctttttgttgttgtgttgttttgttgtggctttgaagttttgtttgaagttaccagattgtgaaaggaaaatatcttgggccccgtcaagctggaaaccactcaggacaaatctgcctcccagtctatttaaagttgtccctctgctcacagagacaggtgcatatcctcatggcctcctttgcaaacacttatcagaaactcaaaagaatgcaaccatctgtctctcacctacctgtgacctggaagccctaagtggggaggacttgctttgagttgtctcagcctttctggatggaactaatgtccttcttacttatattgactgatgtctcatgtgtccctgaaatgcgtaaatcaagatgtgcccgaccaccttgaatccagagttcctggattcacaagatcaacagttgatatagggtaactttttcttctgtgctatgtaaaactcttgtgaattatgatactttttacttagtccatctattgggaacagatgctattcctgaccccatcagagccccaggtgctgtccctccgatgcttctgtgtggttctctcctggtctttggtcatttcttcagatgcaggagctgatcagctctcagggaagggcacagggggccctctgtgggtgtctcatgtctgagaactaacgtttcacatatttctgccaattctgtcattgcttatgaggggagggaaaatccaaggccagatcataatcagaaacacaaattactgtttcttcaaaagtgtaaatatttccctttcctggcgaatgtggtcactccatttaaacttaacgtgaccgtggtgtgtttcgaaggctgcgctgtgtggcactttgtcttccaacgccccgtactcccatcttccatcgcttcaaatcctgcctttttaccacagatgaacgattactaatgaagctggtttcccctctacgagtgtgcaggttgaacgccctttccctacccctttaaggctttcacagggaacagaaggaaaatatttgacatccctgaaggaggctgctagggaagactgtgttcctcctaaattcttgtgctgaagtcccaacccttggtcctgtccccacatggccccttccctgagatgagctcatctgtcctcttccccaaggtgagcacacctgtccccacgtggacctttccctgagacaagcacacctgtccccacatggacccttccctcagaggagcataactgtccccatgtggacccttccttcagatgaactcacctgtccccacgtggacccttccctccagaggagcacacctgtccccacgtggacccttccctcagaggagcacaccggtccccaagtggacccttccttcagacgagctcacctgtccccacgtggacccttccctcagacgaggtcacttgtccccatgtggacccttccctcagatgagctcacctgtccccacgtggactcttccctcagatgagctcacctgttcccacatggacccttccctgagacaagcacacctgtccccatgtgcacccttccctcagaggagcacacttcttccctgaga

SEQ ID NO: 1885483 - DNA, 4001 bp, Homo sapiens; identical to SEQ ID NO: 1241120

SEQ ID NO: 1885484 - DNA, 4001 bp, Homo sapiens; identical to SEQ ID NO: 1241122

SEQ ID NO: 1885485 - DNA, 4001 bp, Homo sapiens
aacgttttctttagaagccctgatttatttggctttggtttatgttgatacatgtccatgattattaaaatttctgattatttaggacataatttttaaggtatctttagggtgtacactctatagtacttaacatcttattcaggttatgactttgaactgcatcattataacactaaaaagcaaccttggctaacttcagtaccttacgtaacataagaaataaagaataacttgaacttaaaatactttttatatgtttacttcgggtattcttaagggctttcagtacaaagataaaaacatgcgttggaatgcatcaacattccaacttacataagtggtgtagatacctatggcattagtaccacattttgatggttggaccacccaccaaattcccttctctccttttttacttctttttctttctgtttgctttccttgcaagtttccttccgcatccttctttcccacctacaatttgtaactgaaagaaagaagtagctacagaccttacctaacctactcttaacctacttggtaggtagggttcagatgcaagggagtggctcgaataaagcattttagttatgccttttagaaattagggagcaagagatatatagaaaaattagaaatgtctcttctacctttattaagtctacctttgagaaatatgaagggcaggaagacggaaaaacgaacagaacttctgctggaatattgtgacaaatttactgacaaatattttctaatagatttttaccaacaggcagtttttgttttctttactgacagaccgtaaatgtacttctggttggcagcagctgcatcattataacacaaaagcaaccttggctaacttcagtaccttatgtaacataagaaataaagaataacttgaatttaaaatactttttatatgtttactaacattaaactattttcaatgcaggaaataaatatttccccaaagaggaatcccccctcaattactttctttcagacttaacaaattggagtagatgtggttttgctcattcttttatctgctggcaactattttaagtctcctgtgcaaggcagattccgatgacctcgggaaagtcacaggacctcagtttcttcaatggtaaaagcaaaggcagtggtttctaccgtcctttctcactgcaccattcagcgtcagtgccctcatgagaaacacacccaaagcccagtgtgctctaccccaaaacttgtgaaatttctagagtctcaaaaaagtgaatatgtttaaggcagtataataaaagccaggtggacgacagttcctaaagttaggctggtagtggcgtgaacaggggtcttttgggccaccctgagacccgccccacggggcttctcgatccacgtcttggcttctcgctccactttcacagaacgtactgaatcaggggcctgcatccccgtgccgtgccgagccgacggagaaatggactcctcttctcgctcctgtggagtttcgtcttctgggtgagtgtggcaccgggtcctgggcgggtgatgtctgtagttggcgagcgatcctcagccagaaaactggctgcgcacacaggcgcagacacgcgaacatgttcctgcgaacgagcttgggcgcatgttttcctcccttgctttctttaatgctcagagaccataaggggatttatcgagaagcattcggtgcccatgcccggtttggaaccgcgagcacaatatctggttcctttgcagtacggtggtttgctcttgagttacgaccagaaaccggaacagaaggaaagggagaagcaggggaggttcggggacgacggcgctccgggcagtaaggcagtagcttccaaagcgtggaggatgggactgaggaggagcagaatacggagaaagagggaagctgaggaaaaatactcacgccaatgggtaaaagggaaaaggtgagaaggaatggagtaggggagggaaccaatggtgggagaggcggaggaagaagggggaggggtagaagccaatgggggagtggaggggagggagaagcagaggggaggagggagcggggacgcgagcgaggacgcggccccgcgcgctcgtccccctccctccgactggatagctcgcgccttcccaggctcccgggagacgagggcaggggcggggccgtgccgggtgcgcggcgcgggaggcgtcgcgaggtgaaggggcggggacgggggattgtggggagggcagcgcgggttcgcgcgcgcgcgcgcgtcccgtccaggctgcgccgccgcgccgccgctccgcccccggtcgggtgtgtggctgcgcgcgccgggagagatgctgaggtaaagttcgggagagagggagagaaatccgtcagcgcgagggagcccgagtggccgccattactgagcccggcgcggcggcgggcgctggggaaggggggagggacgggccgccgctggtggcggggagggagggagggagggtgggtgagctggctgcgggagccgtggggctcagggtttcggggcgtgtgtgtcggggagggcggggggaggtggctgaagggacgcgccgctcggtgagcgcgccgaggaagagaggcgagcggagagtggaggaggaggcggcggcggcgggagcggtccccaggaatgtcgctgccgccgccaccgccggggccgctgccgttgaggaggagacggaggagaccgacgttgttaggtaggaccttgcggaccccgctcctccaagcctgcctgccccctcccggacggggaccctcctgcggctagctgccccgctcggtcgccgctgccggttgtaaccagttgaaggggctggggccccgcggccgccgaggggagcctggcgctgcgctcggttttcgcaggccgggcgggcagcagctgcagcgttagggatacgttcggcgtgaagggcagagaggccgggggagggggtgctttctccacaggtgacggggccagggtcggcggaggcctgatgctggccggggatcgccggccccgccaggcgtccgctctcgcccgccgcctcacttgctcgagtctcgggtggtccgtcgagaggggaggtggcggtgtccgttggccgggttgctgctgttaacgagttccacctggaaagggtacacggggcgggtgcagattcgcggaaacacagtctcggttgcaaacttaaacgccttgtaggggggatcggccctttcactttccctcatctcctcgactcctccctgggttctcttcaccaattttccatctgctttgaagcttggagtaagatatgagaagttgcactgcgcatccagagcccagagtcctatgggctgactgcgactgggttgaggctttgatactgagttttcgctagaataacctccagattcttcctctctttccactaaagaaaagtatcggggtgggggtggggagccgcgcgggagcgcgcgcgcacttatccacacagaaatactccctctcaccctccctcttcagcgttattagaaatgcaagagagctggaggctcggggtgtagctgaggttgaaaggtgcacggaagtaagggcaaactgttattaggccgtttagtaaaatcccgaaaaagttgtaggggagacgcttatacttctaccatgtgatagaaattcggatttggccatcgcttaataaatgggaattcaaatattttgagatagagcaagataggcatatagatgggtttgtgcttacgttttaagtttaaattcttatcgatcatttattttttcctttgtgataggcaggaaactgaatttttttttaaatgttcaggtgtaaaacagcaaaatgcttcgctgtatttactagtacttgcttatgttgctttctacaggtaggggcggggggcgagtttgtcaattccacttaaatccagaaccagtattcagttagaatgttaggtggtgtttatccgcatgaaggat

SEQ ID NO: 1885486 - DNA, 4001 bp, Homo sapiens; identical to SEQ ID NO: 1241136

SEQ ID NO: 1885487 - DNA, 4001 bp, Homo sapiens; identical to SEQ ID NO: 1241138

SEQ ID NO: 1885488 - DNA, 4001 bp, Homo sapiens
gacactaactagccatgtggattgtgaacagtcacctcatccttcatggcctcagtttccacatctatgaaataaggggtctggtcaggagacacataacagcattctacatgtaactggagaaattgtgtcatggatagggaagggagggtaattaacccaattgcctctagagggcaaataattaacagaattgcctccagtttctccatggctttctaaagaggggtcaagacttgctggatgccagatgttttccagggatcccagagaattggtctatggaggcagtgctttactgtattatagaagaggaattaatcacactaattgcttactctgtacttttgcttaatgatacaatataaacaaatacaatgagaagtcattttaaagcaatcaaacgggcttcaagttattaaagctcctgaagaatcaaacattacctccatatatagaattattatactaggtgcaattaatgatttgatttatagatgtttttacacaggtttgatatgcaacaagtctaggggtataaaatcaataaaatctgccttctaataagcagtggtttctgcctttttctttaaaaattatatcaaaatagtaaaacatgaatattttaaaataaaaaattattgacatttattttcattctgcctgctgaattttaacttttcctcaaaaagaaaaacttctttctcatgcaaactatccccatatccctaattaggatgaattattgaagcatcctgggtgatttctgaacactttcaatccttcaattattcaggtctagtttaatggcacctgagaacaattacatactgagaactgtcctaaactgacaaaggcgaccaaagagcttctacaggagcatacctgtaccctcacattggctccaaagtctccagagggaaacggacaggacatgatgcatcagctctttttttactgtattatgcttggaaagattgttatggaaacatagaataaatagatagataaatcaaccttgcctggaaaactggaaaaaggttcaaagaggaggcaaatttagaccaatatgtaccaagaactcattgattcttacgggagtaggttattaccagacagacaagtgaaattcagtaggcagaatgataataaatgtcatttattaaatattaaaaagacaaataccttccctattttagaaataaggtaggcaaaggaactgaggagtggaaattgaaggccagctctgggtgctttgtgaacagagcccagttgacagtgggaagatctgtgctctatgctaaggacatgctctgtaatgacaatccactcggttgcactaagaatttaagagcatttatatgaatatatacaatttaaggaaagataaagagaaaaatttgctatcaactctgtgtagatttggaaaatggtgtcaaaggaacagtttcacctgcatttctttgtctagaaagttttattttattaaaaaatgtagtctacaaacgagcctcaatttttggcaataaactcaaaaatgctacacaaaccatcacagaattcggtttgtccttgcaggaaagaaaaaagaagaaaacaaacctccatacgagaatgggtctaaaggaacttcccaaacctccatgattttgcaggaaacaagataaaggtaatcacctgcagcacctggacccatctagattaactactcagcctccagaggaaggtcttcaggactcagaccttagttatagattagaagttaatcacttatgtcttcagacaggccctgttccatgtttagagagagatctttgagcacccatcttcatacatttgagaacagggtcactgagagggagtctctgaggtcacagagtttattagttcattttcacactccaggaaagaagtttaattcacagttccacatggctggggaggcctcaggaaacttacaatcatggtggaaggggaagcaaacacatccttcacgtggcagcaggagagagaagtgcagaagaggggaaagtccccttataaaaccatcagatctcgtgggaactcactcagtatcacgagaacagcatgtgggaaccactcccatgatgtaatgccctctcacaaggcccctcccccaacacgtggggattacagttcaaaatgacatttgggtgcagacacagagccacaccatattacagagccagaagagctgagcagtgggcgctaagtaaatgttcattaaaccaaacccctgcacaaggctggcttcatagaggtgccacctgtgcagtggcaaaagccccactgtcagaggggacctgaacttgttttagtgctatgttgtcactgccttcaaattcttaacaatttttgaacagactccacattttcagttagcaccgggtcctgcaaattatgtacccagtcctgtccctgaaacaaagataaggtttgttcatgaagggactcactcgacccctccctgcccatctcactccaagatgccctaagtaaaggggaacacagagctaggagaaggcagtatttgaggatgatcttggaggtcccacctgatcatggctggtgatgcatgtgtgtgggtgggagaatttggctgctctcttctggcaccttccatcccatgtacaaggcctgcactttgcctgtctgtcccaagtcctcctacctgactcagaccaggagtgtggatggggggggggtggtggcgggcactggggcccagtactcctggtcccagctggagttccctgttgactggggagatttggcccctctgactactcctaccccatccccactaggacaggagttggtgaaggggacagggtgggaggcttaactagtagccaggggcaggcggcaggcagtggggcgaagatcaggctgaattttcctgctactgatctgctctctggaagaggcattcatgaactggcttaggctgtggcttggctattttaggaatattcttaacccttcctgagtcactgccgccatcagacttctctcccagagcacagagcaccagactattccctctccttgtcccctcctccccagtccctgctttcctccctggcagctgaggtcagagttttctcaggggcggggcaagttgacttctgccaaggaaaactccggggtccctgagcccccttctttgtcctgtgacttctccctcttcatcacagctctggactcagcaaagtggcagaatgggcatcacctcagcccttctcctcatcttataaaattggaacttcagcatctctcatctgagggaaaatagttgacctgcatccccagagtaagatgggaagctgcagtcctgatttccagcctctggcagagcaggagcccctgcctgcctggctttgatgccctgttaggggcacgtttccagcagggagtcacatgccagagcccctcatggggttacctctgcctggttttttcctccactccaggttcttcccagagtctggctttttggaaaaacctaggccatgatataggcattacctgtgtaaggctaaggggggtcccactgcgggccaggagggctcaacatcaatatatctgaatttcaagccaagacagggggcaaagatcttggcccagtgtcaggggtttctgtgtccctgacagctgggcttgcctgagctgggaggcccagcatatctgggccttgtgatgccttctgacagtaggagttggagtttgccaccaactgctattgggaaagcttgacatggtgatccaggaataaggctgatgatgccacaaaaatgcccaagggcctgtggtgtgcctgacagtgtcctgggaagtggatatagaggatcaataatcaataatcattatttccctgagaaaggaagctctcttggggtggttaaccaggtgtctggccacaagcctaggccagggttgatgggctggggcaagtgagtcatcccaactcattccccctc

SEQ ID NO: 1885489 - DNA, 4001 bp, Homo sapiens
ggacactaactagccatgtggattgtgaacagtcacctcatccttcatggcctcagtttccacatctatgaaataaggggtctggtcaggagacacataacagcattctacatgtaactggagaaattgtgtcatggatagggaagggagggtaattaacccaattgcctctagagggcaaataattaacagaattgcctccagtttctccatggctttctaaagaggggtcaagacttgctggatgccagatgttttccagggatcccagagaattggtctatggaggcagtgctttactgtattatagaagaggaattaatcacactaattgcttactctgtacttttgcttaatgatacaatataaacaaatacaatgagaaatcattttaaagcaatcaaacgggcttcaagttattaaagctcctgaagaatcaaacattacctccatatatagaattattatactaggtgcaattaatgatttgatttatagatgtttttacacaggtttgatatgcaacaagtctaggggtataaaatcaataaaatctgccttctaataagcagtggtttctgcctttttctttaaaaattatatcaaaatagtaaaacatgaatattttaaaataaaaaattattgacatttattttcattctgcctgctgaattttaacttttcctcaaaaagaaaaacttctttctcatgcaaactatccccatatccctaattaggatgaattattgaagcatcctgggtgatttctgaacactttcaatccttcaattattcaggtctagtttaatggcacctgagaacaattacatactgagaactgtcctaaactgacaaaggcgaccaaagagcttctacaggagcatacctgtaccctcacattggctccaaagtctccagagggaaacggacaggacatgatgcatcagctctttttttactgtattatgcttggagagattgttatggaaacatagaataaatagatagataaatcaaccttgcctggaaaactggaaaaaggttcaaagaggaggcaaatttagaccaatatgtaccaagaactcattgattcttacgggagtaggttattaccagacagacaagtgaaattcagtaggcagaatgataataaatgtcatttattaaatattaaaaagacaaataccttccctattttagaaataaggtaggcaaaggaactgaggagtggaaattgaaggccagctctgggtgctttgtgaacagagcccagttgacagtgggaagatctgtgctctatgctaaggacatgctctgtaatgacaatccactcggttgcactaagaatttaagagcatttatatgaatatatacaatttaaggaaagataaagagaaaaatttgctatcaactctgtgtagatttggaaaatggtgtcaaaggaacagtttcacctgcatttctttgtctagaaagttttattttattaaaaaatgtagtctacaaacgagcctcaatttttggcaataaactcaaaaatgctacacaaaccatcacagaattcggtttgtccttgcaggaaagaaaaaagaagaaaacaaacctccatacgagaatgggtctaaaggaacttcccaaacctccatgattttgcaggaaacaagataaaggtaatcacctgcagcacctggacccatctagattaactactcagcctccagaggaaggtcttcaggactcagaccttagttatagattagaagttaatcacttatgtcttcagacaggccctgttccatgtttagagagagatctttgagcacccatcttcatacatttgagaacagggtcactgagagggagtctctgaggtcacagagtttattagttcattttcacactccaggaaagaagtttaattcacagttccacatggctggggaggcctcaggaaacttacaatcatggtggaaggggaagcaaacacatccttcacgtggcagcaggagagagaagtgcagaagaggggaaagtccccttataaaaccatcagatctcgtgggaactcactcagtatcacgagaacagcatgtgggaaccactcccatgatgtaatgccctctcacaaggcccctcccccaacacgtggggattacagttcaaaatgacatttgggtgcagacacagagccacaccatattacagagccagaagagctgagcagtgggcgctaagtaaatgttcattaaaccaaacccctgcacaaggctggcttcatagaggtgccacctgtgcagtggcaaaagccccactgtcagaggggacctgaacttggtttagtgctatgttgtcactgccttcaaattcttaacaatttttgaacagactccacattttcagttagcaccgggtcctgcaaattatgtacccagtcctgtccctgaaacaaagataaggtttgttcatgaagggactcactcgacccctccctgcccatctcactccaagatgccctaagtaaaggggaacacagagctaggagaaggcagtatttgaggatgatcttggaggtcccacctgatcatggctggtgatgcatgtgtgtgggtgggagaatttggctgctctcttctggcaccttccatcccatgtacaaggcctgcactttgcctgtctgtcccaagtcctcctacctgactcagaccaggagtgtggatgggggtggggggtggtggcgggcactggggcccagtactcctggtcccagctggagttccctgttgactggggagatttggcccctctgactactcctaccccatccccactaggacaggagttggtgaaggggacagggtgggaggcttaactagtagccaggggcaggcggcaggcagtggggcgaagatcaggctgaattttcctgctactgatctgctctctggaagaggcattcatgaactggcttaggctgtggcttggctattttaggaatattcttaacccttcctgagtcactgccgccatcagacttctctcccagagcacagagcaccagactattccctctccttgtcccctcctccccagtccctgctttcctccctggcagctgaggtcagagttttctcaggggcggggcaagttgacttctgccaaggaaaactccggggtccctgagcccccttctttgtcctgtgacttctccctcttcatcacagctctggactcagcaaagtggcagaatgggcatcacctcagcccttcttctcatcttataaaattggaacttcagcatctctcatctgagggaaaatagttgacctgcatccccagagtaaggtgggaagctgcagtcctgatttccagcctctggcagagcaggagcccctgcctgcctggctttgatgccctgttaggggcacgtttccagcagggagtcacatgccagagcccctcatggggttacctctgcctggttttttcctccactccaggttcttcccagagtctggctttttggaaaaacctaggccatgatataggcattacctctgtaaggctaagggggggtcccactgcgggccaggagggctcaacatcaatatatctgaatttcaagccaagacagggggaaaagatcttggctcagtgtcaggggtttctgtgtccctgacagctgggcttgcctgagctgggaggcccagcatatctgggccttgtgatgccttctgacagtaggagttggagtttgccaccaactgctattgggaaagcttgacatggtgatccaggaataaggctgatgatgccacaaaaatgcccaagggcctgtggtgtgcctgacagtgtcctgggaagtggatatagaggatcaataatcaataatcattatttccctgagaaaggaagctctcttggggtggttaaccaggtgtctggccacaagcctaggccagggttgatgggctggggcaagtgagtcatcccaactcattccc

SEQ ID NO: 1885490 - DNA, 4001 bp, Homo sapiens; identical to SEQ ID NO: 1885488

SEQ ID NO: 1885491 - DNA, 4001 bp, Homo sapiens; identical to SEQ ID NO: 1885489

SEQ ID NO: 1885492 - DNA, 4001 bp, Homo sapiens; identical to SEQ ID NO: 1241207

SEQ ID NO: 1885493 - DNA, 4001 bp, Homo sapiens; identical to SEQ ID NO: 1241233

SEQ ID NO: 1885494 - DNA, 4001 bp, Homo sapiens; identical to SEQ ID NO: 1241234

SEQ ID NO: 1885495 - DNA, 4001 bp, Homo sapiens
ctgcctcccggacacccgcctcacacccgcctcccccacacgcccgcctccccccacaaatctgcctcctcccacacaccttcctctcacacacacacccgcctcccccacacgcccgcctccacacacccgcttccccccacacacacccgcttcctcagacacacacccgcttccccccacacacctgcctccccccacacatatgcatctcccccacctgtcattccctcaaacacttctcttacactcacacacctgcctctgcagtgcacctgcttcaacacatgctgctctccctctcacacctgcctcgcactgacacgcccctgatccccaccaactgggccctgatggggctggcagcaccccgctgctgagtcaaaggtgcagccccagaacctccagctccctcatgggaaggccaggccccgtccccgtgggtcctccaggcgggaccctcatctgtctgtggattcctcgtcctaaaccctgagctctccccccgccgtaatgcccctggctgccactggcatggaagatctgagggcagctgctgagggtccgggaccctctgccactgcctcccacccccacactggggctactggactgcttcccagtggatggaagcaggggcctccctagggagccaggcaggaagaggtggggaggggcaggaagggcccagcagagccggaattctgaagggaaggggacaagctgcaggccctggggggagggagcatgcaggctgggcccaccctgcccggcagaatctggccaagcccctcaggtggccgaggaccagtggctctcccagctccctttctcagcaagtggcccagccccctttgtctggcagatatcggggaggggcatctggctagggcgaagcccactctgagaggcccaagggtgctgctcctggcagtgagatgggatcccccaggtggcctactaggtagagggctgtgaatactggctctccgtggccctggtacaaccctctgggcatggccagggccagcctccaggacaccagcccaaccacaaggctgcaccagcttagagccctctgaccagaaccactccactcaaggaagctgggacacaccagggcaggcaggggctggctgcacggtgggcaggcgtgtcccagcagcagcaaggaagtctcggtggctatcggccgtggcagctgcagcccagggctgccagcactgtgctctggccagctctgggacgtgggccaagtgggggcagggaactggccctcagacccactgggtgggtcaatggccacacattacgggtccgagttgggaacacagaatcgattgggtctaatggctcagaagaaaaccagctgcccaccctggctgcatgggctctggggtggcctcctcaatgtgctccgacatcccagcctgggttctactcaggtatgagctgcgggggcagcctggtgtgagggtgggcaggattctggaccctcgccctcacagtgcctcccaggcaggacagaagccagccgggtctgaagcgcctttgttttccgctgagaggctgggcgggccaggcaggcaggcctttccgggctgtccacaggactgttggccgagaccctggagagccccaggctggcctggcccggcctggggtaaagtcatgggcagttggactgcagaagggccctggggaccgtctcccaccctaagccttacagagacagccctcgctgggacagagactgagggctgagcgggctccaggagaggcagccggaagcccctcggctcccagccacgccagaagcactccaggccaaatccggtccctcccctctgggacgggcaaaatacaacctcccctcaaccccctccagcctgtgagccggggaagcccagtggcggccttccctgcagcctggccgcattctgggtatggggcgaccagggcaggcgccctgttggtcccggccctcctctctgcttcactaagtctgccccccttcgtgcagcagctggtgggtaggtgggcagggaccttaccaccctggagaaagctgggcagcgaatcagccaggaggaagggggtaggaagggcgcacccaggcccagagagtgagtaagcccagacggggggagcgcgcctgccggaggggctagaccgagggccgccttgcgagacatccctcttcccgccaccacctgcatcctgtccagggctgttctgaccttgaggaggcagggatcctggacacctgggctgcttgagcacaaggtccctctcacgttcgcgggaactcgcgtgtcacacccgcccccaccctacccccgtgtgaaactcctgggggaactggcgccaagggaatgcgtcgggacaagcaggaggcagaggccaaggtcgcccccgcttggactgaatcccgacagagtccaaacctggcccagcccagctcagcggagcccggagtgggagctgggggtcactgttcccggccacttgttcccgggggaagcgggtgtagggggtccaggagaaagggcccaggcccacgggagcgcgcgggacgcacccggggcgtacagccacgccctgccccgccccgcccggcgccgtccgaggaaccgggatgcgtccgcggatccccgagcgctcccccaaacactggcctcatcccggggcaccacaagccccgcccgggtggtccctgccccgcccccacaagccgcttcggggttcgggcgtgaccgcccccgctttcgcgcagccccaccctttggctttagccgcttgggcagcgcggccagccagcctccgggacgcgcatcctcggtccggggccggggccgggcgcaccccgagttacgccgcggctctgcggcgcgggactggccgcgaagggcggcgggatgcaccgagcgggccgggagcgggcacgcactcaccgaagtacacggtcttgtcgcacttggggcatttggaggccatggtcggtgcgcccggtcggcccgcgccctccgcccgttctcctccgggccgccgccgcccgcgcccagccccgcctgcccggctgtccgcgcgcccattggctccgcggccggggcggggcctcgataacccgtcccccgggctgggggccgcctgggggcgccgcgggggcggggcgcacctgccgggggtggcgggtgcggggcagccgggccaggcctggcgcccccgggcccctcgcgccggaggtggcgtctacaggggcccgcccgggcgaccgcggcgccgcccgcgccccggctgtttccatggcgacgtcggggccgcctggccgggccgtccccggggcggcgggcagggtgcggggagcctggccctcggctctcggggagccctagtgacttgggcctaggggtccaacactcccggccctgggcgcccaggctgcgctccgccgcgggaaggggtcgcaggctccgggagaaccccacccccaccccgccgcgcgcggcgcctgtcccgcttccctttgttgctcggtttccatagcaacagccgcgccgcgggagcggagtcagattcccggcgggcacggcccccagccctgtccgggtctccatgtcccgctccgcccccgcccgcgccccgccccaacactgtctgtggtgctgaaggctccttgggtggagggcagggctcaggaaggaaggcgccgccacctccagaaacagctcgagaagctgctggtagggggtgtggggaggtctgcgtctgcctcccaggcagggaaggggcggcgggcaccagcgccgagggatccgcgcttaaggcgtccaccccaagcacttccacccagggggcggccggggaggcggtgaggagttaggaagggaaggaggggaaggagtgggcgtgccctctgtgccccgggctggggctgacactccagtcccttctcccgcaccgcccaggaccagctgcgtgcctgggggcccagggcctga

SEQ ID NO: 1885496 - DNA, 4001 bp, Homo sapiens
ccccaagccccgttgcactcccctcacctccgcgtgcccgccgggggtcagtgtcttcccgcagcgctcgcagcgcaggcagggccggtgccaatccttgcccagagacgtcaccttctcagctggaaagggggaggagtgaggccgagccccggggcgggggcgggggcgggggtccggggcccgggcgcgcactcaccgaagtacaccttcttgctgcagcgcgggcacgtgttgggctccccggtgaaagtggtgacactggaggctgtggggcgcacgagtcagggcggggcggggccgggggtgcccacaacccccagccccagcccgcgcgtgcccacaacccccagccccagcccgcgcccagcccacctctgctgggccccttcggggggccgctcgccttccgctcctctgctcgggccgcggggacctcgatggggccggtgacctgcggcccctccgccaggggcttctcgtagatgtaggagcccgcgcccccgatgttcacgcctgcgggtgggggtacgtggggcgggggtacgtggggtgggggccgcggccaccgggcatctcagaaaacggcccgctggggactggggggcactaggctttccagggtggcagggactctgggcggggatccacggcggccgggacccccagccctccccagcgccagcgccacgcccctcccagcaggtcccagggcaggccgagggcagccggagctcacctttgggtccgaacagggtggcgtagcacggcttgtggcagaacggcttcccgtcatgctgcgcagaggggcgcgggtcaggaccctgcctgagggtggcgggagtcgcgacccccgcccccgcccgcgccgcgcagtggggctcacctcggcgtggcccccgggcgtcagcgtcttgctgcagcgctcgcacttgaggcagaacttgtgccagtccttccccagggagctcaccttctcggctgagcgggaggggcggcaggggggtcagggccggggcgcgccccgcaccccctccgcccccacctggcagccaccacccccacgcgctccgggggtccccactttcaggaggtctcccaggcgccttccttccacctggcgggccctgcccctccttctgagacccggaggagcccgtcgcccccaggccctgttctccctctgggtctcagcgcccccagccctggaaccccgctagagccgcctttgagaaggggcccggggctgccctgttagtcccctcagtgcctgcggtgaaggggcctgtgctcgagcctgcccgcgctccaacacctgcccgcgctccaacacctgcccgcgctccaacacctgcccgcgctccaacacctgcccgcgctccaacacctgcctcccggacacccgcctcacacccgcctcccccacacgcccgcctccccccacaaatctgcctcctcccacacaccttcctctcacacacacacccgcctcccccacacgcccgcctccacacacccgcttccccccacacacacccgcttcctcagacacacacccgcttccccccacacacctgcctccccccacacatatgcatctcccccacctgtcattccctcaaacacttctcttacactcacacacctgcctctgcagtgcacctgcttcaacacatgctgctctccctctcacacctgcctcgcactgacacgcccctgatccccaccaactgggccctgatggggctggcagcaccccgctgctgagtcaaaggtgcagccccagaacctccagctccctcatgggaaggccaggccccgtccccgtgggtcctccaggcgggaccctcatctgtctgtggattcctcgtcctaaaccctgagctctccccccgccgtaatgcccctggctgccactggcatggaagatctgagggcagctgctgagggtccgggaccctctgccactgcctcccacccccacactggggctactggactgcttcccagtggatggaagcaggggcctccctagggagccaggcaggaagaggtggggaggggcaggaagggcccagcagagccggaattctgaagggaaggggacaagctgcaggccctggggggagggagcatgcaggctgggcccaccctgcccggcagaatctggccaagcccctcaggtggccgaggaccagtggctctcccagctccctttctcagcaagtggcccagccccctttgtctggcagatatcggggaggggcatctggctagggcgaagcccactctgagaggcccaagggtgctgctcctggcagtgagatgggatcccccaggtggcctactaggtagagggctgtgaatactggctctccgtggccctggtacaaccctctgggcatggccagggccagcctccaggacaccagcccaaccacaaggctgcaccagcttagagccctctgaccagaaccactccactcaaggaagctgggacacaccagggcaggcaggggctggctgcacggtgggcaggcgtgtcccagcagcagcaaggaagtctcggtggctatcggccgtggcagctgcagcccagggctgccagcactgtgctctggccagctctgggacgtgggccaagtgggggcagggaactggccctcagacccactgggtgggtcaatggccacacattacgggtccgagttgggaacacagaatcgattgggtctaatggctcagaagaaaaccagctgcccaccctggctgcatgggctctggggtggcctcctcaatgtgctccgacatcccagcctgggttctactcaggtatgagctgcgggggcagcctggtgtgagggtgggcaggattctggaccctcgccctcacagtgcctcccaggcaggacagaagccagccgggtctgaagcgcctttgttttccgctgagaggctgggcgggccaggcaggcaggcctttccgggctgtccacaggactgttggccgagaccctggagagccccaggctggcctggcccggcctggggtaaagtcatgggcagttggactgcagaagggccctggggaccgtctcccaccctaagccttacagagacagccctcgctgggacagagactgagggctgagcgggctccaggagaggcagccggaagcccctcggctcccagccacgccagaagcactccaggccaaatccggtccctcccctctgggacgggcaaaatacaacctcccctcaaccccctccagcctgtgagccggggaagcccagtggcggccttccctgcagcctggccgcattctgggtatggggcgaccagggcaggcgccctgttggtcccggccctcctctctgcttcactaagtctgccccccttcgtgcagcagctggtgggtaggtgggcagggaccttaccaccctggagaaagctgggcagcgaatcagccaggaggaagggggtaggaagggcgcacccaggcccagagagtgagtaagcccagacggggggagcgcgcctgccggaggggctagaccgagggccgccttgcgagacatccctcttcccgccaccacctgcatcctgtccagggctgttctgaccttgaggaggcagggatcctggacacctgggctgcttgagcacaaggtccctctcacgttcgcgggaactcgcgtgtcacacccgcccccaccctacccccgtgtgaaactcctgggggaactggcgccaagggaatgcgtcgggacaagcaggaggcagaggccaaggtcgcccccgcttggactgaatcccgacagagtccaaacctggcccagcccagctcagcggagcccggagtgggagctgggggtcactgttcccggccacttgttcccgggggaagcgggtgtagggggtccaggagaaagggcccaggcccacgggagcgcgcgggacgcacccggggcgtacagccacgccctgccccgccccg

SEQ ID NO: 1885497 - DNA, 4001 bp, Homo sapiens
cttcaggttatctattctttatgcctgctgttgccaaacactactttataatataggaactaattttcctccctaattttagtaaggcacgaaaggatagtgacttatcctgcttgccaaatgccactcacccatgtcctctgtcattgtttcattctgctcatttctaaacaagcttcttgctttccagctctgaattagattcctctgactgggtggagtctattattgtggcctgtgttatgtcacacatcgacaactatatttgtatagttgagggggaaaaaaagctgaaacacatttttacacactactaataaatcttaagtcaggcagacaagctcgctatgtctccaaacctccccaccctcccaacccccctcctcaccaaatgccactttgagctggctcattagtccaaagcaagccatttgccgtaacagcttgtatatctccatgaaaaagtgttctcagcaagtttaaatattaaaactaatatattcagatggttccgccaataaaatggtcacgaataggaaaaaaggttatgctttccaaagtatccattacacattaataaataatgctgttcattcacatgccaattaaaacaaactcaggctgtcaaatgaagttagaagcaaggagctcaatgctgtaattgtttttccaggaaaactcccaatgtcatcagattaagtgagacaggctgggttgcccctattctctttttaagctagcagccaaattttctcccctccagtctagttgcctggattttctttcctctttgattctttgtttttgttgcaggtattccggaagcagttgaaagtgatcgcctactgctcccttctgttgccaacggaatctcacttccccctactgttttgatttttctttccctttctttttaaagcaggtgctggtacttcttcctccactagtgctatttcattatctcctttctaatgttgttcagccctagttggttcttttgctttccctggacacgcctgtctgctcagaaaaactgttaattgacactcagaaagtgtaccactaacgatggggtggacctgctgcctggatgatctggagagtaagataaagttgccagcatgaaaaagagtcttggctgaatatattacagtggtgttaacttatgcttgaagatctttcctgggcagagccagaacatgtccctcatatcacacagtctgatgctttgtccttaggcagaacagctcctaacagcacccccaccaaagtctgagcatcattctacaaatgccttgtccagcggtgaacattctattgcagccaagcaaagtaaggggcatcagttgcacattttgccatcaagcaaagcaacaaaatgatgccttgcagcttttatggccaaacaaacacaaatgatgtaattgggaaaagctgtctccgaataggaggaaaagagtaaagggcaatcctttgagctggagagatgaccaccattcgagggtctgggatcaaagccccagccagacatcaaagcccatttgagtctaatgccaaaaaagccacagtgaattaaacttcatatataaactaattatagcttgaccccacaatcaggcttcagtgagcacacaggggaaagaaagcagacattgaaacaaaagatcaagaaaaaagaagcgtggtagcaaaatggggcaacatcatggccctgaaaattttaaacatcttttgagggcagaagggaataggggaatagcagaagaaacagcaaatgtttgacaatgctggtcttgtttgaaaggctatgaaacaactccttccatcctctctggtgcacaaccaaacactaccaaataaaccatcctacatgaaaaggttaccttttagctgtgttttagtgctgttaaagaggtttttgttgaagaaggccagggtgattccatgaagtttggtggtaagtttttcaagaggctcctgcttcctcctgcagagcactgtggattccaaagattctagaatgtctggaagtgagttgcattccccaccgtcgtaatcactgattaaggtgattaagtctccaccagcctcagacttttgtcccttagctctgccatttctaccggtcatctttacagatggaaggtgcagagttccatgtgtgcaaatacctagagccacatactgtggtactaatacaatgaaaggatttgatttcaaagcaaaatttaaaagtgtttcagagacaagtggctttttttttttttgagacacggttttactctatcacgcaggctggagtgcagtggcacgatctcagatcactgcagccatgacttcctgggttcaagtgatcctccttcctcagcctctcaagttgctaggactacaggctaatttttatattttttgtagagatgggttttgccgtgttggccaggctggtcttgaactcctgagctcaggcagtgcacccgccttggcttctcaaaatgctaggattacacaagtggcttctttaaccaattgtattaggtggattttgctcttactctgctttattgggaccatttctccaattatttaaaaattttaatttcaggccaggcgtggtggctcatgcctgtaatcccagcactttgggatgctgagatgggcagatcacttgagtccggaagttcgagaccaggctggccaacatggcaaaaccccgtctctacttaaaaatacaaaaatttcccgggcgtggtggtacgcgcctgtaatcccaactactgaggaggctgaggcaggagaatcgcttgaacccgggaggtggaggttgcagtgagccgagatcgcgccattgcactccagcggcgacaaagtgagactgtctcaaaaaaaaaaaaaaaaagatttaatttcacaaactggcaaacagttgcatatatgatttcataattcatagaatcttttcaatcacatttttatatacagacattagtactttcttaaaacaacatctaaatttataacctgaatacttaataactgaaatattaattttttttaaaaaggcattttcctgggataaaaacaaatatgtaccatcataattacactgcacctctttgaatattcactcacagatatttattgagtacctaataccaggcactgggaatacagtgggtaaacaagtcagatatagtccctacgttcacagagcttatggtctagaaggtaaactggcactaattatataaccacatacataagtgtgtatgtgtgcatttacaaattgtgaaactatcacaatttgcaaaataatatttttaaacagatatattctatgattatatccaaaaagtcatactcaaatcacaaaaatatattactgacctttataatccttaagttttttctggggaaggagatcttatattttactttgtgttatctttttttaaaaaatatttattctccttaaagccacatttgaaatttctttaggaagatacttgctgtatagcaaaacagttcaatatttcatctaaatatcttccactgaaagggagtaactagtacatgtaaataagttttaagataacttaagtaccgcactgatctagtactaccttttcctcagaataatcccagaaaggtgaaagagaaagcatcactccaacccatggtactatgagcaatttccagtatggttttctgatcgtttctacatagcatacagaaatgatcaatgaagtgacattttgtgggagagccctagattattaacatgaaagtggaggcttttgatttaggatatagacatttggtccaacttttccatctcctttgctcctgtgaacccagcctctctgaggccaggcaagaactctaaacaagttcccatactgatttcctggcccgtgttggcctccaagacccgcacagcctctttaattaagacccctcaggggcttagggatccctgtggaaaagcccagaatgccattatc

SEQ ID NO: 1885498 - DNA, 4001 bp, Homo sapiens
ctcttcagatgtcttttctacatccagtctcaggtcacttatctgcttgtcaagctcttgcaactgattcaacaaaccagcatctcttcgcctcaaacagttctgattaggaagaaacaaaggaaacatgaacatacaggggtgacaaaagaaccagaaagtctactctaaggattcaaattacccatctgaagagttcactaaacttagaaaaccaaaattttactggatgacctgaagtaacgaaaaacttcgagaattcaagaatatgtcctatgtttaattccactttctcacattttgtggtgatataaagtttcttcataaaaacaagacttgtttttagtttcaactaatatatacaaactgacttttcatagatagggacaagaaaaatggactgagactttaaatcatctggtgtataaccagtcttttaaaaaacaatacttcacagtagactctttaatttgaaatgagagtaagagatttcctataatacactataatcttaggtgagattttctggccaaatgtcttggcctgcagagttttgttttctattagttgctttgtggggtttaatcagtcttagagcctttgaaagtgagaaactaatactaatagccagtgccaagtataatgtgagctggcagaatccaaaaccctcatgggaaggcccatcgagatttgaacgcctctgggtttccaaaggtgacagatggattgtgctaactcacactgccacctagtgcttcctattgctggaaaaacgggagaactcaaaaagcatctggttcaaatcatgaatgccaagtctacaaatgaaaatagtaccataaatactgactggactggaattctcttgacatactgctttgctcccctcaagcggacaataggaatgcgccacttacaatcttgagattcatgcagacaaaaaggtgcaattgcacaaaacaataaaatgtaaaagtcaccagccataaccagtgagaactggctcaaatgaatgttacataggaatctggtctgtgaccgaagcagcacagtaaaatgccaaaacagagatattacacaaaccacagtgtacatccttacaaaacacatgcatatgaatatctacgcctcttgtcttttgacttaaaaagcttggagacataaattgtatgtttgtttgctacaattaatttcttcaggaaaaatgaacctatcaagtaaaagcactttggtgcttaaaaacacacacacacacacagagaaaagaaatgatctgaaaagagataatagaagaaaacacatgacaactgcacagcatcaccactttattgtgggagggccactacctggcatgtgtctagtttagatagtatcacttggtcaggtgaggacgtttgctgtttccaaaactacattttaaggtcactgaaaacaaagctgtcgccattattctgaggcggggtcaaaagctgttcatcaatacattaagctacaaagttctttttcttccccattaatgaagactgcatagaaagactgagacactgacagaaacccagtaagataaatgcttaccgagagcaggttctcttttctcccacctccaccaccaatcacagctggcagaacgtataaaatatgagaggaggggacacagtctccagccaaatttccatcatttccatctagtttgagctgccttatacaaagggcttctatttgaaattaagcaccagcctgggtgaaagctggcatgctggggagagctctcggagaggcacggctccctacaggcgctccagtgtaatcgtaaaactcggccctggacagttaagcacgccacaaaccccctccttggcttttggcccctctcggcgggaggagataaagtcaagaaaacctccaaataaaatggtattttaagtgggagtttgcaaaccgctggggagagggcatatactcatctaactaaggagaccgaacgttagaactaggcgactccaagaatcccgaaggcagaggaggagggaagagcggccacccccttcccgcaatccgcgcgaggtcgccagacacaaagcgggcacacgccagaaacgcgtgggcgtcggcagcccacacgccgcgggcactcaggaaggggatcagggaggtatggggcggtcgggggcgtcccataacagcgagcatctccccagccagagtcaacctcgcgcccgccccaggccacctgcccgacctccagcccctgggcaggaacagccgtgctccaccttcgggcacgacctaccaattgctttcttagcagcaagatgttctcctccaagaacttctcctccaggcgactgcgctgcgccgcctcccccagtagctccccagcgcggggcgcagcggctcccgcacccccggcgccgcgcagggcgcccctgaccagcagctcttggcgctggcgcaggtactccagctccgccagcccggccagcgtggcctcctgccgctcccgggtgcgctgccgctcggtgtctgcctcgcccttctcccgccagcgcccctcgggctccgccgtgcgctgctcgcctcgggccggcgccggaggctccagctccttcgccgtcccggccggactcggcttcatggcccccagtcgggcagcgagagccgtcaccgcagccgggccgcccaggcggaggagcagggcgctagggctgcggccgcgggtgggctcatgccgccctgtggcggggcgcggcgctggcggggacggtggctagaagccctcgagtcctgcgcgcgaccgccggctgctgctgtcccggcccgggcagcgccgtccgctgtcgccgcgcgtccctcgccgcggcccggcagctgataacgccctgcccggcgctacgtcacgcgcggcggccctgcaaacccccgcctggcgcccgcctccccgcgccggcccctcggctgcgacgcttgcgcccccaggcttcccctcctctgtcaggcgcgccgcccggcccccagagccgcctcctcctcgctcggccctccccgcccctcctcgcccctccccgcctcctcccccgctctcttcgcgggcctcctcgcccccttttcgggtttactgcacccgattttgccctcgctcctcattggctctttctcgtcgcccaaagctcggggcgagcgcctggagccccagcatcctgttacagtcggccgcgcaggcaggggccgcgacgggacgcggcagttgggctctccggagaactttctgaaactcgaccaagttgcagcacagtcttaaccctttccccacacggccactcctcatttccactcacaccgagttaggtttctttcacttcccaagcaaggtattgcaagtgtattcacagacactgtggggttggttccttaactccactttgtaaaggcaagcaatacagagcacaatgcagtgttctaaaacttaagttttgttgtcgttttaattttttaacgtcggtcttacgatggacggcatttaaaattaggcaggaggatgtcgttgtatagcgagaggttgcatcaattcttttacaagcctacgatttgagtgcgcgcgcgtgcgcgctttggtttttgtttgagcttttattattacttagtctgcgtttacaataagagctctgactcagaaatcagactgtctggatttgtatcccagtttcacccctaaatagctgtgcgggcaacttactcccttctctgtgtacgttccccccactgtaaaagggagcagctgctatgggaacctgctgttgaagaattataatagtatgcagcatatgctatatattgtgggggctgtgcacttacaacgtggctagcacatagatagtaaaggtgatatgagttgtagcttttctccagagggatttataagtcttccctcttgaagtatcatgtattggtcatctctgcttggaacacactactccagacccctatcccactgaaatttccgg

SEQ ID NO: 1885499 - DNA, 4001 bp, Homo sapiens; identical to SEQ ID NO: 1241245

SEQ ID NO: 1885500 - DNA, 4001 bp, Homo sapiens
tgtcaggggtagcatccactgtgagtaccaaggagaagtttcatcctaggtctgccagcctcagaggacagttagcagaactgtacccaagcccacccctgtggctgaatatactggggctgtaaggactccttattccttaaattatcgtaccttctttcaatgtaacctatcattcaaaatatcactaaaaggttttctagtaaaagtcttccaacattaggggcttttcctcttaccaggtgggttgtatcgatccccaagacgaccatcccaagctctgtcattctcttcctctgagtccaagagggcctgaatgaattgtaaatttgctgcacctcctccctgcaccaacctcacttggcctctgtggagagacccccattataaaggaggggacttcttcccccaaaccaaccaaattcagagtcaatggctatctagctcttagaccacttggtactcattttgaggtttgaggctgactagaccttggctgttatttttggtctcctataaaacacagtaggaaagagagttttactcttacagcaagagcaagaccaacatgctgtggacgtgacctactaagttgacctcccagcgagctaaacattctaacatcatttccttagaacaagagcaagaccaatacgctgtggacatgacctactaagttgacctcccaacaagctaaacatcctcacagcatttccttctgagcctctgcctgagaagtccaccacagaagacaatattctaagctgggtgcggtggtgtgtgcaactgtagtcttagctacctgggaggcaaggattgcttgagcccaggagttgcaggctgtggtgtgcacttgatcacacctgtgaatagcccgttctccagactggggaacacagtgagccctgtctatgtctactaaaaacaacacaaaacacaaacaaaaaagaatacaatattctgaagggacccccaaacccatcttctcctcaaagagccataagcaaagaaagaaagccagctgcacccttttccagtcaattccaggtggtctctcccttcaaggcattctttcctcaagaacaggttagagtcagggcaaattaaacttgtttttcaagtaaatcgaagtggcctcatatcatgtgtcaactgccttactaaaaagttcaacactcccttcccatctcttcaccccttacatcactcctttcccactaggaccccccccttttttttttcaagcttacttggaaaatagactatatttgtgtagtcacagagacaggctcccttgaatagcccctcaaacacatgagcaggtcctcttggtgaccctccctaggtaagaaccactcttactgggtatggagctgagtgccatgggtgcccagcagggaaaggctgttcagctcaaacagaacagctgtcctgagcgaatcccatttcctaacctctgtaattttcctgcctggagttgggatcaaggcactgtggtagcacctgctgggggtcacaccagagggtaagttacctgcggaggagataggccagtacctgggccagatccacatcttcatcctcttcttcctcttcctcactccgacgcaggccagcccctcttcggggcaagccctcggaggggtctccggacccggatcctgcactgctgctgttccgcgatcccatcttctggtcacagcattcttaggtcctgtgcgggggctcctcctgtcacctccttgggtttggtgaaagcaaagcgtgctctagaaataccagggtctcctgagacggggtagtagctatctctaggagggtgacccttcctcggggctgagatcccttttctttagcctatgccaactaccaaggcgtcgggaacacaaaccttctccaatcctgtgaagcaaagaaagcaagagtgaaccgtagtgcgctaccctagctcaccaactgaagaaagatttgttttctacaccaaactcacctatcgaagtccccggactggggagcgggaggggtgttgggcggtgttggatttccaggtaacctctctgaccgaccaatcgaaatccctctcggaagaaagcgcttcactagcttatctcatctaaccaattagaagccttaggactcaaagaccctcgacgcccccaccttatcgaccaatcagagcgcccccttacaaaggccggcagcagtgacagccaatgaaaatagaatttggcctaacacccctccttcctcgcctcacgcccacgtggtgcgccgggggtgtgtacgccatgagggggaggaagccgagaagcacctcccactgaagccggcggtaaccgccccacgcgagaccacccaccagccaggagcggtcgcaggacccgcagcggcgcgaggccttgtttacaccgactgccgccactgcgttggccaaccgctcctccgtcacgcgcttcgctcgtcacgcatctcgcggcttcctggccggcgggctgcaaacgtcacacgacggccccgcccccttggccagccaactggacagcggagcacgatgattgataggtaggcgggagaatgcgcgaggtgcctgaggggaggagaaagtgcacacccaaggagggctgttagctcttgctggggaggagtaagtgggaactgccagcttcctgaatcagagacagccgaactaggcgtaacggctgagaggcggggcttaaaaaagaaacgtttggtggttcgctaccgagaggtattttagcaagggatataatttactgtctgtccctaaagatcatttggcatcgcacttttcagacagtgcccaagggcctcctttctccccactgcttcccctgtccagctggagccgttcttctgtcgctggccgcagctccagtcggttctgccctaaggggtgcccagcgtcccagtagacctccataccgtccttccgggcttagcttttggaagccttgctcttgggacggtccccttttagacctccctttatccggtctgacaattttttaagacaatccctggctttccgccgcggtctttgcagacgttccctaatacacgcgtctttctgtcaaagcttttccggttccgctgtcccctttgacgctcccttggccctccgggatttgcagaccttcgctagtccctctgtcctcgcggtgcctctccgcccccggccgcgggtccagggtgcgcgctcgccgcctcctgccccctcctgccccctcctgcgggtttatgagtaacaagcctgagtccaaggccgggagttgccacatctctgatcctcgccctggctgggtggggacgtgtgggttgaatgaccttgctgtctcgggctcagaggctcagggtccgagctgaacttcattccctgcagcctgcacttccttgggaaagctgcgagcttccctccgcccgctcctgagggcagggatgggagcgagggctcgtggccttcttgggccctcctggggcctctcccagtgagggcgagggtttggccagctttcgggcgacgtctcctagtctctagatccggagacctgagcttgtcaccagggctagctttgatggcctctgcgcttagaagggtcctgaatgtttggtttaatgttctagtgttaacggtcttgaaattattagtaattttaaagcaagtgcctggtattttcatcttgcactcggctccactgattatgtaggcggtctgctgggcgcccatcctctattgccagattacttactatctgtgctttaacgtttattgagactttaggattccgtggtttctgggttatccagcctggaaaatcgggatctttatttattgattgattttacctgcgttctcccagaatgtgacggaatcattttttttttttattatactctaagttttagggtacatgtgcacattgtgcaggttagttacatatgtatacatgtgccatgctggtgcgctgcaccactaacgtgtc

SEQ ID NO: 1885501 - DNA, 4001 bp, Homo sapiens
cagctgtaacttcttggctgaggaaaacactagaattccagtgcaggccgttctattacttgctcaccatacacccccttttgaatgttgaaaccctttttcagctgctcagcttacctgcacatatactaaatgaatcttgagcaaacatgaattctattcaaaagtcatgcctagaactggatttcacaaaccaggattctttcccctttaattgtagggactggcataaggctgccaaactggtgatttcaccaataacacatctctaaacctacccatctgctttcatcatcttttctaaaagaaaacactaacacacacacacacacacaaaaagaagcaaacgtatactccacaataaaggactgttaaataagcttagctttatgaaactcactgtaattgtttccttttctcattttgccttgaactagtgaaaacgctgccatgaaccagcactgcttctcagtctggctttggaggccagtgggttaaaccaattcagatgcttgcatttgggtctgttggggcctttctacactgtaccataagccatccagatttcttcattctcccggaaacccaggagggagatcatttcagcccacttggcagaagtgcagactgaagtcttggacacagaatttatagctggcaaggactttattcatcatccataccctcagtaatttacagatgaagagtctggcccagggcaccaataataatcactacatggtggcagtaactactatgtgcttagtagcttacagttcataaagagattttgcattcaacaaatatttattgaactaagatggcggctaagacctggggacagagtggttagggagaacttgagtgccccgagttctttgcatttccaccactgcttgagggactgtccagcctcctcgctaccacttagcccctgtaaaggaggaagtccctttgtcaacggacatgagaatgctgtttggccaatgaccatagtctgccctccagggcccgtgaagatggaagagaccttgggcagagtgaagggcagtgccaggcctggcgcagctactccctatcacgtctctctcccaggctcttccagcctcacctggtggactccatggcgaccacaggcctcacctccatgggcagtctcaaaacatttgccctcctgtgggctgtcacacacatagacccagactttcttggagaaggaattctgaagaagcaaaagcaaccaactcaaaacccccacttcccagagaagaaaaggtgggcaagcagatgcagaaaggcagcagccaaagcctgcgggttcctgcaagggccaggggaggggcgagccctacaggcaacttgaacggagagctcacccgccagcccggaaaggcaagccccagtcaggcggaaggtagatggtggaggggcgccgcggcggatggaggtgcccagggccacagaccgctcacagcggtaccggggcggggagcagggcgggcagggaatcggcccgcccttcgtcctgcccctcgccctactctgtcaccgcccctgggaagagtggaacccatacttgctggtctgatccatgcacaaggcggggctgctaggcctctgtgcccgggcttggaattcggtgcggatggccagctccgggatgacccgccgggacccgctcgcaaataaggtggccctggtaacggcctccaccgacgggtgagtgctccggccggagtttctgaggccctggctgcctggaaacaggcactggcctctcatcctcggcctccggtgcccctgtcctcagaccttacacgctgccaaagtctggccctggaaaaaaggtagccacgtggtccgcctgaagccactccgaatcccctagccctggaccctcccttgccagccctcctgtccctgctacctctggcacaactgtgccacctctgtgcagccctatcgatctagtctccccagtgttctgggctgccccagtcaaccagcgccacctagcgtctgggaagaccagaaactggaaatccaaggaaatctggatttcaaaatactatcccacggcctccagcactttgaaaatgtaccagacattctatttgggcaccggaaagtcccccggaacccctcccccttacctagatgggacaccagagccatatgtcgagatttttgtttaggtcggtacatctgggccgaccttgcccagcctgtttctcacccaccattcttgtctatcctggtcctcatttctacaggactttgctagatgccagctcttcacaaaactaaaatacaaatgtaggtaaaatgctaatagctgacaaatgcaaaatgtgtaactcttcctcccaaggcaatatttacatttttgaccggagaccatcttttcacatgcaccccaaaaaataactaaggatagaattttgagaatgatgtagacgagtaagaaagaaacctgggggcagggctgttctgagtgagaccctcaaatcacggaagtggctgctgctgcaaacccagctcatttctcacctctcagtcccaagaggggatgaagcctgtcacccatggtgggaactgtagaaagtgatgtcagttcttgggaactgaggctgtggtccaggtcataataaaaacaagtaaaggaatgccaaaaatggccatgccattaagcctgttttacacatagtaggcacacgtaggggttatatagagaaagagccagaattcaaacccgggcagtcttaacttcagagctcatactgtcgacctcttcccctgcacaggccttagcagtctttgtctctttctgctcacaggatcggcttcgccatcgcccggcgtttggcccaggacggggcccatgtggtcgtcagcagccggaagcagcagaatgtggaccaggcggtggccacgctgcagggggaggggctgagcgtgacgggcaccgtgtgccatgtggggaaggcggaggaccgggagcggctggtggccacggtgagctgcagggaaatgggcacagagccaggaggtggaaaacggagccagcctgagcctccttccctgctttcctagacagcagcacatttttactgtgtgcctttctattatgtccatatactaacgtcagagaatcatcccatctcagtcagagaattttaaaacattctaatgcttcaaccctgcatcatcccttgagtaccccaaagaaacagctggtactggttctgcagtaattttcaatctaattgaacagatgtgaagggtaaatacaatcacaaaatacatgttcccacccatgagttaataaacattcccctcttcttcagcttatagagtcaagtccctgggaacctcaggaagcagcccaccatgtttcagccacttactatgtgccatttcctgtgttcagagccttacacaggttatctctagacctgacaacaacccaagcaaggcaaggactattctctcagtctgcagaccctggctcagatagctggagcaacttcccaaggtcccacagccagtaaggaaagacccagacctcccaggctcccttcctttattggctgcctgtggactaccgggtactggactttagtctcaaagaaagtatataagtcgatgtcagaattagtagtggacaccagccttgcagctgctgaagcaaatatgaagcattcacaaaggaagctcctcttcccttgaggctcacggcatacactttatttcccagagtggaagggagaatctacccaaaaatggaaagtacaggattctgctaacagattggaaggttggcagaaataatttgcataatcttagaagaggaggatcttaagcaatagtagacagtagtatggtagacagaatagggtaattccatttttaaggaactgtctggcaaatgctcaaatgtgcattggaaagagccaaatatgagtccaagaaagtcacaaatgtgagtccaaaaaagcttg

SEQ ID NO: 1885502 - DNA, 4001 bp, Homo sapiens
cctcgctaccacttagcccctgtaaaggaggaagtccctttgtcaacggacatgagaatgctgtttggccaatgaccatagtctgccctccagggcccgtgaagatggaagagaccttgggcagagtgaagggcagtgccaggcctggcgcagctactccctatcacgtctctctcccaggctcttccagcctcacctggtggactccatggcgaccacaggcctcacctccatgggcagtctcaaaacatttgccctcctgtgggctgtcacacacatagacccagactttcttggagaaggaattctgaagaagcaaaagcaaccaactcaaaacccccacttcccagagaagaaaaggtgggcaagcagatgcagaaaggcagcagccaaagcctgcgggttcctgcaagggccaggggaggggcgagccctacaggcaacttgaacggagagctcacccgccagcccggaaaggcaagccccagtcaggcggaaggtagatggtggaggggcgccgcggcggatggaggtgcccagggccacagaccgctcacagcggtaccggggcggggagcagggcgggcagggaatcggcccgcccttcgtcctgcccctcgccctactctgtcaccgcccctgggaagagtggaacccatacttgctggtctgatccatgcacaaggcggggctgctaggcctctgtgcccgggcttggaattcggtgcggatggccagctccgggatgacccgccgggacccgctcgcaaataaggtggccctggtaacggcctccaccgacgggtgagtgctccggccggagtttctgaggccctggctgcctggaaacaggcactggcctctcatcctcggcctccggtgcccctgtcctcagaccttacacgctgccaaagtctggccctggaaaaaaggtagccacgtggtccgcctgaagccactccgaatcccctagccctggaccctcccttgccagccctcctgtccctgctacctctggcacaactgtgccacctctgtgcagccctatcgatctagtctccccagtgttctgggctgccccagtcaaccagcgccacctagcgtctgggaagaccagaaactggaaatccaaggaaatctggatttcaaaatactatcccacggcctccagcactttgaaaatgtaccagacattctatttgggcaccggaaagtcccccggaacccctcccccttacctagatgggacaccagagccatatgtcgagatttttgtttaggtcggtacatctgggccgaccttgcccagcctgtttctcacccaccattcttgtctatcctggtcctcatttctacaggactttgctagatgccagctcttcacaaaactaaaatacaaatgtaggtaaaatgctaatagctgacaaatgcaaaatgtgtaactcttcctcccaaggcaatatttacatttttgaccggagaccatcttttcacatgcaccccaaaaaataactaaggatagaattttgagaatgatgtagacgagtaagaaagaaacctgggggcagggctgttctgagtgagaccctcaaatcacggaagtggctgctgctgcaaacccagctcatttctcacctctcagtcccaagaggggatgaagcctgtcacccatggtgggaactgtagaaagtgatgtcagttcttgggaactgaggctgtggtccaggtcataataaaaacaagtaaaggaatgccaaaaatggccatgccattaagcctgttttacacatagtaggcacacgtaggggttatatagagaaagagccagaattcaaacccgggcagtcttaacttcagagctcatactgtcgacctcttcccctgcacaggccttagcagtctttgtctctttctgctcacaggatcggcttcgccatcgcccggcgtttggcccaggacggggcccatgtggtcgtcagcagccggaagcagcagaatgtggaccaggcggtggccacgctgcagggggaggggctgagcgtgacgggcaccgtgtgccatgtggggaaggcggaggaccgggagcggctggtggccacggtgagctgcagggaaatgggcacagagccaggaggtggaaaacggagccagcctgagcctccttccctgctttcctagacagcagcacatttttactgtgtgcctttctattatgtccatatactaacgtcagagaatcatcccatctcagtcagagaattttaaaacattctaatgcttcaaccctgcatcatcccttgagtaccccaaagaaacagctggtactggttctgcagtaattttcaatctaattgaacagatgtgaagggtaaatacaatcacaaaatacatgttcccacccatgagttaataaacattcccctcttcttcagcttatagagtcaagtccctgggaacctcaggaagcagcccaccatgtttcagccacttactatgtgccatttcctgtgttcagagccttacacaggttatctctagacctgacaacaacccaagcaaggcaaggactattctctcagtctgcagaccctggctcagatagctggagcaacttcccaaggtcccacagccagtaaggaaagacccagacctcccaggctcccttcctttattggctgcctgtggactaccgggtactggactttagtctcaaagaaagtatataagtcgatgtcagaattagtagtggacaccagccttgcagctgctgaagcaaatatgaagcattcacaaaggaagctcctcttcccttgaggctcacggcatacactttatttcccagagtggaagggagaatctacccaaaaatggaaagtacaggattctgctaacagattggaaggttggcagaaataatttgcataatcttagaagaggaggatcttaagcaatagtagacagtagtatggtagacagaatagggtaattccatttttaaggaactgtctggcaaatgctcaaatgtgcattggaaagagccaaatatgagtccaagaaagtcacaaatgtgagtccaaaaaagcttggcttaggctgatggacagaccccaagattggggccttgatcctgatggtggaaggagccgtttgggagtctggatcaattagcactaaccatatgacatgtagcaatgtaatgtgaaaatcctcccggaaaaacatcctgtggcccccaccaggttcacttaacatggcctacaggcctggcccagaggtggtacttgagctaaaccttaaggaatggatgggaatggacagatggaatagtgatgaggttccagataactctgcaaaatgagcagacagccaaggaggaactgaaggaaacagaggagcactgtcaggccacagtggagagcacaggctcaggagtactgctggggaaggggctgcattggaaagatagaggccatgggcctccatatccttttttttttttttttttttttgagacagagtttcattcttgttgcccaggctgaagtgatatggcacaatctcagctcactgcaacctccgcctccaggttcaagcaattctcatgcctcagcctcccgagcagctaggattacaggcatccaccaccacgtccagctaatttttgtatttttggtagagacagggtttcaccatgttggccaggctggtcttgaactcctgacctcaggtgatccaccccctcggcctcccaatgtgctgggattacaggcgtgagccactgtgcccggccatagcttcttaaaaggatacgttaaggaccttaaaaggatatggcctcttaaaaggatatgtttacacacccttgtagcaaataagaagccatgtgaggttttgagcaagagaaagatggttattaggaaagctaatctggctctggtaggaaggatatacagaggagacaccgaatccagggcatcagtgaggaagctgttgctgtcctc

SEQ ID NO: 1885503 - DNA, 4001 bp, Homo sapiens; identical to SEQ ID NO: 1241257

SEQ ID NO: 1885504 - DNA, 4001 bp, Homo sapiens
aaggctctgaacacaggaaatggcacatagtaagtggttgaaacatggtgggctgcttcctgaagttcccagggacttgactctgtaagctgaagaagaggggaatgtttattagctcatgggtgggaacatctattttgtgattgtatttacccttctcatctgtccagttaggttgaaaattactggagaaccagtaccagcggtttctttggggtatgcaagggatgatgcagggttgaagcattagaatgttttaacattctctgattgggatgggattattctccaactttaatatatggacataatagaaaggcacacaataaaaacgtgctggtgggctggttgggtatgcagaacacactgttatgttttagttaacatcactgcgttggatctcaccaatgctgtccaggaaagcagggaaggaggctcaggctggctcccttttccacctcctggctctgtgcccatttccctgcagctcactgtggccaccagccgctcccagtccttcatcttccccacatggcacacagtgcccgtcatgctcagcccctccccctgcagcgtggccactgcctggtccacattctgctgcttccggcggctgactaccacgtgggccccgtcttgggccagacgctgggcgacggcgaagccgatcctgtgagcagagacaaagactgctaaggcttgtgcaggggaagagatggacagcatgggctctgaagttagactgcccggttttgaattctggctctttctctatatgacctccatgtgtctctactacgtgtaaaacaggcttaatggcacagccatttttggcgttcctttacttatttttattatcatcttggactgcagcctcagttcccaagaactgacatcactttctacagttcccaccatgggtgacaggcttcatcccctcttgggactgagaggtgagaaatgagctgggtttgcagcagcagccacttccgtgatttgagggtctcactcagaacagccctgcctccaggtttctttcttactagtctacatcattctgaaaattctatccttaattattttttggggtgcatgtgaaaagatggtctccggtcaaaaatgtaaatattgccttgggaggaagagttacacattttgcacttgtcagccattagcattttacctacatttgtattttagttttgtgaagagttggcatctagcaaagtcctgtagaaatgagaaccaggactgagaagagaggtgggtgagaaacaggctggcgaaggtcggcccagatgtaccgacctaaacaaaaatctcgacacttggctctggtgtcccatctaggtaagggggaggggttccgggagactttccggtgcccaaatagaatgtctggtacattttcaaagtgctggaggccttgggatatgattttgaaatccagattcccttggatttctagtttctggtcttcccggacgctaggtggtgctggttgacgggggcagcccagaacactggggggactagatcgatgggacttcacagaggaggcacagttgtgccagaggcagcagggacacgaaggcaggcaagggagggtccagggccaggggattcggaggggcttcgggcggaccacgtggctacttcttttccatggccagactttggcggtatgtgaggtctgaggacaggggcactggaggcaaaggacgagacaccagtgcctgtttccaggcagccagggcctcagaaactccggcaccaacactcaccagtcggtggaggccgttaccagggccaccttatttgtgagcgggtcccggcgggtcatcccggagctggccaaccgcaccgacttccctgcccgggcacagtggcctcgtagccgcgccttgtgcatggatcagaccagcaagtctgggttccactccttccagcgaggtgacagagtagggcgaaggggcaggacgaagggcgggccgcttccctgcctgctccctccccgccctcagccagctgggagtcgtctgtggcggttggcgcctcccgccgcccgccgcccgccagtcgccgcgccccgcagccagctaccttccgcctgactggggcttgccttcccgggctggcgggtgatcaaagcgctctccgttcaagttgcctgtagggctcgcccctcccctggcccccgcaggaacccgcagcctttggctgctgcctttctgcatctgcttgcccaccttttcttcttggggaagtgggggttttgagttggttgcttttgcttcttcagaattccttctccaagaaagtctgggtctatgtatgtgacagcccacaggagggcaaatgttttgagactgcccatggaggtgaggcctgtggtccccatggagtccaccaggtgaggctggagcagcctgggagagagacgtgatagggagtagctgcaccaggcctggcactgcccttccctctgcccaaggtctccatgttgcagacaatgatcattggccaaacaggatctcatatccctcgccaaagggacttcctcctttacaggggctaagtggtagcgaggaggctggacagtccctcaagcagtggtggaaatgcaaagaactcggggcactcaagttctccctaaccactctgtccccaggtcttagcctccatcctagttcaataaatatttgttgaatgcaaaatctctttatgaactgtaagctactaagcacatagtagttactgccaccatgtagtgattattattggtgccctgggccagactcttcatctgtaaattactgagggtatggagtagatgatgaataaagtccttgccagctataaattctgtgtccaagacttcagtctccacttctgccaagtgggctgaaatgatctccctcctgggtttccgggagaatgaataaatatggatggcttatggtacactgtagaaaggccccaacagacccaaatgtaagcatctgaattagtttaacccactggcctcctaagccagactgagaagcagtgctggttcatggcagcgttttcattagttcaaagcaaaatgagaaaaggaaacaattacagtgagtttcataaagctaagcttatttaacagtcctttattgtggagtatacgtttgcttctttttttgtgtgttagtgttttcttttagaaaagatgatgaaagcagatgggtaggtttggagatgtgttgttggtgaaatcaccagttttgcagccttatgccagtccctacaattagaggggaaagaatcctggtttgtaaaatccagttctaggcatgacttttgaatagaattcatgtttgctcaagattcatttagtgtatgtgcaggtcagctgagcagctgaaaaaggatttcaacattcagcagggcgtggtggctcaccctgtaatcccagcactttgggaggccgaggcaggtggatcacaaggtcaggagatcaagtccatcctggctaacacgatgaaaccggtctctactaaaaatacaaaaaattatccgggcgtggtggcatgtgcatgtagtcgcagctactcgggaggctgaggcaggagaatggcatgaacccgggatgcggagcttgcagtgagccgagatcatgccactgcactccagcctgaccgacagatggagactctgtctcaaaaaaaaaaaaaaaaaagggtttcgacattcaaacggtggcgtatagtgagcaagtaataggacggcctgcactgtattgatagtgttttcctcagccaagaagttacagctgcagtactctgctttgctactcagcacatcccgatgagacaggagagcttaagtatcattttccccatgtccagggaaaactgactctgactggtgctccttagtttgagcctcatgaactattgacagaggctggaagcaccacactccttgtcctcttgcactgtttggagctaatgcactgtgggaac

SEQ ID NO: 1885505 - DNA, 4001 bp, Homo sapiens
agaggttgcagtgagacgagattgcgccattgcactccagcctgggcgacaagagtgaaactctgcctcaaaaaagaaaaaaacaaatacataaaattaaaaaaataaaaaaatcaggtatacctgctgatggaacaagcagcctggctagtcttgacagattgcaagagggcaaccagaggggctgaagttgtaccagcccacaaatttccactgccaatagagtccagtgcctacccccatactgagatgctgtccttctcataaaggcttatcagggagtccaccgaagagatatctacatttggggataagttaagacgatgttctttaagccagacacttatttaacgcccaccgatattttaattcctagctacaaagaaaaccttatatgtatgactggggtcttaaaggtatgacatgctcaccgtgcttgacatataagaaactacttttttaaatacatgggtctgccaggagcatcctacttcctaattttgcccataaatatgctactttcaagtgaaaccttaagccaattcatagtaaatatattatcaaaattttagcacagtaatgactgagcacaccagcctcaaagccagactacgtgggttcaaatctcagttgttcacttactggctacttacttgttggaagttattccatttcttcgtctgttaaaacaggaagcaggctgggtacggtggctcacgcccgtaatcccagcactttgggaggccaaggcggacggatgacaaggtcagaaatcgagaccatcatggccaacatggtgaaaccccgtctcttctaaaaatacaaaaattagctgggtgtggtggcgtgcccctgtaatcccagctactcgggaggctgaggcaggagaatcacttgaacctgggaggcggagattgcagtaagcccaggtcgcaccactgcactccagcctggagacagagtgagactccgtctcaaaagaaaaaaaaaaaaaaaacaggaagcagtttcagcacctacctcacaatgtgcacacagttaaagcacctacctcacagggtgcacacagttaaagcacctacctcacagggtgcacctaaggatcacaggcatgcaagccctagatcagcctgcccaatggcaatataatgcaggccacaggtgacatttaaaattctgtagaacccacactaaaaaataaacaaataaaacttttatcccaatatatggaaaaagtttatcacttcaacatgtaacaattttttgaacattatttggtaaagaatgcatatatctcgattccgactagccatactttaagtgctcaggagccatgtggggctggtggccccaaactgaacagcacagcccaggcagcaggggcgcatagtaggttctgctcacgcccatggtctgaaagaaacacggttgcagttgctgtgagcacacctcacctggagcaaaccggcctatcagggggtccactgaagagatgtctacatttggggataaattaagaagatgttctttaagccagccacttatttaattcccaccgatattttaattcctagcttcaagctgtggtgcgcggttccgacctatgcaaatgaacagcttacaaacagagggccaccatctatttctcattatctggggatcccggttggggtggggggcggaagtgggtgtttgttatttccccaaatgcggaggcccctgcaccactaacgcgaggaaacgcaggcgagtgggaaggtactttaaaaaggggagggaggtgctcagagggaagctaagctctccgggaaacaattacggccacgttacggtctgtgggtgccagaaggagcaacaatggaggcagtcgaattccgagagctcagagagtctgccaaacttagccggcctcggcgcgcgggttcccgggggccccaaaaactccgggcaactgcggcccaacgccaaggtccagtccaggcgctgggccgcaaacgcctctccggcctccgcgcgcgcgcccgctgtctccctgctcctgagtggctggggggccgggattaacctttcaccgccaggccctgtccaatcacaggctcgctctcatgccgccacggggcgagcggagcgtgggggcgcggaggggcggtgcgggagccagtgggattctccaagcggctgtgcgccgttgccgcgggccgtgcgctggctgccggccagccgggcgctgcgcagtctccgcaggcgccggcgggaggggtcgaggcggaggcgcggcgcaggctgctgcaggcccaggtgaatggagtaacctgacagcggggacgaggcgacggcgagcgcgaggaaatggcggcgggggcggcggcgccgggcggctccgggaggcctgggctgtgacgcgcgcgccggagcggggtccgatggttctcgaaggcccgcggcgccccgtgctgcaggtgaggcgggctcccgcggagcagctttgtgtccggggcggggagcgggtcgcctggccgcgctcccgcctccgcgcggaggcccgcgtgccggccatggccccgagccgcgcgtccgggcctggcgggcgctgacgaagggcgcggcctcgcctgcctcgtcgtcccgcacagcgcggcctgtggacccggcgtctgcccgcctcggctctgctcctgggcccggaccccggcgcctccccgcgaggcagccctgggagactttccgggccgccgtggcgtggtgggggatgccggcgcctgtccactccccggcctggcgaggcctggggctcttgacaggtcccgtcacgcgcgctaaggtggcgcgggagcagcggaggtggagacgcgcgcctgacctgccggagcaccctggggccctcctctgatggggccgctgtgccgcgcccggaggggacgaagctgggctctcggtccctcccgggagggtcctgtgtgattactgtcaggggaccagattggggccctggggggcgggcaggggccgaggccattcttttgcctctcccctcagatgtttttgtgccaaaatgcctagaccctgcggaggaccctttcttcagggtttttgattttggggaaatcagtgtatgttttaagttagcacatcagatttctgtagattgtccagaaaagctgagttgccctgatggctctgcctggaggtcagagccagcaaaccactgagtgtgtccttaggaacctgaagatccgcggaaacgtggagatgagttggagggtcctatttgtgtagtgttaactccgtgcttttgtggagagagttgtggttaaagggacacgttactggtctacacgataagtaagtgttcttaggactttcaggttttaaaaacattcatctgatgaaagaggatcacttggacgcctatgcttctgtcttcgaatattctgaatctttacaatcctgattgtcaggtgtcttcgtggtgcttgttttcaaacagtggaaaaggactcaggttaggatttaagcaactcggaaaatattgttaaaaatgtgctgttaaaacaggttagctatattgaatatgtattggtgtaaacgttaagttttctaaataaaaatatacatcctcaccaaaaaactcagtttattaaaagatgggttcgggataagccaggtcctagagaatagtaattttcaatattattgatatctttggaaattaggttctggaatagccagtttattttgcaaagtctactttaaagctacctgtggcacgtgtgtattatatgtaatatgtgctgtgtacatgcacatacatacacaattatttcaaaacttcattttagggcatattccataaaactcaatagataaaaaaacaaaaaactaaagattgcttttaacatggtcactataaacattgatcatggtaacataggtttatagatttactcacggcaccaaaatgctgttttaagaagagaacagttagtccattttaatttggg

SEQ ID NO: 1885506 - DNA, 4001 bp, Homo sapiens
catgaaggttttagccacatggaaaaaatacgcaatacgctaaccacaagcttgcacctactgcttagcttatgcctaagctctggctacatagaaaactcagctatctattacccagtatctaaaactcagtatctatcactgagaaaactcagtgatctattaggtaacacaggatgaaaaagtagaataaagtgggggtcatgccattctgccaaagcattgtctgcctaaatacctgtcctaaagactcatgggagaggcaagccaatgaacaatggtcaatgtggcaccttgaaccaattcagtcggctcttaacttcccatacatttaattaaaatttttttcaaacaaaaaggaagattccttaaagtatcaggtctcttaggggttatgctaacagaagcaggtgaaacaccaaatttaaagagctttcattaataatttctcagccttatggcttcttaatgctattcaatggaaagttttaattttatctgcaaaatgaagctaaaagaatgtcgcctagctccttccctgtctggaggaacttggattttttttttttttttcattagaagcttgggtaaaactaaaaagaaacctgtattcaagtttctgcaagaagctttaaagaaatgctgggatggtactcaaatagtttacaagttttccacctacaactcattttgcattttcttaaataagataatgactcaaaaaaatttaaaggacctaggtcacagatcttacaaagggttggagtcatggtataaaggtataaagattgtatataaatgttcatattttccaagaaacagagcaaagaccgcctgtgataactcttccttttttctacctgccttccaggatcctttctttccaaaacccctcataaattaatgataatgataatcagaagagagagtgttggccatatcaatctgcacattatattaaattacttttcccaaagtttggaagcatttcctgaaggctgtcaagggtattagtttttttctctctttaaatcacaaagcaaaattccactgtctctccccaaccccttctaaaaaaaaaaagttgtcgagttttgcttttctattcactgcaatcctggccaaagtaaagccctctttctcaatgacgtcaagatctttaccaagattaggctttcacttctctattgcagcaattagccagggaatgtataaaaggcgtcagggagactcactgggctgcagagagaggcactttgcaccacagacagatagcaagaagggaaagacagagagtgagaaaaaagaggagtcagtcgctcctggggaagggagagagtgagactgggagaaagagaagcacagaaagtgtgtgtaaaacggagtaaagaaagaaaaaaaaaaaactacccttaaagcacatttaaaaaaaaaaaaaactctggcaattcaagaaagaaacaggctacgtttaaagagcatagagacaatgaaaggctaaagaaaattttaaaatctctgccacagtctcataggtgcttggaaatgaaagtagaactgcctgtctttaacggactctgacagaggtaactggattagggacgagtacgccagctttttttttttttttttttttttttttttaacatcttaaatcctgaaaaaaaaaaaaaaaaaaaaaaaaaggcagcagctccgaattgaatgaattgatgggcacactccaactgctgggctggagagactggacttagtcttgccatttctgcttctttgaaagaggagacaacttgggcttccttttaatttagttttttttccccttctcccccaacccccaaccttcccccttacctcccccaccccctttatcaccaccccccttttaaataagagggtgaaggggaaccagagcgcacaagggaactgactcaggaggcagagaagatgggcatcctcagcgtagacttgctgatcacactgcaaattctgccagtttttttctccaactgcctcttcctggctctctatgactcggtcattctgctcaagcacgtggtgctgctgttgagccgctccaagtccactcgcggagagtggcggcgcatgctgacctcagagggactgcgctgcgtctggaagagcttcctcctcgatgcctacaaacaggtgagctgagctgagaagggcttctccctaggtctacaggggcaggggctcatatgctggggaccagaggccattgggagcattggggggagagctgtgaagccctatttgtggggttgccaagtgagcctctaagtttactttccacacctgttgcacaggttagcttgggagggtgacagctattaagccataatgactctgtgtgacctaataaggaatctttctactaagggttattaatatcttgctgtgatttgggagtagaaggcattgtgctggtacgataacttgggaaaagtcagaaaatgatggagaagaggagactgctgcatttattctgctcttgccataaactggaattttgattttttgcttgatgggaggctgaggtacactgaggaagtatgttcgaggggtgggtactgaaaagcaagaaatgagaaatgctactcagaactctcagagagttgacaagataagaaagtggtcatagaaattgtgattgggcatcatagctgcttggtttctggtagaggtaagagttaatgaaagcaagcagctgtgtgccacctcctctacattgattcaaatttgaaccctttggaagcgattttcaggcagtgatcctgagttactagatatcaacttgcgaaagaaaagtctgaaaactagctgtcagaaatccagcatttgtaagggaagcctcctttactttgtttctcaaaaataaaatacgttgccctagaaagagatgatgggtctgtgattcattaaatctcagagctgttatgagcattagagcagtggtctcccttacctgctcaggtagtgcccaggggctgctctctcaaaatcagaggtagtgatcttagtttctaagtgaaaaatactgtgttccaggctttttgctggtgagagatgttagtagagcattttcaactaagatcttcaggggcacagaggatgattttcgccctggtcttttgtcagttttcccccacctgctatgcccatatgacttctaaaggtcccctccaccccctcaaccaggcttgagaagaatgaactattttggcaaaagtagttatcaaaatagacaatcttggtttccctaaaagtgttgtgggaccttgcccaagatgccagaaaaagcaactgtacatctgtattttagaggaatatagaagccaggtgttcagtgaagtggtgtgttttaggcaggcagcaccttagaaccagagacggggaactcgaaataatagagacgcaagggaatgcatcctccataaataaacactagaaaactaaaaccatgcgccaagaaaagagaagaagtaacttgtaaaattacaaagaattcaggacaggattgttcttctgaaaatcagatgttcaagaagaaaatatctgttgtgaactagggaaattttaccacaatgcacgtctttattattgatagtaacccaaagagggtttgtgtttattgttgttaaaaatgtgaatagtaagagctcttattagtagatggaaattcttttatgagaatatgaattggtgctcaaagttctaacagtaaaaactcatttatattgtgcatgtcagtgaggacgggagatctagaaaagtagatattgaattgattatttcatttccacaaaagtatacattgaatgggaagtttttaatggtttgttttagtggaaggcaatttggaggcaggtggaggagtacacaagtatatcagacatattattaattaggaagttccctcttcaacatcatattttatacgtgttagcagataccatggaaatatcagtgatttgatc

SEQ ID NO: 1885507 - DNA, 4001 bp, Homo sapiens
ttaaaaggtagaattttctggcacacgtcataacttctcaagaaagagcagcttctactattgtcactatccttgcagggagtgcagtgaatgtgtgtgtatctgccagcatctctccttccccatccaatccaggatctgctcagtttctgtgaatggggacttttctctcccagagatgggcacgagacccagatccgaccaaagagagccgaccccctccctcctgtttccaccagatttctgccatgggaaatgatgctttctcatctggggatggccaggacaggtgctacaaggactccatgagccagagcttctggggccatctcacccatgtgcagagaaatccacctacagtgacgtggacgcagcagaaggcaggagctgacagcctgcggggcaaggtgttggctgcacctgttgagtgcctggatacacctgttgagtgcctggatgcagccgtgcctgaaggcatggctcctcctggacttttcactgactggagccagtacattccttcttcgctgaagttggtgtggattaagtttctgccatgtgcaaccctaaagggtcctaacaaaacacatgaatgggggataggaacgtgcttgggaccaagaggtgtcacagagctgggcttctgtgatggggaagccctgtgacttgttgacctggcagggccctggtaggaattctgtgggaaaggagtggccaaaggtggtggcccctggccatagcttgtgaagtgcccagaagcaggagtcgtggctctggcccacggtgctggcttatgttgggggctcagtgccagccactactatttccctacagagcactctggtgccctgggcactattctaggggctgtgcggacgtgcccccacctgtcctcacaacaccctccctaggaggtgggctcggatgtgccacccattttacagaagacgagatggaggcgcagagttcaggtaacttgcccgaagccacccagtgaggatgtggtggcgtgggcatgaagcggcacctgtgccgggacacagccgcacaggcacagcctcctcttgtccttcgctgtcccccacctgctcagaaggtcctgcaaatgactcttgtccccctacgagaaaagagcccacagtctcctacccaggcaggtgcagctaccacaggtctgttgccaggcgccgggcttcaaaggggagaggcaaagaactggaaggctgtccctctgcccatggccacctcctgagatgcctcccaatttggccccacttaccaagtgtccctgctacctcctggagcacccccatcccaccccgccccaccctgccctgcccctgggccctgccaggctggggggctcctcgggggcaaaaacatgcctgactccttgtgtgcccagagcccctccaggaccagtgcttgagtggaggaggcctccctaaaggtcaaacggtccaggaggacacctgccaccacaacacagccctgggcctgcagtgtagcatcatcagtgaacacaccaccacgcacatcaccgtcacctcttgcaggcatctccgagccacagccacagcaatcgagactccctctcctctccgagctctctccgtacacctcgtctcactaacttcacacaaccctgggacatctgtgctctgaggatcccaagcttcaggcttcagccagagccctgcgtgcctcccaagcagaggggctgggtttccgacctggcgtggccatgcacaggcatgcgtgtggctccgctgcaccgcccgtgtttatcttctggacaccgggaatcatagccaatcagactttaccaccagggtaatcagggcaaaacctgcagctgttccatggcccaagcggaggacactgcggctgtactttgtccccttatgggaagtatatccttcctcttgttttattttttcttctcacttgtggtatcttctggcattccaaagcttcttagaggaatcctgaaatccactctggaacaaggctgggtttaagtaaacagacacacacacacacacacacacacacacacacacatacacatacacacacatacacacacatacacacacatacatacacatacacacatacacacgtacacacacgtacacacacatacacacatacacacatacacacacatacacatacacacatacacatacacacacatacacatacacacatacacacacatacacacacacatatacacacgtacacatacacacacacacgaactcacacaggcacacatatagactttacacttgcccctcatgtcatggtgaacacaacacattcaaacattaggcccgcctctccagtgaagaaactgaggctcagagaagcacatggacctgggatgcctatctgctggtcggttgaaccccacctttttccagagaggatcacagatggaaaggagggactgactcgcaaggtggccctccagccagcctcagggcccggctcagagcaagatctgtcttggcacaagtagcccagcatcccagtgccccacccagctccaggcaggacccaggcacccacaggcaacctctggcaaggcatcatcctgtgccctggggtctggctgagcaccagggagcacagtagcactcatgccaggaacaagtcagagcccaggccgggctggagggccctgagctgcggcaggaagcgggcaggcgaaggcggtactgggtggaagtggcagagcatgaggccaggtaggaccagcactggggcaccttcgtcctcaagtggggctctcagcagccgcagaacagcaggtagggccagaatagcgtctcctagaacttcctaggaccttctggcgtgcagaatgacccatggggaaggcactggaaagtcaccacccaacccactcctgatgcagacgagacctgaggaaggggccagagatgcacagggtcacacagcaagtagccagggcactgcctcctaggccttctcctctccttggccgggagccccagaccttctccaacccccaaatgctgccaaacacctctgctagatccaggccctggggccctgacaagctgtcctggctgggatcccagcctgcccagtcaccccagagtcccgccacctcccctgtgcctgcctcaaactcccagagggatggaggtctgccatgttgaggacaccgctcagaccagagctctgggtccctcagccatctcccaccccatcccctgcagggtgtccccatgatcaacctagccaagtgtttggatagaagaattcattcttaaagtaaatgagaagggtaaatacctccgtgggagggcccaggtacccgtgggaagacctgtttagcccagaaagggaaacggattggcccagtgaccaggtgatgggtgcattcaccagacaccacgccccaaggggacttcccaggaagtgttgtctgctcacagcggcaggtcctgacccaccgtgctcagccctggctgccaacatgccgccccagctcactgctgcaggtgcgcaaaaggacagagtgaaataccctgagtttctccccaaacaaggagttttcagtaagtacacaccgcactcatttactccattcacaaaggtttattgggtccctgcctggtgctggtttgggttagtcactgtagaggatccatctgggccagcctgggaggggcaggtctggagtccgaggcagacacgaaaccgggggtgacacccaggggctgtggaggctgccatgctgaggacagctctgggaggaccgctgaagaggatgactagcgggtggggagtggggttcagccatctcccgggagctgggagggcccaggtggaggtgagggcagcagaggaggaggaggaatgggggtctccaggtagaaaaagggagcagggaatagcatgagtggaagcccagaggaaggaaagtacccggagggtctctgtgcttcaagaggcca

SEQ ID NO: 1885508 - DNA, 4001 bp, Homo sapiens; identical to SEQ ID NO: 1241272

SEQ ID NO: 1885509 - DNA, 4001 bp, Homo sapiens
cctcagcctggtgactggagtaaacaatatcatatttttctagagcaagaagggagaattttgaatgttctccccacaaaaaaaaaaaaaaaaaaaatgcctggacgagcaaatatagatcctaagtaccctgatttgatcattacccaacctatatgtatgaaaatgtacccctaattatggacctttatgttgtgaaaaaaagttaatagaaataaataggtattgctaaaaatcacagggaaccacaaaagcaatgaatatctaaaggaatcctcagaaatacaaagtgaagacccacaatcctcaatatcaaattacactgccaagttgtagttatacagctgatatatgatacttgcataaactatggacaaaaacagggagaacaaaaacatgatcaacacaaatatggacacagtcaactgactttgataaagaacactgcaatgtggaaggcagagaatgagtacctttgagaaaaatgatattcagatgcagaagtgagaaataggaccttattttacacgatgtatgaaaatgaacaccccctcccccaaattgaaggcaaaacaaaagaccataaaccacaaaatgtttttaactaaaacacaggatgagcatatattttgggtcacttgaatctctgctcacctttgcaaagaggaaaataaacaaacaccctagaagaaaaacctcattgacaattaaatgctttgtcactgatatatattttcttatatgggtgacaaaaattacatgcatgaaacgcaaaaataaatatatgggactatgtcaacatgaaaagtttctgcacatcaaagaaaactactttccaaattaaaaagcatcctatagattaggcaaaaatttcaggcaatcatgtaattcacgaggagttgtcatctaacatgtacacaaaaaacactacaaagtagcaaaagcatccaatctaatattttgcaaagaacctgaacagacaattctgcacagccataaaatcgaacaacaaataagagataaggtcctcaaaataaactattcattagaaaactgtaattcaaaaccacacacagataatctcacacttattgaatattcctagattttttatttaaaaaataagaggggctgggaatggtgtctcatgcctgtaatctctgcactttgcgaggccgaggcaggtggatcacctgaggtcaggagtttgagaccagcctgaccaatatcgtgaaaccccatctctactaaaaatacaaaaattagctgggcatggtggcggcgcctgtagtcccagctactccggaggccgagacaggagacttgtttaaaaccaggcagaggctgcagtctgccgagatggcgccactgcactccagcctggaagacagagcaagactccatctcaaaacaaaaacaaaacaaaccccaaaccaaaaataataggaatgcgggtatggttttggagaaagggaaactcatacactgtaggtggaaatgaaaattaggatacacaccatggaaaacagctaaatagctggagactcctcaaagaactgaaactacagatgtcccctgctctagcgaggtctctttttaaaggtgctgaggcatcaaaaataatcctagactccagctcagaggcccctgaggctcggagggacccaggtccggcgtttcaccgccagctctgggccagggcgctcctatatgctggacgcgggtcggacattggcatagccttcccggccggggtgcggacgctgcagtagccaggaccccacaaccgcccccacgcggaggactcgggcccagatgcccacgaagaagtgaaagcacgaaaacagggagaggcagggaaggagccgggagggttcccggtggggtccacgcccccgccacttaccgcggagacctgcctcctactccaccatcacatggaacccaccactgcttctccgaagctcgctctgaccacgccgctgctgctgcaggggcctcgcaggaagtgcagtctcagcttccgtagggacacgcacgctggcagcatccctcgtgccaggttgaagctccaccccctcttaaagggacgcggctcggacttgccagaagcagctttgggtggcaacacaggctgagcctctgcccagccccagggggcgacgaaagacccctggtctctcatcctccccagctttcgggccctagaagtcgcagggacgctccctgtgaccccctccccgagatcggctccctttgcctagggagcacccgggacctgcccctgccctcctctggacctcagtttcaccatccgcaaaggaagcagcctcgctagagctctggggttcctcaagcttggcgtctcaggatccagggtgtgctcccctgcccctctgcagagggggtccagagaaccacagaaagctgggggctggagggacagtccggagggcagcagggcctccccggcctcactgtccgcatctgtcctgtgggagcccgggggcctcgctatggcccagacacccacagcctcaccagggctgcctgggtcaccgggctccccaggaggcaggcaggggccctggggtccagcgctgcccccacctcaactccatcctgcgtcagggcccgcgaggggccctgtggactggacccaggcccgcccattcccagggagaggctattaattattgcctcaatttcagagcctgttatcggtctcttcagagattcagcttcttcctggtttagtcttgggagggtgtatgtgtcaaggaatttatccatttcttccagattttctagtttatttgcgtagaggtgcttatagtattctctgatgatagctggtatttctgtgggatcggtggtgatatcccctttatctatttttattgcatctatttgattcttctctcttttcttctttattagtcttgctagcggtctatcaatattgttgaccttttcaaaaaaccagctcctggattcattgatttttttgaagggttttttgtgtctctatttccttcagttctgctctgatcttacttatttcttgccttctgctagcttttgaatgtgtttgctcttgcttctctagttcttttaattgtgatgttagggtgtcaattttagatctttcctgctttctcttgtgggcatctagtgctataaatttccctctacacactgctttaaatgtgtcccagagattctggtatgttgtgtctttgttctcattggtttcaaagaacatctttatttctgtcttcgtttcgttatgtacccagtagtcattcaggagcaggttgttcggtttccatgtagttgagcggttttgagtgagtttcttaatcctgagttctaatttgattgcactgtggtctgagagacagtttgttataatttctgttcttttccatttgctgaggagtgctttacttccaactatgtggtcagttttggaataggtgtggtgtggtgctgaaaaaaatgtatattctgttgattttggtggagagttctgtagatgtctattaggtctgcttggtgcagagctgagttcaattcctggatatccttgttaactttctgactcattgatctgcctaatgttcacagtgggatgttaaagactcccattattattgtgtgggagtcatattttggttgaagttgagtttctagtcaaagaaaaaaacacatgaagggcattcatgtttccaggaacagaagcatcctgtctggtttttcaaaggtgaagggagcagtctgaaggggccatggcatacgtgtgtctataatcaaagctcagagccaaggccctgggggagggtcaggggtgccccagggggtgcgccccatccaacactgcactgccaggggccttgtctttattaaattctgggccttttcctgggcaatagttacacaaggtgggttcaatgaaccctgtgtcctgtggctgccacccatttcagggtcgcaaaggt

SEQ ID NO: 1885510 - DNA, 4001 bp, Homo sapiens
tcagcctggtgactggagtaaacaatatcatatttttctagagcaagaagggagaattttgaatgttctccccacaaaaaaaaaaaaaaaaaaaaatgcctggacgagcaaatagagatcctaagtaccctgatttgatcattacccaacctatatgtatgaaaatgtacccctaattatggacctttatgttgtgaaaaaaagttaatagaaataaataggtattgctaaaaatcacagggaaccacaaaagcaatgaatatctaaaggaatcctcagaaatacaaagtgaagacccacaatcctcaatatcaaattacactgccaagttgtagttatacagctgatatatgatacttgcataaactatggacaaaaacagggagaacaaaaacatgatcaacacaaatatggacacagtcaactgactttgataaagaacactgcaatgtggaaggcagagaatgagtacctttgagaaaaatgatattcagatgcagaagtgagaaataggaccttattttacacgatgtatgaaaatgaacaccccctcccccaaattgaaggcaaaacaaaagaccataaaccacaaaatgtttttaactaaaacacaggatgagcatatattttgggtcacttgaatctctgctcacctttgcaaagaggaaaataaacaaacaccctagaagaaaaacctcattgacaattaaatgctttgtcactgatatatattttcttatatgggtgacaaaaattacatgcatgaaacgcaaaaataaatatatgggactatgtcaacatgaaaagtttctgcacatcaaagaaaactactttccaaattaaaaagcatcctatagattaggcaaaaatttcaggcaatcatgtaattcacgaggagttgtcatctaacatgtacacaaaaaacactacaaagtagcaaaagcatccaatctaatattttgcaaagaacctgaacagacaattctgcacagccataaaatcgaacaacaaataagagataaggtcctcaaaataaactattcattagaaaactgtaattcaaaaccacacacagataatctcacacttattgaatattcctagattttttatttaaaaaataagaggggctgggaatggtgtctcatgcctgtaatctctgcactttgcgaggccgaggcaggtggatcacctgaggtcaggagtttgagaccagcctgaccaatatcgtgaaaccccatctctactaaaaatacaaaaattagctgggcatggtggcggcccctgtagtcccagctactccggaggccgagacaggagacttgtttaaaaccaggcagaggctgcagtctgccgagatggcgccactgcactccagcctggaagacagagcaagactccatctcaaaacaaaaacaaaacaaaccccaaaccaaaaataataggaatgcgggtatggttttggagaaagggaaactcatacactgtaggtggaaatgaaaattaggatacacaccatggaaaacagctaaatagctggagactcctcaaagaactgaaactacagatgtcccctgctctagcgaggtctctttttaaaggtgctgaggcatcaaaaataatcctagactccagctcagaggcccctgaggctcggagggacccaggtccggcgtttcaccgccagctctgggccagggcgctcctatacgctggacgcgggtcggacattggcatagccttcccggccggggtgcggacgctgcagtagccaggaccccacaaccgcccccacgcggaggactcgggcccagatgcccacgaagaagtgaaagcacgaaaacagggagaggcagggaaggagccgggagggttcccggtggggtccacgcccccgccacttaccgcggagacctgcctcctactccaccatcacatggaacccaccactgcttctccgaagctcgctctgaccacgccgctgctgctgcaggggcctcgcaggaagtgcagtctcagcttccgtagggacacgcacgctggcagcatccctcgtgccaggttgaagctccaccccctcttaaagggacgcggctcggacttgccagaagcagctttgggtggcaacacaggctgagcctctgcccagccccagggggcgacgaaagacccctggtctctcatcctccccagctttcgggccctagaagtcgcagggacgctccctgtgaccccctccccgagatcggctccctttgcctagggagcacccgggacctgcccctgccctcctctggacctcagttccaccatccgcaaagcaagcagcctcgctagagctctggggttcctcaagcttggcgtctcaggatccagggtgtgctcccctgcccctctgcagagggggtccagagaaccacagaaagctgggggctggagggacagtccggagggcagcagggcctccccggcctcactgtccgcatctgtcctgtgggagcccgggggcctcgctatggcccagacacccacagcctcaccagggctgcctgggtcaccgggctccccaggaggcaggcaggggccctggggtccagcgctgcccccacctcaactccatcctgcgtcagggcccgcgaggggccctgtggactggacccaggcccgcccattcccagggagaggctattaattattgcctcaatttcagagcctgttatcggtctcttcagagattcagcttcttcctggtttagtcttgggagggtgtatgtgtcaaggaatttatccatttcttccagattttctagtttatttgcgtagaggtgcttatagtattctctgatgatagctggtatttctgtgggatcggtggtgatatcccctttatctatttttattgcatctatttgattcttctctcttttcttctttattagtcttgctagcggtctatcaatattgttgaccttttcaaaaaaccagctcctggattcattgatttttttgaagggttttttgtgtctctatttccttcagttctgctctgatcttacttatttcttgccttctgctagcttttgaatgtgtttgctcttgcttctctagttcttttaattgtgatgttagggtgtcaattttagatctttcctgctttctcttgtgggcatctagtgctataaatttccctctccacactgctttaaatgtgtcccagagattctggtatgttgtgtctttgttctcattggtttcaaagaacatctttatttctgtcttcgtttcgttatgtacccagtagtcattgaggagcaggttgttcggtttccatgtagttgagcggttttgagtgagtttcttaatcctgagttctaatttgagtgcactgtggtctgagagacagtttgttataatttctgttcttttacatttgctgaggagtgctttacttccaactatgtggtcagttttggaataggtgtggtgtggtgctgaaaaaaatgtatattctgttgattttggtggagagttctgtagatgtctattaggtctgcttggtgcagagctgagttcaattcctggatatccttgttaactttctgactcattgatctgcctaatgttcacagtgggatgttaaagactcccattattattgtgtgggagtctatattttggttgaagttgagtttctagtcaaagaaaaaaacacatgaagggcattcgtgtttccaggaacagaagcatcctgtctggtttttcaaaggtgaagggagcagtctgaaggggccatggcatacgtgtgtctataatcaaagctcagagccaaggccctgggggagggtcaggggtgccccagggggtgcgccccatccaacactgcactgccaggggccttgtctttattaaattctgggccttttcctgggcaatagttacacaaggtgggttcaatgaaccctgtgtcctgtggctgccacccatttcagggtcgcaaaggt

SEQ ID NO: 1885511 - DNA, 4001 bp, Homo sapiens
tacattttcaccttattccctgcagcctctatatctcttaggatagaaatcatgtcaataaaaaccagacttagaccataaagtgtcaaatgggacctcagcaccaaattgagcaaaattctggaatacagctaaaacaagtggagaggtatactgaagttataagttggtgtggggggaggggtcactggatgcaaaattacctagaagaaccatcgaggctagggagaccaatgctaagtcgactcaactggattttctttttttttgaaggcaggccaggaatcaggtatcacaaggaggatgatgggggaattaaggaatttggtcagatattgagggtgaatattaatgataaaccaggttaggaagacttctgttaaacctgaccctaggttgggcactggtggctcacgcctataatcctagcactttgggaggctgaggcaggcggattgcctgaggtcaggagttcaagactagcctggccaacatggtgaaaccccatctctactaacattgcaaaaattggccaggcatggtggtgcatgactgtaaccccagctactgaggaagctgaggcaggagaatcgcttgaacctgggaggcacagtttgcaatgagccgagattgtgccactgcactccagcctgggtgatagagcgagactctctctcaaaaaatgaataaatataaatataaatataaatataaatgtaaatataaatacaaacctgactctacaaggaaggactaggaaacccaacagaatgacctacttgtgaagaggccaggggagatgactaaatttggtcaagggaagagtcttcaacagttggtaggtatcagttgagacctcggcttctcagcctaaagcagggagagggataagtctgtgctgcttcatgacagaaagagtctcttatcctcaaatctctccatttcccacaagtctcgggttggaggaaggaaaaatatctagagtagattgtcactcaatgacagcagagtggccgacgaagacacacagacacttccagatgaatttgcaaagcagtttattgcaggcttcacaaggcacttcagctcaggcaagtggaaggggtatagagactgaagaggacagatgctgacacccagagtacatggagggatgggatcttggctatgattgaggagcttggcagatgagtgatgacgaggagtgctgatacaggagcttagatgatggtatccaggtgaactggaaccactggatactgtggagggtcccgtcgttgatccctgttgtcacatgcaactatatagaacatgtttgctggtgtctgcgcatacctgcagtttgaaatattctgtggacttggagttgtgaggttacagtacattaaaggcacctggactccactatgatgacaattgttgagagttctgttatgagggcaggttatagttgggttaccacaaacattaactacattagcaaaagttgcaagaagaaaagtattttggtttttccatcgccgttgataattgttaattacccgcattgcattggtgcattggagctggttcctactgatggacgtcaaacccctgagcccaggtaaactgtggaggtttgacatggagtgagccctccacagccagaagccccaacagaagaagcagacaaatttgggaagtgaacagttttggaaccatgtttcctgtgagaaaagaagagaagtaactactccccgattctgtctcggttgtgacacacaccatagtgtctcaccccacaggccaatctgctgccactcttgggtcccatttcctgttccttcctgtccccaaagtgtgccacatctcctaagcactaacgtcagctcccttctccctcagttgctgccctgtcgctgcccctcctgtcccaactctggggattgttgacttacacagtctccgcgctgtggctcctatgagaattgatccagctggttgttctggggttcaggggcagctggtctcccctacttggaactatttaaataaagcatcccttggtgggttgggccagcagagccaggagggagggtctggctcttggccatgcagaaacccacagattgacacatggtccacttgcgcaatcatcctttttatttgatgacttggctgagcaacggatacccaaggacagccctgctgctctttctgctatacggactctaattccaagtcatcctgtgttagacagagttttgccggtgggatctggactctggatgaaaactatatgctgccggcagaatgaccacagattttataactgtcctctggcaggcccctaaatgaccaaagtacatgaaggcaggcatagtagttagaacaaatagagccacagagatctgttttcccaggaggaacccagcttcccttccatttttagtaatatccttggttctctctcacataaatgctctccatctcatccaccactcttgctggaaacttgagctattaatttcttggggcacaagattctgtagataattaaaacaatctgctccatacatttgagggatttttttctttactcctcttgcattggatccactttctcttaagtcttgccctgattattgcttccactttgtgtaaagttacacaacctaaaaacacaccgaggacagttgtaaaatctggcagagaatgaatgaacatttggtgtcatgaaagattccaacctagcactcggtattcctgtgatcttttcagcctatggtattttctacaaaacagtgtgttctggggttgtcattcatcttcctggtaggtttcatcttgtgatatcaacaagaaaatggttctgtatttacaaatgaacatttaaggacagagcactgtattcctgaaagtatagaagtcaactgtacaatttcatacaccaagcatagacttattcttggacctcagagatatacaggaaagtaattgtagtcacataattgtattacagtatgatagagataatagcatttgtgtgaacatggtttcatggggacgccgagggtgaaggaaatcacttcgcttgagggacaaggaagacttcaaaaaaaaaaagtttcatttcagcagggtcctaaaggcaaagcaggtggttttcagggactttagggaagagatgagcattctgggcacaggggatgatgtgggaaaattgtacagaggtggaaagtgaattgcaggggtaagacctaggtacaaaaagatgttaaatctctggtctagcttctagattagtaaatggaaatcagacctttaaatgatatcatataccatccaattttcctgtcatttacaaatgcaataattttatcactggagtccttaggtaaatgtggacacaatggtcatcaggtgaggattcaatgcacagctaacagtactctgccttgaagtcctcttctggccgacattcattagcagctttatcatgaagcaaattcttttttcatgtatattgtgtggagatcatttttgcaggtgatgagaatgtaaaggtgaatgatacgtagagtatcccctctgtgatgctgacaggcacactgggtagaaagacttgcactcaagtgtctatagtgtgaggcaaaagacatagactgcagccccagggcaggtactcggctaaacagtgcttcttttcagcatatacagtgttatttataatgtttggtttggaagataaagtttgacattggaatagttcactaaaagttttcattactgtcttatctttaaaaatcacatgatgttggttggtgcactgtgtctccgttgctgtgtggtatcaattagagctgggtaaagctgcctctgtggaaggggctctagctcagggctgttctctgactccatctctgcctcctgacttacatcctgtctgttcagtaatgacaccttcctggcttctggagaaatctgtgattatgacgcgtcagacttgttgcagtgtctta

SEQ ID NO: 1885512 - DNA, 4001 bp, Homo sapiens
gggcttaagtgatccaccctcctggaatgctgggactacaggtgtaagccaccttgcccagcctggatggaattatttataaggtttaattaaaattagctttaatattaacagttcatgtgaaactagaatttggtcttctctgttaaagtgacagttttctggaatattggtctgctcttcattatggcaggtttttcttttttttttttcaccttgaaaaatatatatttacaggaacaattccccattctctgggactctttagaaaaaaaaaaggtccattttggggaagcaaaacagtggagacgagtgtagcaccgtcccccaaatcaccaacccccaggtcccaaggcctgggctgggccagggctgacagggaagcccaggagtcttttgaacccactcttcctgcctagaatagagacaggacaggctttatgtcccccattcctccctcccacctccagggacattgaaagtgtcctttgtacctacctgtaggaaattggggggctgggagggagggaactgaaaatacacatttgttatcaaaaataaacatctgggggggaggcggcaggaagattccctcccaaatccctttcttcacacccaccccaccaaatataggaagagatgactccctctcccctattgaaaagccccatttaaaaatagattatactatcaaaatggcagcacgggagagacagggagacctggagtactggctggaggggcccccccagacaggaaccacccccacaaaacccctccatgggaggaaacaggcaggaccccagggagtttggcagacaaaggaatggcttctcagggggaagaagaacaaagggacattcctccctggccaaaaagttggttaaaaaaggataagctgtctgagagaaaggttggggaggtggaaatttctattccaagggtgtgattctgccttggccaagactcccaacccattaaatggtacaaattcttcctggaccccgagtatggccaggaataataaaacgaaactaacttctactcacatcctaaaatggacacagggctccctcatctccccacgggcaggccgaggaatgaagaaagaaaggtcgttctcaagtcagaccccgattgtcctgtcttggggaaaaaagcggggaggtgggggagacgtcctgaccaccctaataggttaggtcaggcgcttcccagtggccttcaaaaaataaataaataaaccgcccctaccattgaagtaggagacgtgtcagggcagccactgggggacggacagaaaagagagaaaagagagaagctgtggaagctgagtgttttctgtggaggagttaatgagagtcactcctgggagaaatccttcccaaggatccccaccccaccacaatcagagcatgagtctttcagttgaactgtgtttctccttgagagagcacggatggagggaccccagaaggggtggtggtgctggtggtggtcatggcctctgcggccctggcgagagcaccgcgggggtcgagaggccagccacgccgatggaagggatgtgcacctgggcgccgccactggacggaagctggcaggagagcttggccgggctgcggggcgcagcgggactcaggctgctccggaagtgaacgctgggaggcagcgagctgggtgtcagcagcgccggggtcaacgtgtgcgtaggaagcagggacagggtcagcgccggcctcggcgcctggaggccggagccagttcccgatcctggggtccgttcgggtcccggcgcacctagcaggctcgggctgagtggaagctctaggtcccggggcttccggcccttctgcggctgggagatctgagggctggaagccgcgtggccgcccgcctgccctgcggtgtccataaggacctcggcagccacgctggcacgccctcctgtggagggacttcaggctcggccttggcggtttctggcacgaaccctctctcccccgcgaattccagctcttcctcgggcccttccacttccacttccgggggcaaagggcggcgcaagcccggctccacattcggctcttccagtttcgggtttggggcctcgggcggggtcaggatgacctgcagagggaagccggcttcctcagcctccaggcaggcctcccaggggcttggactgcaggagctgcgttggggagcaccgctgcaggccgaggctgagggggtggctgcggctgcagagactggatggtgaaggtggaacagaggcccgagcgcatgtacttgttccggctgttgcgcgccaaaccgccagggcctgccattcctgcacccttgggtgtgcctggctttcctgaggcagtgccccctggggcggcatgtgcagcagcaggggccacaactgccatggtgaagtaaccgacacctctgggtggggcgggcagtcctcactcagtggagcaccctgcgacctcaggataggacacaaacttgtagacttaatgccatgtcaaatttgttctctatcttgagcggggatccagaatcgaatagtaaaagaacattaactccagaggccacgaaagaaattgaattagttgaagaaaaaattcagccagcacaagtaaatagaatagaccacttagccccactccgacttttgatttttgctactgcacattctccaacaggcatcattgttcaaaacacagatcttgtggagtggtccttccttcctcacagtacgattaagacttttacattgcacttggatcaaacggctacattaattagtcaggcaaaattacgaataataaaattgtgtggaattgacccagataaaatcattgttcctgtaaacaaggaacaggttagacaagcctttataaattctggtgcatggcagatgggtcttgctgattttgtgggaattattgataatcattaccccaaaacgaaaatcttccagtttttaaaattgactacttggattttacctaaaattaccagacagaaacctttaaaaaaatgctctgacggtgtttactgatggttctagcaatggaaaagtggcttacactgggccaaaagaacgagtcactgaaactcaatatcactcagctcaaagagcagagttggttgctgtcatttcagtgttataagattttaatcagcctattagcattgtatcagattctgcatatgtagtacagggtacaaaggatgttgagacagccctaattaaatatagcatggatgatcagttaaaccagctgtttaatttgttacaacaaactgtgagaaaaagaaatttcccattttatattactcaattcgagcgcatactaatttaccagggcctttaactaaagcaaatgaacaagctgacttgctagtgtcatctgccttcatggaagcacaagaacttcatgcctcaactcatgtaaatgcaacaggactaaaaaataaatttggtatcacatggaaacaggcaaaaaatattgtacagcattgcacctagtgtcaagtcctacacctgcccactcaggaggcagaagttaatcccagaggtctatgtcctaatgcgttatggcaaacggatgtcacacctgtaccttcatttggaaaattatcatttgtccatgtgacagttgatacttattcacattttgtatgggcaacctgccagacaggagaaagtacttcccatgttaaaagacatttattgtcttgttttgctgtcatgggagttccagaaaaaattagataatgggccaggatactgtagtaaaacatttcaaaaattcttaaatcagtggaaaattacacatacaacaggaatcctgtataattcccaaggacaggccataattgaaagaactaatagaacactcaaaatctcaactggtgaaacaaaaagaagaaaaagacaggagtataacgctccccagatgcaacttaacctagcaatctatactttaaattgtttaaac

SEQ ID NO: 1885513 - DNA, 4001 bp, Homo sapiens; identical to SEQ ID NO: 1241299

SEQ ID NO: 1885514 - DNA, 4001 bp, Homo sapiens; identical to SEQ ID NO: 1241300

SEQ ID NO: 1885515 - DNA, 4001 bp, Homo sapiens; identical to SEQ ID NO: 1241303

SEQ ID NO: 1885516 - DNA, 4001 bp, Homo sapiens; identical to SEQ ID NO: 1241304

SEQ ID NO: 1885517 - DNA, 4001 bp, Homo sapiens
ggtgtgtcaccaactgtaaatgggaaaaataatcccctctctgcccagacccaggacaataatgagagaacactgggagagtcttatgactggtgtgattactgctgtctttccacctgcctatatggccaatcagaaaacacagaggagccttcccttgtgtgggtcagaggcatccagaggcctggcctcaagccacagttgcctcctctccctgctcctgacttcccaaagctgcagctcccatattcctgagttgggaaggtccaacattgtgctagaagagtggaacccaggacgcatggagaaaatctggtcttcctggccggcagcgcttaggcagcatctggtgctcacgggagctccaggaggcaatgtggccaggcagatccaactcagcctttggacacagacgggcctggcttcaagttcaagctctgctggttaacagctgtgaagccttgggaaagtaactcaacctcacttcatttgtcagggcaaccacaacactaccctcacggagctgccccgagggtcaggtgaggtcttcatgtggttgtggaatacggctcttggcacatgctgggtgtccacaaagaatccattttcttccacttttctctccctttcctttctctcttccctcttttcttccttctctgtttcctcaaaaagtgtttggtggaagaacagcccacattaagagctttggaaagactttcgtaagacaccaactcacctcccacggagtccacgggcctggtggggaggcttactactggctaagaaaggagagacagcttcatgagcgggcagtgcagaatgggccagcagggctgcaggtgccgtgggatctcaaggaagctgggagctgagctgagtggctctaaaatgtcttgatgcccttagaagagagaagatcttctggagagaggaatgatgcagcccccacaaatcacagaaggcctggggagaaaagggcgagcacagcaaagcaggtggttacgtagtcagatgccagctgctggagaggttcaaactgttggctgtgcacaccagcctcacacagtaggcagcagggagctggccctggtggccacaggccctcagggcgctctcttcagccacgcgtgccagatgttttggagcagaaaggatgtttcctgcttgtaccagtcagggtgggctgggacgtgctgcagaaacacatagccctcaaatctctggcacttaaaatgatgatggtttggctctcacccatgcaaaggttgccgcaggcaggagcaaccctccagggcacgtagtggccaacaatctaggatgcgtcagtccagcggcacttccatctcggtccacacttccccgaccccgcagcagggtaggggcatggagaatacagtgctggctttcaaggcctaaattgagtcacagcttgtcagcaccgggccatctcctccaaacccttcattttgcctgtaaggaccctcaggccaggggtaggggagatggcttggagtcaggccacagcagctgtctattggccagtgggaaggagcagggccatcacttctggatggaggccctggctctgccctgccaatgcccccagtctgggtagggagactccagggaggagtcctgcaacctaagatgccaaatcttaggttgtagtacagaggtgtgggttggcgcacaggccaccagccatctggctggtgagggagacaggaggagaaggcagtagaaggggaagagaaaaggaaggggaaggagaggaggagggaagaggaggctgagtctgggcagaaaaatgatgaggcgtgaaaggggcccgtgagctgggctggcacggaggcacgaccattagcatttcccaggcggccgccctcgccttcagcctcaccttccctctggccagttggtgggcagggccaacagcggctctgggctcccttgcttgctcagagtggccctgcttgcagccccgccggcgttggcacggtgacagtagccaagtgtgcaaacttgtcccattgtccgcaggccagggggagccatggaaactggctaatatgacacaggaaaatgtttgctgatggcaattctatgggctttgtccacctctttctccatcatgacgactcgatttaagtccctaactgtttgactacaaatgcaaggggaccgtgcaacgccaaccttttgtccggctgcgctgaatgggcaattcaggctttgtgcagctcaattgaggaagcaaacataaagacaagattcctgagagctccagctcccttcccatggatatcccagcacctcgttagagagtccttcctcggccaccttttccgacaggcatcagcgcacctcctgaccttgaaggccctccatccccgatccctgggggatcctggcagggagggtggtgggggtggcagggggagacagagagagagacagagagacaggagaagagagagtgagagcgagagagccactcaacactcaaggacagcgggaaaagcagcccgccccggcttaccccgtccgattgtctgtccgcactggagcatggcagctgtaggcctggagtctttgggggaggtttgcaagcctgtctccactaggcccagccccttctcaatcctggacattttaaacacacacacacacacacacacacacacaccccacccccttgagaaaccagggaactgaggtcaaggggaggaggggggtggaggctgaggagagtggggctgaagggtagaaatttaccgggaaatgattgcatttgggagctgtcttttttgtgatggtccccatggtgacaatttgtgacggcaaagaatgtgggaacggggcgccgccgcctgattgggatgctttgtatctggagaggcgctcctgattggcctgaggggccccccagctccggggagttgtcctccattcagcccactcaagggttgcacaactgcttccagccggacggagctcggccggctgcgccggggcctgtcccaggtctgcagtggggaacctgccgggccacgttggtggggcctgggccgcaccttcggtcagtgtggaggcccggtggctctggcccgactgggtggcgggtgtgggggcaggctggggcctgggggaggggcgaggtgccgtgggtggcggccgaggaggcatgaaattgctgcagatgcttcttcgggggaatccctgctgcccgcagcctgagatcagcccgcaaggcaggtctcgattaagtgccagacaggggtcctgcctggtcctgcgtgagagctgggggtggagcgtggggactgaggaggggggctggtgctcctcgtgctgggggcaggagtggtgggagggggaggctaccaccagggaggaagggggcttggccttgctttaaagaggaacagttgcctcagctcagagaataaacacctcgctggcaagttgcacacgttggcagcgtggtgtgtgggagatggggcaggctgggagtgtgtgccagccccagcaatgccacctgtagctgggtcaccttgggcgacttgcttgacctttctgagccttggctgcaagaaggggcaccagacccaagcaggctgggcgaggctctgctggtgcctgccgcatcccaggtgtgcaggaagtgctcagccacttgcacccacatccctctacccaggactctgtttagggctgagaggtgctggggtggggagactgtttgtagacaggtgctgtggtcttttgggagggctgggtgtggttgcttggagagactccgatggcctgttttgtcccccaggtcagctcggtgcccttccttggagctgccggccaccagcagagcctaccctcttcatggaaagcctcgtgcagtggccccctggtgatggcatccgacagtgatgtgaagatgctgctgaacttcgtgaacctggcgtccagcgacatcaaggcagccctggataagtccgcac

SEQ ID NO: 1885518 - DNA, 4001 bp, Homo sapiens
tggtctcagtgattctgtaaggatgaaggtgatgtagagtagtagatggcagctctactctggaagtccagaatactgctctgattcacacctgcaagccttattggtcaatgactactgatattccagccacccaaacaactgctttcggagaagcattaatacctgcgaataaaacaaatctattcgtttcatacatttggttcagaacactaggagaatttgagaagagacgagccagccccaagctgtccttgtttcttttattaagaataggccatgatttgagcacattctactacttgcctcacttcagcctattgatgggggaaaagtgagagtctgtgtgtggggactctggcttggcagtgagatctaacacagaaagatcctgaagaaatatgctgacaatggggttttatctcttcaatgcactggagacaaaatccctgcttttaaaaacaacactcatacagagccaaggatgtcccagagtgaacagtcctaaccctttctcagcctgcctaagagctcgttggtttcagaaggatgagccaaggactgctacttagagactactgtctaggtcaacccaactggcataagtaaagcacctactgtttatagtaggaggctgcaagataacaggagatgcagactattgaaggctactgatctatctgtgtagacaggcaagaataaaacaactggagaagaaatccaggattacacaaaaagaagagcgtgatggtatggtagactactccagaacagtgaatttcccctgcattaaggatgagatccctatgaattgggatcattcaggaagtcttcttggagaagaaaagtttgagcatatggggaaaaaaagttggattggcaaagagctgagctgtcagtagctgggtccttagtaagtaggctgcatggagctgggagttatgctaaaggagttgtaatttgggatgcctctaattaaccattttgggaaaaatataataaatccctttgtagcatctataataaactgcccaatatctatgtggtggggaaaaagttttattctacgtttcacgtggatggtgataacactaggtaatctcagcatctttcttattctcttgctaatccaggattctaagtaataatcactttgttctacaacctgaatctagcccttgtactgtgcagtttttttctacacttatttttcctgttgtctgaatcaatctccatggaagcataagttttactgagtttcaaccagctgtgtccaccgaggtaaagatggtaaaaataaaaggcacagggcatatataccacagcagcagttacttcccacaaggaaccagagattggaagtgaagctaaaacattttcagctacgatagcatctctttcaaggtgagccatttccccagggagagtttccagctcttagcaaaggcagaacaataaaacatcaaggatgtctttctaaggctgcaaacagaatagccaataccttgaagctgatctgcttcagagtcctttaaaagccaggacagcaacaaagtgcccacattacattttctacaagcttgctaagcatctcttttcctaaaccacaaaacccgagacatttctacagaacaggcagaaagggaagtcctgggagatcagggccctgtctcagcaggcatcactccagcctgtcttttcccgagtggttttctgcacttctcttccatcttttcccctctgtcccacactggaagtcactagtctgtgccctccttacctcccatggtttctgcaccttcatttccaaaggcaagtgaaaacagtgccaggctgcgcacatgggttactccagggacttctcttcccgtttcccctaaagcatttgacagttagatcttggaactgagtccagcagcactgaggtcagagagatggctaaagctaaaagcaaactggatgctgttcaggaggttctcctttgtcatttttatctccaaatagaagacctctgttttcccagaagattaaatagtagaaaagaagtagcccaaggtgggtgactctgcaaacaggtgggtgaggtctctagttgagtgagggggtgtctgtgggttgtgggttcttcttatgagcagagcttggaggaatttgttctatttgttgtggttttcccagggggaagtcgggggtggctgggactctaatgatcattatcagaagactttggattaggcctctgaaactttaagatgtggatcctctcgcaatcatgttaaaatgcagatctcctttcaataggtctgggacagagcctggcttttctataaagcttctggtgatgggatgtcgctggttctcagccacaatttgagtagcaagaggttagcttttctacttactgccttcatatccccagttgggctatgtcgttttatcaaaacaatgtggtaagagtgagcgccaattactagcctgttgaatcatccattgttagagctgtttctttgaggtacatttaagaggcccctccctgtggttccccattgcacaagaagcccatttgccaggcaataccttgggcaagcaagccactgtgcaaaattgcattggctcttcctgctgccagccaggcggctgctggttgacgttggagttgtacagtttatgtgatagtgatgacagcgctggctctgaagggtactgaagattttgaaggggtacttcgctgcagcagcttcacctctcacttttgtttacccacccccgaggcttgtgggagagaaggatcaggcagagctctgcacgtgccatgccaggggtggaggaattatatttttattttttgctttctctgctacaggacataccatgccttttacagatatttataggacaatttccctcctgagagtgcccaagcatgggggatggtgaggaagatgactgaaggagaaagcaggaaaagggggtgtctgcatgtatgaggattggaaggtggggaaaacccttcgtgtttggttcagccttcaagaaagaggaggggttgactagattacagatgttaaaccaggggtctgtggttcaaaccagcaactctctgcccttgtaagctgtatctggctggtgtgttaatttgtctagggtaagagcccctaggtttcaacagattgtcctagagtcaatgatacacaaaaggttaatcagcctcatttccaatcaggatcatctgcaagtccctcccagagcagatatttggagcactaggcttctagaagcagcagacatcaagttcgggccatgggattagggtggacagggcagccacttggaatcattttctaccagaggcagaagaggctcagctagcaacagccccattttacagagcagaagccgagctgcagtcaattcagtgattcctcctaaagtagggagtcagaagccgagcctggactggaacctcggcctcctagcacacagagcacaggtctacattggggaaaagccccttcaatctggcagttgcctggaaagcgcaagacatttgcggccagagcgccaggagcccagctggttatttctagcttcctgaatgtcaaaaatacaggccgcttctcaaagcagcctccacttgtcagaccaaatcaaggcatcagcgcgtcaagcaggcgaatcctctgccccaggcaccagcctgggggcgcacgccctgcctccgccccgccccacacggcgcacctgaccggttcccgcggtgcgcctaaccgcgggcgggcgagcgctgcacccacgcacccgggcgtcgctcccacctgcaccccggcgtcacgcctgagcgcaatctgcagccttcacccacctgggcggctgcctggctttgtttagagttggagtcagcccggcagcctgccttggccgagtgtgactagggagctggtctctgaccctagcggcagattgggcaggacacactgccttctctctggtctcttttggaa

SEQ ID NO: 1885519 - DNA, 4001 bp, Homo sapiens
tatatatacatatatacacacacacacatatatatgtgtgtgagtatatatatatatcaccatctcgacataaagtgcaattgaaattattaaaaggaattaaaactcacttcttgccagattacaaataacttttgtcattaggaagaatagatttttaaatattacattaaactatatactatttatgcccataagaatatcctattttgagagacttgcattcatgcaatccttaaactatataacatagccttaatttgaatgaaaaacattttcccagtcaatatgagctcctagcatataaaatcagattattacagtgctcattagcaaaccccagtttttgctatttgaaagtaaacagaagaaaaacttatttccacctgctaaaattttatacaggattacaaaacaatgcacgctcagatttgacctaagaaacaccttaaaacattaaaaattcatcagtcagagctggtgttgtattgaaggaaagctcctccagtttgctgctgagctcggatttgaataaaatgtccaatgttaacaaacaatacccacgtttggcactttgtgtattaaattgatcaaacagattttaggaggcacaatgcacaatttgtacagacctgattgagttaatataatatcagcaaattttacatcgaaatgattctgtttcttttctttgtgtttaaaaccagcacagattacaaattttaatgatctgaaaatgtttggtatacaaaatcatgcttatttcagtattagcaaaaacacaagaaatttttcaacacaaacacccagctgtgtctattttaaaagcagttcaatgacagcttgcacttatgagcatgcaatcagctaatttcgttttttttttcttctgtgttaatcaacactttccttcctgcatatcagagtacaaatagtatagttactccacatcagtaaatgtttacgtaacctgtcctttcccaagaatccggttacaccgaatcatttcacgctagaccgactacgaaaacgtaccgggccgtccacctcagagggagccctgtgtgccattataagtggtggtgagaaggggggctgtaagaggagaaattgggaggagtaggtggaggaatggagagacagaggaatggagggtggggggaaggggcggggggagctaagggagaaggagggaggagggaggaaggagagttgaggaaaagtaggaagaacgggcctgaagaggggagaagagtgggaggaggaaaagtgagtaggaaggggaaggcccacaaatctctccagccggtaggcaaagcccattagctcacccggccctgcgagaaatccagagcttggaaataaatgtttgggaccatgtcactatcaacactgattgttggaacccttgaatttttccacatgtaaatacagtttgttttaaagtgagaagatatgtagacataggtaaagatacatacatacagtggaaggacatttgaggttagtccaatattcaaagctcctttgtggcattcctaatagatgcatatttaaaattcactagctatttgtaattatctattattctctccagtttcctcccccccccccaaccttttctctctttctctttcttaagactgggggtggggaggatggaataaccccctattatcctgagtattcatcaaccgcattctttatgttacaatttaactttaggatcaagcataagcaccaattttccttccttcgttttcttaaataccaaatctgccagatatcttaatgaaagtttatccaagtgaagaaatgcttacattttataattatttaccttctagaggaaggaaaaggtgcctttcatttatgcttctccacctccctcttctctggggctacatcctccgtaaaatgtggtatgtttcgtgcccatgtgggatgaaacagcctttgatcaatgtgctccccactaaattccaatccctgggaaatgctgggccttagccctgcccctggccacgggatccttttaaagcccccgattcgcaatttccccattcacttcaacctccaaccgaaccttcccagttccaaagcccaagaagctgggactgtgagatccacgttcccaaggctccccggtgctttccagcagcactcagggttggcaagagctggcttcagtatactgttatttcaggaatgaggcccgcacaaaataaaagcatttgagaaacggaaaggaaaaaaaaggagtgaaaataggaaggcttaaaaaaaaaaccggaaagaaatagacgcccacccttattttccctccaatgtcaacaagcaaaacgaaaatatttccagggtgatcgctcgcagctacccgcttccaattcggattagaagctgaggctggagcggcgaggagaaaacgacatcgagtcaccccgcgcgtgagcgacgctctggagcaggagagaaggaaaaggaagagacacacgtatatagcatgtgttacctgatttatttcgagattgtttggtactgttttctctctgggcacctctcatttcggaaggccatcagaggcgcccactactgagcggccccggccgccgcagcagcacccggagccccagtcccggtttccccgcggtgccggagcccggagctcgccgccgcccaggcctcaggaatcgagtaagtaacccctgtttggccccgcgctcctctgcccacttcctcctcctcatctcatcgctcccaaagctctcccacaccctcctcccccgaagtaaaggacacccccgcacacacgccagcggtgggccttatctccccccttatccaaagctgcgctagactattacctacaaagggcacaattttcctgctggctcagaaatgccagacactggcctgcaaggccgactcggaaaagtagtgcctcgcctctacctcctccatttcctgccctctcgcatcctctccctgcactcccactcttcccactaccaccaccacccccgctttcaaaaataaaattggatacaaactttaatcactaaggacaaatattgacgcttaaacgaaaatgacccagtacaatgaggaggaagccggaaatgtgagctattggccctaggaggggaatttcggtggagcggagccggcggggtggagggggtggcgggggcgcagggaagggctgcggcaccgcgtgctcccgccggcgtatccctacgcggctccgcgcggcctcggggtccgaggcccgcggagagggggaggcgagcgcccgagggggcggcagccggcgggcggggcgggggtgggtgggcccggcccctccgattggtcgacggcgagagagacgctcccgcacgccgccagctctgattggcccagcggtaggaaaggttaaaccaaaaatttttttacagccctagtgtgcgcctgtagctcggaaaattaattgtggctatagccgcctcgatcgctgtctccccagcctcgccgcggccgctccgggacgcgcccgcccgccgcccggctctccccccctttgggctgctgctgctgctgctgtgactgctgctgcgagaggaggaggaggaggaggaagcagcgggggggggagcggggggtggggggggagaccaagaagtacagttgggagcgagggagcttcacccccggggcggtggttgtttcttttttctttctttcttttttcttttcctttttttttttttttctaattcctgaggggtggttgctgcttttgctacatgacttgccagcgcccgagcctgcggtccaactgcgctgctgccggagcgctcagtgccgccgctgccgcccgcgccccccgcgccccgttcggcacccaccggtcgccgccgcccgccgcgccgctgtcccgctcccgcgccgccgccgccgtttccccccgacgactgggtgatgctggacatgggagataggaaagaggtgaaaatgatccc

SEQ ID NO: 1885520 - DNA, 4001 bp, Homo sapiens
caagtcccagagctgaggttctatggaattagaaggtggaaaaggccacattaagccctcctttggctttcagcattttttcccccatttcagatagaccgacaggcagacatgtgtcccctgctgtccacatcaggcagggctggtccaccacttcctcttcagggtgacaccttctcacatctcttgctgcaactgtaatgggagagagaaattaagaaatatgtttgagaatgcaagaagcaaaaacacacatggaatgacatattccatgtacaatcacctttggctcacatcccctctttttgaactctgagaaagcaggaggggactggggccggtgaaaataaggtgccacctctacttaatataaagagatttctggctattgtgtgagtgtagctgggggacttgggggtggggttgggggctggggatggaagaggaagatgtaagggggcgacttcgtcctctctaggccagcaagggcttggacaaaggtctctggccttggttcctctggcggagaataagcaccctcaactgacgcgctgatggaggggcaggacctgcattagccggagctacaggaaagcagggtacacattgtctcatcctggctttgttaccacttctaaccctgagaatctctggcgtgagacttcaaagatcatctgacttgtctctgccaccttgtgccttttgcttagtgactttgggtaggtcgcatcaagtgctcagtaatcaaaggggtggggctggatgacctcaggctacccctgggcttccacctcctaattgtctccagatggggagatgccacacaacttggaagtagtaaggtctccggtgagtctgaaaggcacatctttgctgaagacttgtcacctgccctcttgaacctttgttagggggaatgactctcagattggggggggggggtctattttttgagacagaaaaaattttcagaagcctaactggtgtttcccttagtccctccttttggctaggtttaaaagtactgcatgctagaaagctttctccaggtctactcgctgtttttttctgtagttttcagaccgctcacgatgtcctgtccactggctcaggagggggtggcaggaagggtgccctgggcttctcctctgtagaggaaccaaccaatttggctacctgggagtaatgtgcaatcacatttttatttttgtcaccaccagggtgtcctgttggactctctcctctcatcctctcccaaggcggctggttggtgtggctttagcagtgggtgctattatttggaggtgcctagagacttagagtggtggctgcaccatttcgctgggtggcttgcgaattgtcagtctggttcctgagagctcaaactgagatggaaatgagacctgttttctctctaggccggccggggcgttccgcacaacccacttgagaggccccaccggcgtggcctttaggacggtgcctcttgtcttgtaatggccaccggccctccctcgggagacacgcggccacctgggtgggacgctgcggtgcttacctccgggacacgaggtggtcgctgggagagggctcggaaggccctgggggtcctatcaggacgcagcactggggagacgtggaatctcctcttctcacccccacaagcctcgcccgcatcgtaattctttttatttttactttcgagccatgtaaggcatgcagatggggtaggagcgttcccgcgacacgttgccagcagcgcagcgccggcccgctcgtgtggccggagcccggggaggggacagggcacgcgccgcctgacccacctgccccaccgcccacggtcgcggccgccctgggtcgcgggacccgcgccggtcacccccgccccgcggggcccaagaggcgaggccgcgcggcccagccccggcctccgccctggctgagtgctggggcgcgcgaggggcgcgggcagggtccgccccggcgggtcagtgccccgcgccccaggccgctggcggccaggcccacgttttccctttctccggctccctccgccctccgctctgtccctccctccgccctcctccctccccgcgcttcccctcctcctgcctggtcatgtgtcgcctttttttgtttgcagtggaaacaatttctcgccgctcggcgcgccccggcccgacgcgccgcggcggaggcgagcgggaggcgggacggggcggggagagcggcggggccggcgggaggacgcgcggcgcgcccggcggacgccgcaggtcccatgccgcgccgcgacccccgcgcccctgccgcccgcgcccgcggccgccccccgccgcccgccgccccgggctcgccgcgccgcgcccgcgcgtccttagcggggccaccgagcgatgcccgccgggcgcccgcgaaagtttgtcggctcctgctgaagggcagcggcgcccccgcacccccgtgccccgctccggccaggtgagtttgcaccccgctcctgccggctcccgcgtgggctcggggggcacccggggcgggaggcgcgtccgagacggtcctggagactacctcgccgctctgggaagacgagggaccccgcaggtcctggggggagggtcgggtgtggaccccgggagcccccgagccgggaagttgccgggtccgaagagtttcctgccccgacgtgcgtgctgcttcccggtgcctcggtttccgaaaagacgcccgcaaggaacagagttggtattgtctgcggaggacggggtccccgccgttccgggccggggagggggttccgatcaagtggagaccccaagatgagaaacaggctcctaacaaagatcaccccccggccaaactgtgcagacttggcacaggcaacgaacgtctccggagacccccgaggcccgacccccctcatcccggccctgtttgaaaccctccttgggccctggataagttgggggacggcgggcttttattgatttgttttcgaggctcgccgcggtgcggccaataaaaggtttatgacatctgaccggcagtgaaggtatgcgagctcccaattgccctgtatatggggataagagcagtttcccccgttgcccggcaacgccgctgattgacgcggggtgcagccaatcgccactcccgcaggtccccttgaaatgtttttgacaagtacagtagacgagagtgaagcgcgtgcgtgcgcgcgcgcgcgtgctgggtgggcgggggtgacccggccccccaaactcgctactgctcggctctgggaagatttcttaactttttaaagttcgcatcgaacatctgttcagagctgggccagtaatgtctttgtcagttatttggagaccttctgtttactaggcgagaaactaagctttcttgccgcattttctccgttaaaaaataaagagggtaacaaaacacagcaagtcataaaaaaaacaaaagagggtgtgtgtgtgtgtgtgtgtgtgtgtgtgtgtgtgtagagaaaagttgtaaggaggtcaccagtgaataactatttgcgtatctggtggagcagccttgttggcagcagattaaaaatgtttgcttaactgcaactcacatgatccagattctttttttttccctctgaaacaggaggaaaaaaagatttggcgaaatctgtagttagagtataataatggaaaactcctcagctgtggtttctgggaactgtttttttttttttttttttttttttttggttattgttgttttgttttgtttttacatggaactgtagtgatcagcagctcttcaccctgttggtataaaatgcgggatttatagggatgcagtgagtggttggagagtacggggtcccagcacaaaacgcacacatgatccaagggtactgaactcccataaccctctcttcgtgacaatgccactttttctcctaaaaccatattgctggcagtgtttgtttaaaacaaaaggaaacatggagaata

SEQ ID NO: 1885521 - DNA, 4001 bp, Homo sapiens
acattcaaagagagttagtttcttctttaatggaaaagtatcattcatccattttaggtctttcaaaggatattatattacctttcatcccagcataaattcaaattgccatggcattttttccctttcatatgtctttcaaggttgaaatatagagccctgaagagctgtgggttggtcacctctcttcgaaagcatgcatttgctaggttgcaaatccaccaagggaagatttctctttttccactggaagttcacatgatttaatttgcctgagtaacctgctgtcataggttttcatagagtcctgacatctaacagagtaattaatgctttaggcttttaggagctgtttcaggtttttattaatcaccgttgtgattgcacgtgtgaattatgaaggagttattttggtagttgaatttcctcctcaggaaaatttccatatttgttcatgatgaactgatagcctgaagaaaaaggagaaaatggagaattttccccgggtccgaagcaggcactccacattatccagggtaagaatgacttcctagagaacagaaggagtgtgaggtgtttgaagctggtggttaaccgttttctctttccctccctgaaatttaattagaaattccccgtgattgccccgggaatatatggattttgtgaactttgtaaagatgtgtggcatcatttcatcctgacatcatttgccatgaatttgcaggttttttattcctttatgattcctgccattggaggaatcactcctaggaccttcctgattcgtctactggtctttttggggttttccagaagacggaggtatctaggtaatcggaaggaaatagaaacctatccttataattttatttatggaggactacatggattttcaaaattatgtgattgtacttgagatcagtgtatgaaaaaggaatgcactgagcggagtctagtccttaggattctcttctgaagtgtgaaaaagaaaacacaatagctgttatcttggaaactccgcccctccaggcattcactcgcaccccaggcatttgcaggccctctgcatagactctgctgtggctacacgtgggtcttccgtgccattttccttggcatgtgagtaaatgtaggtttcccctgtgtttatgggaaattttactcccagccttttacggtgacaagagaagactggctgctttactcagcacagggcgcttttcaatgattagagcgattttctctgattctactatacttagggaagatttttgagactacaaatacaagacaaagtagttatgtatcagcatacggatggaggcagccactgtgctagtatccaattctttgactactgagtgaaaatagctgctcctgttctaattgccatttttactcttcctaagtggccagttgggagagacggaggagggagggaaggagctgggttgggcgggaggaggtccatttgcaaagtcaacagcggaagtgttcggggaacagaagacatctgatccgaattctatacagataagggaaggattggatacccagcagatgggccacccttctaattctgcagtagcttgccgtgacagacttctaatctgatggtattttcatcttaatttacttgcaacctgttttgttttgttttgggtttttttttttttgtaggtaacagcatttctgacaaaggtgatacatttgctaaagcttaacattcagattccttccttgtctgagtgttatataattatatatacatttgggctcaaaggtcccagtctaacaaattcccttcacaggagcaccatttgagggcccattctctcattaattttatttgacatttatgtcaacattacattcctagcctaaaaggagaaatcacatgagtacgcaggggcgtattttaaagtggagtatttagtttggcagtgaaaggcacccggcgaagtctgcgaaagcaacgttttctaaattagttaatataaagtggtctaaatgcactaaatttatattgttctacaatgtgctaaatgctagagcacgtggctgttttgatatttctaacattttccccctggggctcccagaattgcctaagatgggtgtctctggaaaataaacttgggagccatcagaggtgtcaggaacagctgaaaacaagtcacttacgatgtcagcgatggaatttgcttccgtgagaccttgtgcaaaaatcaaagacctgattcttctgcttagcctaacttcagagcgaggagtttatcggtggggcatagaggcatctggtccccagttctgctgaatgaagagtttcacaggcgctgcgtggaggccggagggcggttgccagccccagcccagcattgggagccaatcacatggccacgactttgcctagtgcttcccaaagtagacaaaagcgtgaactggggttatcaaacctaaataagaaacagttgttagagaccatcggtatcctctgatttgggagctaagttgaattttgattcaagagatgccacgagagagggaaagagcttcccctaagcagcctccaagggcccgagcgtggcagctccttctgcttccaaaatgctgacttgtacatacttggtggtttttgtgctctggagctgtgctttgtgtttggctataacaatgagttgcagactgggtttttgctttgcagagaattcaccagcattggagaggacctgcctttggtaaaagcagggagtgggcagtttgtccagcccccgtcgcttgagtttattatagtgtttatcccttctccctatcatccccaccccagccagggtttactgacccaaaacgacctcccaatttcctttctgccatctctatcatgaatctcaagggtcaagtgcttggtcaccagctgacctgtgagcctacccagatagcaaggtccttcaaggtcatcttagagtgatcttaactatgatcttctagagtcagtgtcgcttgggggtccccttcgtgggttggcagaaaggtgaggattttgtcagggaaaatagaggaggaaggatgattgcagtttatgaaggagaaactttgagtctgagttagctttcatcagagtcagtatagacaaccttgctctcaacacctcactttggcttagagcacttcgtgattttcttacctgatctcatctgcttcagcttcccgctggccttgtttgcataccgatcagctggtggggtagcagtagagtgttttagagttccagtacacccttcctttcctataaaggcacaacatacagaagaaatagaaatttacaattttttttttaaagctgtaaaggcaattctgattttcatagggaagagattttaagaattggaggagcctcggaggtctttgcatgtctagataagcttggaggttaagagccaggtctcctaacatttggcccagtcttcttttcttgttccagccactgcctgtaggacgatcagagaagcttcccattgagattccaacatagggatgtaaagtggtaggaaatccttctgctaagagctgataacagttatgtaccaacactatgggagggagtggccctttgagatggtggagtgaaatcctggggctgtgtcttggcagggggcagagctgggactggcaccaagctccctcaagcactcagttcagtggtctcctccctgtttcctgggtagaaggcgattgcaggcacccactggttctctctctgctctctccctgccagccaccaagcgtatccctgccaggccattatcaccacctcgccagagaagaccagaaaccttattctggaagttagaaccatggaacgaatatgtccttattagaccatgcctctgtttttaacttggttaaatgaactaccattctcttataaaacatccacttttctagaacccttgttgctgatgttggctgcccagaggtggcacttttcagccaggaag

SEQ ID NO: 1885522 - DNA, 4001 bp, Homo sapiens
ttaagtacagctacatttttttttttctttttcagacagggtctcactctgtcacccaggctagagtcccgtggtgtaatcataattcactgtggcctcaacctcctaggcccaagccatcctcccacctcagcctcctgagtagctggggctacaggcatgggccaccatgcccggaaaatttatttattttttatttttagtagaaacaaggtctggctatgatgcccaggctgtcttgaactcccggcctcaaacgatcctgtcacctcggcctcccaaagtgctggagtaccgctaatttaaaaggcagtcattgaaacatatttcttgttctcttttgcatcatggagttatgactttaaatcataagtacagtatccttagaaactgcccagttttatcagaaataagttctgaatgtattgtcaattgtgaaaagacaaaagatcacagttcctaatattcagttctaatggcatggttccccaaaatgtaaaagctgtgactgagacaattatttcaagagagcttcagctgtaaataaacacaaaactgaattcctttgccatgcaaacaagaggcacactttcaaccagtaacagctggcttcatatattcatctttggatgaaaagagcagggcagttttttttttttttttttttttgagacggagtctcgctctgtcgcccaggctggagtgcagtggcgggatctcggctcactgcaagctccgcctcccgggttcacgccattctcctgcctcagcctcccaagtagctgggactacaggcgcccgccactacgcccggctaattttttgtatttttagtagagacggggtttcaccgttttagccgggatggtctcgatctcctgacctcgtgatccgcccgcctcggcctcccaaagtgctgggattacaggcgtgagccaccgcggagcagggcagttttaaagttgacttctgagagcatcagattttggatagtgtcctttctcaggtcctgtttccttgtctcctcatcccattttaaaagccagacacataaaccccggcactcctttagcgaagggctcagtgagggcgtttttgccacccgtggccaggggtcattgggtcagcaaagtcagaggaaacctagaaaggcagaagcccaggaggttgacgccctgcgggtctaggggccaggtgctgggtgtctctcctttcgtgtgcggttcccagcagcaggtcctggtgggcgcagactgaccggagaggtgtggctcgccccctccccagaccccgaggtggcaatgaaacctccatctcctggcttgattccttgtgctataaaaaatcttccactggccctttgcatctctcgccctccatcccccaaagccactatcgggaggggacaaaaataatttctgaggggccatgggcactaaaaccacagcagacagaggctgtgtctacctgaggaactggagaggtagaattagagggggaggctgggcatcctcggcggcgccccctccatccagcgtgaaacccacgaggcgcggcgtctcgagtggcgggcgggcagggggctgcaggattcacgaagccacctccgccggggaccgccttctctcggagtggcctcccctccggcgttccgctttagtaagacgacactcaggccaaacagccgcccccggccagcccgactcggctctggagggagcgccccgagggagtccagccggaggcggagaaggccactcggccagaaggtggggagccgccggcgtcccctcgcacctccgtctccacagcagggggaaaggccctgatcgccgtggtccacaccaccgcgtccacctgaggctcgcctcgcttcctgggtccctagaggggtggcgtactccgctttctcctgcccccaagtggccgcacccctccgcgggacgcttggttgggtccagggcggggcgggcgggcgctccccgtactgccgcgagctcagcgcgcagctcccgcggctcggctgccgccgcggccagttggggcgggtcgggggcggggtctcagggggcggggattcgggggggcgggtcgggtcgggaggcgtgggtggggggcggggcggacgcggagcgcccctctggctggcggggccaaggggctgagaggagtggggcaggctcggcgccggtaggaagagtcagaggggtgaccagagagcccaacgcctggtgctcaagactttctccgaggtatgaacaagaaccaggcgtctgggccctttccgctcgccccatcgctcagccgccgcgccccggacgcccgctgtgccccctgccggcggggcggcggcgggactgggtttcgggagggtttctggaagtcgcgagtcccagcgaaggcagtgcaccgctctccgcctctttcttcgccttcttctcgctcccttagctctgggtgtcgggcaccggtggtaaggtcgcttctccgtgagtcggaggtcgctcactctgggacgggcggacgaggccctagggcagccgagcccggcagcgggggaggcgtggagctcggggcggcttcagcggcgggggcgggaggctggtcctggctgcagactgcgcgcctgggctccgtgcgcggtccctggttctctgcatcgcggaggtccccggatcacagggctccctggcgggccccggcacccaggtctgtgtcgctgtggctgggcgccgggactagcacccgagtcccgcgctcccgggggctgcgccgtgccgcctgttgtgcgcgcgcagaggccggacagcccggctgcgggaagggacccgagcgcagggtctgccccgcgtcccggaaagtgcctagtctgcggagccggaggttgagctggggcagatcggcgccagacgggggcctgggtgagatacgagttgggggtgcggcctgcagaatttgggtttctggaggagcttacggcgcgctggcggagccccaggcgaacaggagcaccggattcggctccgggagggccaggcactgtcaggtatggacagctgcggtccacccgtgtaagtgtaaagtctacagagattaaaacaacacctcgagtcctgggacagcataacctaatggtgcgggcgttttcttaaaggcacgaatagatgggaaaatgtcaaaataagcatattttaaagttgaaagctggcagattttcaggccgtgtagttgtgtagctagtgtccaaagaaatattagctcgttttcccccttaacaccttttcatttttatttttttacgcaaaatctgttttgccagtatttccctcaggagctgtgcattgctcacagcagggaaggaaaacttcagcaagcgttctcaggttgcttctgacttccagcctgtgctctccagcatttctgaatgtggagaaaaagtatctcttgctggattttccgagtatgattcccttctgttcttctctgggaccgggcaatgtttgtttatgggttttataagcatctatttaaatttagtttttgcacgaaatactccctcttgccacagggtgtagtttggggtttagaaaatgctgttggagaaagctgctagtggcttcattttccaagaatgtaagtcatttcctttctgtgatttcagggagttgatatttcacagcatcaaaactttgtggggaaaattttccgtaatacatctgtcattaaaaaggcttgtgacttttgggtttccttcttagagcagtgcatgaatttaggttcagcagtgttaaaggatgagaaatttttttttagaatttagagcattatgagactattgtagaaattttaactaccaggacctacaggatggagagtgggggaggggagaagaccagaagagaggcaggaaaacagatgcctttgctgatgtcctttgtagtataaaacttaacagcaccacagcacctaatcattttctcaggtgtggctttgagaaataa

SEQ ID NO: 1885523 - DNA, 4001 bp, Homo sapiens
gatgcagacggctgccccccaaccatccatttttgctgttaatatgaatatggaatttgaagaaaagggcaagaagccattttatgctattccctgatttctccccagtggaaaattccctattttgaattgctttcaactgtcttttgtgttttcattgacaatgaaattatttaaaaagaatgagagaaaaacagctttgctccagagaggagaaaaaattaaagaaaactaatttctccccctagcccccaaaaaaccaaaccagaaattaacattataatctataatcacagacacagaaagtggtcccaagagccaaacctcctccattcccttcctgcagaagcaccccaagtgtgattgagaataaatgaagggagttgtcagggtatggggtgaatatcagtctgactgcttattgttgcatgtcattgcctttcttctttctaaaataattttaacttttagtttagattcatggggtacatgtacaagtttgttaagtaggcatattgtgtgatgctaaggtttgagatatgaatgatcccatcacccaggtagtgagcacagtacccaataggtagtttttcagcccttgtctccttccctctctccccattcttgtggcctccagggtctactgccgccatctttatgtccatgagtacccagtgtttagctcccacttatcagtgagaacatgtggtatttggttttctatctctgggttacttcacttaggttgcatccatgtttctcaaataacattatttcattattcttatggctgtgtagtattccatggtgtatatataacacattttctttatccaatccactgctgatgggcacctaggttaattctgtctttgctattgtgaatagtgctgcactgaacatacaagtgcatgtgtctttttggtaaaatgatttattttcttttggataaatacccagtaatggtattacagggtcaaatgtagctctgttttaagttctttaagaaatctccaaactgctttccacggtggctggactaatttacattcccaccagcagtgtataagcattcacttttctcagcagccttgccagtatctgtctttttttttttttttttttttttttttagtaatagccattctgactggtgtgaggtggtatttcattgtggttttgctttgcatttctctgattattatgatgttgagcattttttctatgtttgttggctgcttatatgtcatctgatcttcaacaaagttgacaaaaataagcaatgggaaaaggacttcttattcaataaatggtgctgggatagctagctatccatatgcagaagaatgaaactgatcccctccctttcaccatatacaaaaattaactcaagatggattaaagatttaaacataaggccacaaagtataagaattccagaagaaaacttaggagacaccattctgggcattgaccttgggaaagaatttatgactaagttctcaaaagcaattgcaacaaaaacaaaaattggcaaataggacctaattaaactgaagaacttctgcacaacaaaagaaacaatcaacagagtaaacagacaacctatgaaatgggagaaaatatttgcaagctatatatccagcaaaggtctaatatctagaattcatgagaaacctaaacaattgaacaagcaaaaagcaattaacctcattaaaaagtgggcaaaagacacaaacagacttctcattgcctttctaaggcaggcacaggtttccttagttctggctcttttttcttcaagctttgtagccaggttctgaatgaataccaccccccaggtaaaattccttgttaaatgctgaaacacatacctttgagaacctctcacttctctgtaaatggttctttttgcatctagtgtggcctctgagtgtacccatggaggctcctgggtcctcagagtctggacggggagccaggagtcctggcctctatttcagctcccgacggccaacctgggcttcaaccacagcacagactcctgactactcccacccaaaaagagttgttggaagacttgaaatcacagatctgagaactcctgcactttgtaaattcaagatgacattgttactgttctaatttttttaaaattacagcactctcactttttctccaaaaaaggtataaacaagaagatagtttgacttgtttacctaaagctctcctttgagttgccaagaggagttagttacttgaacacagacacagaaatacggtcgatagcaaaataagatatgctgagctcaggagcttaatttttttcccttcattgagtaacatttcagaaaagcaccagtaattggaacataatttatttatcaacaggaattcagaatactcccttgcagttgattttggaaatccatgtgaccctagcagagtgctataaccaaggtgagaaaggctagaaacagacgtagaattacaattaccaaagggagaagagttcactgtgaatatttaacacacactggcatttggccactaaactctgggtcttccttcaaagttcctgacatacccatttataaaggaggttaataatccctttgtacctacacccccacagttacagctaaataacaattttcatgataagcctttatttttctgcaacttagaatttaaggcagcaatttcatctacaatgtttaagcccagaatttatttttggccttttcaaaagaaagttgtacccatttaacttcgcctggcaatataagagaaaaatgtttttaaaagtacagattttaattaactaggcaatttgcctttctctgaacaatcaaaccctggccattgccaaaggcaggaagccagactaagcagaaccatggttagatacagggaggcaatgtcaagggcttgcagcaagcagcagttgcccatagcctgggttagtaatatgcatattattttaatatcctattagcacttggctttgaaatgaaaattgggtgactaaagacaaagatttttgggcagcaatttttagaacatagaggtaagatgtgtttttcaccacttgctttaagaagcaccctgatgcccagatgttgacctttaagctacctctcctagctctggggtttcctggcatttcatgggcagacctgtcccccagcatccactatgctttgggtagagctgagctccagcttttgaagcctctggtcagggttggatgaatggcaagcaaacactgccacaagagaaaacctgctggctggcagcccctgggtcaaagcttgttttagtttcccgagaccacctttctatgagacctcagagaagggttttactgccccaggggtgtaggatgtgatttttaggaaaaaagactcttgcaatttcaagtctgggtaacttatctttctttgcctacctggtgagaggatacctttgcaggaaatgctgtcacatcaaccctccattgccctatttctctttgcctgtccaagggttaccttggaattagtggtgaaacttccaggttcagtcatatgctaaaggactcatgaatgcattttgtttggagctttacaaatctctagaaatttagtaaatggctcaagaactccctctaagctcaagttgtttaaattttatttttctttttatcatttatgcacaagtaaaaccatgaagtagtgacttcaactggataaaaggcttaagaccctgaggatattgtgaagccattatccatgagaggaagaaggcaaggtcctatgtctaccaacatgcagacaaatgtccctgactgcctaggcttggtaacattgagcaattatttttgtccttatcataatttagtcatttaatttctttatcattttcttggcagttaatagcctctgatttgaatttttattttttcttgtaccacagttgttctgcctccctgattagattgtaagcaccagtagataagt

SEQ ID NO: 1885524 - DNA, 4001 bp, Homo sapiens; identical to SEQ ID NO: 1241339

SEQ ID NO: 1885525 - DNA, 4001 bp, Homo sapiens
ggcagcaaaaagaaaatccatgtcttggaactacctttgtacgtgtcttatagcctattcatctctaactccctgcattttttacacactaaacctgtgaaatcacaattacaaatgcttgaattcccaccttttcaatactactgtagtatttacaaatcaagtaattaagattttctatacacataccagatttcacaaggacagcaaggtacagggccttattatttggcatagggttttaagatgtttttacagttattttaaagagcagagactacaactccattatttctcatatatctgatatactgtagtgcttaaataataatttctctcctaaaatactttctatatgatgcacctatttaaagaattagtcataaaacatagaatgtaaatttaatcaagaaaataaacatgcacctaaccgccggaataacaagaaaaaaaaaatctataatgaaacctgcctacagttttcatagaggcaagccagttaagtcagttacttgagatgcgtttaactctaaactgacacaaaacttgtgttgaatttgttccgcaaaaccttgaaatttggggttatgtactacagaatttggcttttctgggtccaccttcctgagtgggtttaaataaactgtgaataattaaaacataggaaggaaaaaaacaccacctgtccgtgcctttaaccaaggcctcaatctatatattatatggcaaaatgctaaaataaaagctcatccgggacaaaccctaagcatgacactgccacttaagaaatacactgcgtctctgaagattgcaatccccactgtgaagaaagaacaggtgctgcacccgacaacccactcaatcctgcaggacaaacctcctagaactgataaatatggactcatttaaccttcccaaataagttgatactcaaaagccgccagctcgtcatttgcacatcaaaagggagtacagctgcactcaagcctttaactgccctgcatcagtccctcgcggatctttgtgagggtccactccctgctttctagcccgagcagcactcagaaagagcccataacgcacgggcatcttcctccccacaaaccgcgactccagggaccgagctgctgacgaagggaaggtaggtgtggaggggaaacgacggacacctcccacccccgcccccaacccttctccttccctaggctttggcccctgccctaggcaaggatgcgcgacgccgagggcagcagcggcgcagctccgcgtcccggctggagaggcgggcgcccctcaccctctgcccgcgcccccggggctgcgccaaggcatccgccagagcgtcccgggggctccctccccacttttccgagagccgctggttaaccggcagcagttgcagcaacaggcccgggtgaacgagcagggacagccgcggagcctcctcagatcccgcgcgcagcccagcccaagaccccgaggcgcgcggggcccggctcccaaaacgcccccttaccccaggcgggagcagaggcggtctccgccgctccccgtcgcagctgccaaagccacagccctcagccgcagctgccccacgatgggggagtgggaagggtggctgagtggaggatgctactcccgaccgaacggagaggaagaaacggaaacaggaaccgccgccgccgcttaacggagccttcggcgccactgactgaggcagagcgcgaggcggcgcgagccgggcagtcgctgacagcgcgagaccgagagcgagctgggtccagggcgcgcgaccctgagcagtgccggccccattccgcggggagacgaagggacgggtcggctggggccaggcggcgggggtgggatggggagggggcctggagaggagggaaccggctgctcgggtcggccggagataacgcgcgcacgcgccggagcggctctgacaacgagcgcaggcggggaagcctcggccagcgccggcgtgcgcgcgcgaatgggggagcgcgcccctcggcgttcctggcttctgggagagggcgcgcatgcgccggccgctgccacctacggcgaccctggcatgtgccagggattctccccgcccccttcctcgctgcgccggtggagagcgtagcagcagcatccaccgcctagcagagccgcgggccacagcgggacggcacagttccagcagggcagcggctgcgcacgccggctccggctcgcacacaggcgtaggccgccctctaccgcctgaaggccggaggctgagcggggcgcgagcggatcctggatcccgggaggagactcgcctccagagaatgctgtgctccctacagcgccgggaatggaccggcccgtgccagctcagtcggcggccctagggggcacccgcactagaggttttgaagctggctccttgctacttttaggggtgcgcgctgctgctgctcagcccctgcagcccgcatttggccgcttgactgctgcttccagcgcgatcctacaatggcatcgctcccccaggagactcagcgaagccctactttatcttgtaagagctgtttccacattcactcgaagagaaagaccccccccacgagggcctgagttcgatgcccggcctctcccgacccgcggctgcgacagcccctctgaggcggaagtttatttagtacgggaaagagaacagcacggggagaggggagaggctttgccctaggatgcgtcctacccgctcggactcggaaaattcccggcgcccgcgatgcagagcagtggaccgaagggctgccccagagcagcccagaccgccagctgagcgggaggaccggagcgcgccgccccagcacacaaagtagtcgcgggacgaggggtgccgccgaggccaatcagagctgcgcgccgcgtgagtggagtgcgagccggccaatcagagggccggaagatgagcttcccgttccaaactcttccctgtagccttgggacccagatcccaagcctggggcgctttacggtgggagagcgaaatggtgcccttaagacaagaatcatttctctaggcttgggcattttaaagtacataccggggatacttatcccaaagcaagtagcggcggccttttagatgttaaatattaaaagatcacagaaaggagatttaagaggcagtggcctgtcaaggttgcaatctgcctaatattcataaattcacatatttattgagaccttcttatgtaccaggaactctatcacagatacacaaataaggtactgctgattcaaaagaaaatcccttgtcctcaagcagctcaggttgtgagggaggctttcctagaccttgagactcgtatttattgtcagctctttaaacaaaaagcactctatgaagtgctgtactttacagtcgtttttatgattatctccctgtgagaaaagaaaattgaaaggaaagtagagtgacttgtccaagatcacacagaagatgtactagcagagccagaattatgttctagctcagtttgggtgtcatcattcaataaaataattcaataacaatttgtaaatgcatggatgctctctcccatgagatttctgtactaaacgtataagcaggacaaaattctggtataaaagtgacacactttggttgttggaaatgaacacaaattttagacttatgtgggattaaaggtaaaaatcttaccagtcatactttagataatttttagaagtcagaggtggggtggatatttacttcttagtttaaacacagcattttaaaaatattttaacaagcaagcgtaactttttttttttaagatagaagaagcaggaaggatcacttaagcccaagagttccaggctgcagtgccacatcgtgcctgtcagtagccacttcagcctgggcaacatagcaagaccctcatgtctaaaattaaaaataaaatttaaaaaaaagaactacttctagttggttaataatcatgatagtttac

SEQ ID NO: 1885526 - DNA, 4001 bp, Homo sapiens
taagtgctttaattcctaggattttggaagtaaaaatggaacaccagacaaaaatggaatttttaggcaaatgtaaagctttgtacttgggtatctcaaagtattatacagtgtaaactatcatgattattaaccaactagaagtagttcttttttttaaattttatttttaattttagacatgagggtcttgctatgttgcccaggctgaagtggctactgacaggcacgatgtggcactgcagcctggaactcttgggcttaagtgatccttcctgcttcttctatcttaaaaaaaaaaagttacgcttgcttgttaaaatatttttaaaatgctgtgtttaaactaagaagtaaatatccaccccacctctgacttctaaaaattatctaaagtatgactggtaagatttttacctttaatcccacataagtctaaaatttgtgttcatttccaacaaccaaagtgtgtcacttttataccagaattttgtcctgcttatacgtttagtacagaaatctcatgggagagagcatccatgcatttacaaattgttattgaattattttattgaatgatgacacccaaactgagctagaacataattctggctctgctagtacatcttctgtgtgatcttggacaagtcactctactttcctttcaattttcttttctcacagggagataatcataaaaacgactgtaaagtacagcacttcatagagtgctttttgtttaaagagctgacaataaatacgagtctcaaggtctaggaaagcctccctcacaacctgagctgcttgaggacaagggattttcttttgaatcagcagtaccttatttgtgtatctgtgatagagttcctggtacataagaaggtctcaataaatatgtgaatttatgaatattaggcagattgcaaccttgacaggccactgcctcttaaatctcctttctgtgatcttttaatatttaacatctaaaaggccgccgctacttgctttgggataagtatccccggtatgtactttaaaatgcccaagcctagagaaatgattcttgtcttaagggcaccatttcgctctcccaccgtaaagcgccccaggcttgggatctgggtcccaaggctacagggaagagtttggaacgggaagctcatcttccggccctctgattggccggctcgcactccactcacgcggcgcgcagctctgattggcctcggcggcacccctcgtcccgcgactactttgtgtgctggggcggcgcgctccggtcctcccgctcagctggcggtctgggctgctctggggcagcccttcggtccactgctctgcatcgcgggcgccgggaattttccgagtccgagcgggtaggacgcatcctagggcaaagcctctcccctctccccgtgctgttctctttcccgtactaaataaacttccgcctcagaggggctgtcgcagccgcgggtcgggagaggccgggcatcgaactcaggccctcgtggggggggtctttctcttcgagtgaatgtggaaacagctcttacaagataaagtagggcttcgctgagtctcctgggggagcgatgccattgtaggatcgcgctggaagcagcagtcaagcggccaaatgcgggctgcaggggctgagcagcagcagcgcgcacccctaaaagtagcaaggagccagcttcaaaacctctagtgcgggtgccccctagggccgccgactgagctggcacgggccggtccattcccggcgctgtagggagcacagcattctctggaggcgagtctcctcccgggatccaggatccgctcgcgccccgctcagcctccggccttcaggcggtagagggcggcctacgcctgtgtgcgagccggagccggcgtgcgcagccgctgccctgctggaactgtgccgtcccgctgtggcccgcggctctgctaggcggtggatgctgctgctacgctctccaccggcgcagcgaggaagggggcggggagaatccctggcacatgccagggtcgccgtaggtggcagcggccggcgcatgcgcgccctctcccagaagccaggaacgccgaggggcgcgctcccccattcgcgcgcgcacgccggcgctggccgaggcttccccgcctgcgctcgttgtcagagccgctccggcgcgtgcgcgcgttatctccggccgacccgagcagccggttccctcctctccaggccccctccccatcccacccccgccgcctggccccagccgacccgtcccttcgtctccccgcggaatggggccggcactgctcagggtcgcgcgccctggacccagctcgctctcggtctcgcgctgtcagcgactgcccggctcgcgccgcctcgcgctctgcctcagtcagtggcgccgaaggctccgttaagcggcggcggcggttcctgtttccgtttcttcctctccgttcggtcgggagtagcatcctccactcagccacccttcccactcccccatcgtggggcagctgcggctgagggctgtggctttggcagctgcgacggggagcggcggagaccgcctctgctcccgcctggggtaagggggcgttttgggagccgggccccgcgcgcctcggggtcttgggctgggctgcgcgcgggatctgaggaggctccgcggctgtccctgctcgttcacccgggcctgttgctgcaactgctgccggttaaccagcggctctcggaaaagtggggagggagcccccgggacgctctggcggatgccttggcgcagccccgggggcgcgggcagagggtgaggggcgcccgcctctccagccgggacgcggagctgcgccgctgctgccctcggcgtcgcgcatccttgcctagggcaggggccaaagcctagggaaggagaagggttgggggcgggggtgggaggtgtccgtcgtttcccctccacacctaccttcccttcgtcagcagctcggtccctggagtcgcggtttgtggggaggaagatgcccgtgcgttatgggctctttctgagtgctgctcgggctagaaagcagggagtggaccctcacaaagatccgcgagggactgatgcagggcagttaaaggcttgagtgcagctgtactcccttttgatgtgcaaatgacgagctggcggcttttgagtatcaacttatttgggaaggttaaatgagtccatatttatcagttctaggaggtttgtcctgcaggattgagtgggttgtcgggtgcagcacctgttctttcttcacagtggggattgcaatcttcagagacgcagtgtatttcttaagtggcagtgtcatgcttagggtttgtcccggatgagcttttattttagcattttgccatataatatatagattgaggccttggttaaaggcacggacaggtggtgtttttttccttcctatgttttaattattcacagtttatttaaacccactcaggaaggtggacccagaaaagccaaattctgtagtacataaccccaaatttcaaggttttgcggaacaaattcaacacaagttttgtgtcagtttagagttaaacgcatctcaagtaactgacttaactggcttgcctctatgaaaactgtaggcaggtttcattatagattttttttttcttgttattccggcggttaggtgcatgtttattttcttgattaaatttacattctatgttttatgactaattctttaaataggtgcatcatatagaaagtattttaggagagaaattattatttaagcactacagtatatcagatatatgagaaataatggagttgtagtctctgctctttaaaataactgtaaaaacatcttaaaaccctatgccaaataataaggccctgtaccttgctgtccttgtgaaatctggtatgtgtatagaaaatcttaattacttgatttgtaaatactacagtagtattgaaaaggtgggaattcaagcattt

SEQ ID NO: 1885527 - DNA, 4001 bp, Homo sapiens; identical to SEQ ID NO: 1241348

SEQ ID NO: 1885528 - DNA, 4001 bp, Homo sapiens; identical to SEQ ID NO: 1241354

SEQ ID NO: 1885529 - DNA, 4001 bp, Homo sapiens; identical to SEQ ID NO: 1241360

SEQ ID NO: 1885530 - DNA, 4001 bp, Homo sapiens; identical to SEQ ID NO: 1241364

SEQ ID NO: 1885531 - DNA, 4001 bp, Homo sapiens
accatccataatactgtggtatagacacttttatatccattttataaataagtaaactgagttatggagagattaaacgacttgccagtaagattcaaagcctgtgtacaagctcacgcttgattctggagccagtgttcttaacacagtatcttgagaatgttaaactaaaaagtttttaatttacagtattctttccacaattaaaaaagaaattatgagtaattatttttagttctttcttctcttcaggcatttcccatggttcttttcaagacataatacatatcatttagtgttgtagatctgaaaaaacaaaagtagcgtgaagatcaaaaattttctaaagagacggagtctcgctacgttccctaggctggaacacccaggcttctccagcctcacacctctgagtagctggaaccaccctgtccgctaaggtcaatgtttaatcgtatctttgtaggtctactgaccagttaaaaagaggtgctgtatacattggttgttgtcttgtcagagtttgatgcttctatatagaccattgtttttacatgctaatacaattgaaagccactacagatatttatatttacaacccaaagctaggttttaacaagaaactcataaggcaaaggtgagaagtaaaataatttagcgccaagtggagatatatgtgcaatgctactttgttgggctcaaaacatatttttcttttagaagactgacaggcttgaagtttatgcctccaaagacaaaagtgattatgttttgtttagtagcttgcaaagttgccaaaggccattttttctactctttccctgaaattggtttatatgcttattaaagtcatttatacctatttgcaaatgcttaacatagtttcagattttaagatttccctgcaactttatttcccttgaagtttacagcaacaggagttcatttttatttttaattgcatttattcagtaagtaaactccgccacagaaaaacttagtagacaaggtgagttcccctgtgctccgtggcaaagagtgcggtgggtgacattgacccatggttaggtaatctggtaaggaaagaccccgttgtaacacatctgagcaacgagaccaaaggaagggcttgctgccacgaggcgaagtctgcttttttgaacagagagcccagcagagttgggcggcaatcgtgcccagcactgaggccgaggagaaagagagcaggagcattacattactgcaccaagagtaggaaaatatgatgcatgtttgggaccaggcaaccgaaatcccttctcagcagcgcctcccaaagccgggcaccgccttccttcggagaaggcgcagagtccccagactcgggctgagccgcacccccatctcctttctctttcctccgccgctaaacacagacgagcacgtgagcgtcgcagcccgtcccagctgtgcctcagctgaccgcctcctgattggctgagagcggcgtgggctggggtggggacttgccgcctgcgtcgctcgccattggatctcgaggaacccgcctccacctcaggtgaggcgggcttgcgggagcgcgcgccggcctgggcaggcgagcgggcgcgctcccgccccctctcccctccccgcgcgcccgagcgcgcctccgcccttgcccgccccctgacgctgcctcagctcctcagtgcacagtgctgcctcgtctgaggggacaggaggatcaccctcttcgtcgcttcggccagtgtgtcgggctgggccctgacaagccacctgaggagaggctcggagccgggcccggaccccggcgattgccgcccgcttctctctagtctcacgaggggtttcccgcctcgcacccccacctctggacttgcctttccttctcttctccgcgtgtggagggagccagcgcttaggccggagcgagcctgggggccgcccgccgtgaagacatcgcggggaccgattcaccatggagggcgccggcggcgcgaacgacaagaaaaagtaagcccattccctcggcccgccgccttctcccccggcgaccccgcccgcctgcccgccctgggctcctgggccggcctcggcgttaatgggattggggggggcagcctttttgtttctgctgctgctcccctcccctctcttcccccaacctcgccggccgggctcccccgctgtccacgtcgccatcttgtcgtggggggtgggagacgcctcgaaagtgctttcaggggccggggtctgagccctgcttgccctccccgccggccgtgggggcctcgcgccgcccacctacccgcctcaaaaacccagcctgctctgtggccccatccggaggggactttacccagcctgaaaaccccgggaagagaaatgagctgcagctcggtagccgcggtttgcacccggagcttccgctccttcccgcccccatcctctccagttccattgaaaactcggccctggggcggaccctgcacgctggtcctggctttccagtggacttggggccttgagttcccgactgagggactcgcgtggtcggatgcgatcttgtcctgtagttgtccagccgtcgcgggtgtctttgcctttgtgcattagggatttgccgcgatggccttaagatgcgaactttttagtttgcacgtgcaggttttgtttcgttttaatcgccttgaaaaacttgcctagactgagagtcagagtaatgggaatttagggaaatggcaacattttaaagagaacttcagaattggatacttgagttcatatcacctgtcacgagaacgcagatattataaatgaatatatgcctcattcattcttcaaataatgaaaatgtaggggctggttaaatttaggcagttttaatgatactgaaaaaagtatatgatgagtgaatgaaatgcggcactaaaatgttgcaaaaattttcgaactctgtctcattttcctgaaattgaagtatattaaaggaaaaccgtcaacatatatctaaagtaagtaatcactcggttagaacttaatgcaagttttataaatcaccttgaagtttgagtctaaggggtacattagagattaagaattgtgagttggaccagtggtgttaagagcggactcccccatcccccaacacacacacaattttgcccactttggcattttaacttttaaggaaatcacttaaggaattgaagatttagagtaagagttttggttagtagactggctttgctgttaaatccttccactcttctggcagagagattaatttccctaatcagtatcagcagaagataaacttgtttatattcctgctgttttgtagatcccttctcctggtccttcttcaatagaatattaaattcttagtttgtatacagcagagaaggtcacttataaaattcaaaaagtgagcaaacaggtctagattaattccaagagttaccaggaattaattgcagtttattttgcggaggtgattacagtgcttttgatgaaatgataaagctgctatattgtaaacctaaggcagattacctctgtgtagtgccagttttctatccttattatatattgaatcatacttaatacaatgcattaaattatgtaccactttttttatatacagtatcgaactcattgttttgccattcatccgttcagaatatcagaagcagttttgaaacgaattaataaattagctactgttcatcagccccaattctaaataagctcttagattttcctcagcccatctgttactttcaaaattttctcatttgaaaacttggcaaccttggattggatggattcatatttcttagtatagaagttcttgatataactgaaaaattaagttaaacacttaataagtggtggttactcagcacttttagatgctgtttataatagatgaccttttctaactaatttacagttttttgaaagataactgagaggttgagggacggagattttct

SEQ ID NO: 1885532 - DNA, 4001 bp, Homo sapiens
tttcttaatttcattcctttttttggacactggtggctcattacctaaagcagtctatttatattttctacatctaattttagaagcctggctacaatactgcacaaacttggttagttcaattttgatcccctttctacttaatttacattaatgctcttttttagtatgttctttaatgctggatcacagacagctcattttctcagttttttggtatttaaaccattgcattgcagtagcatcattttaaaaaatgcacctttttatttatttatttttggctagggagtttatccctttttcgaattatttttaagaagatgccaatataatttttgtaagaaggcagtaacctttcatcatgatcataggcagttgaaaaatttttacaccttttttttcacattttacataaataataatgctttgccagcagtacgtggtagccacaattgcacaatatattttcttaaaaaataccagcagttactcatggaatatattctgcgtttataaaactagtttttaagaagaaattttttttggcctatgaaattgttaaacctggaacatgacattgttaatcatataataatgattcttaaatgctgtatggtttattatttaaatgggtaaagccatttacataatatagaaagatatgcatatatctagaaggtatgtggcatttatttggataaaattctcaattcagagaaatcatctgatgtttctatagtcactttgccagctcaaaagaaaacaataccctatgtagttgtggaagtttatgctaatattgtgtaactgatattaaacctaaatgttctgcctaccctgttggtataaagatattttgagcagactgtaaacaagaaaaaaaaaatcatgcattcttagcaaaattgcctagtatgttaatttgctcaaaatacaatgtttgattttatgcactttgtcgctattaacatcctttttttcatgtagatttcaataattgagtaattttagaagcattattttaggaatatatagttgtcacagtaaatatcttgttttttctatgtacattgtacaaatttttcattccttttgctctttgtggttggatctaacactaactgtattgttttgttacatcaaataaacatcttctgtggaccaggcccctttgatcagcttttatgttcaaatattaataatatttgcttcaacacctccaactcataaaattgtttaccaacaatttaagcacttatgaaaattacatggtactggttatttctacatttatcttagtgccatcaccttaatgtatgttgagtccctaaatgtcatgttaaataataacaaccataatatcccattgaaaagagtatgttgttagaaaagaaacatcatttttaagtttctgagcctattaaaatgctcaaacacaaaatattagtatttttaaaatatgaatgggatgagtgaagcagttctcagcattatagtcacaatgttacaaaggctagagcttctctgaagatttctaatctgttcccattaacagattaataaatttagacttcaaatgaataatttgcccaagctttaaaagtaatagatggcagaccaaaaatgtaagcttaagtttcctgactctaaagtcaaacttagaacaaatttggtttgtttttgttttaatgatactgcgttttaaaacaaagtagctttatcctttttctcctgtatttttcttttacaaaatagctgtatttcttttatactgataatctcatttttaaaaatcagacagtgtagaaagatattttttaaaacagaaaaatcactatgaatccctgcacctacaggtacagaaaattatttttatgaacaaattatgtaggaagtgccagagccttaggtcctttaccctgaggtatatatactgaacaaaaggaactgagccacagatctcttaggtagctctttttatcttacaatggaggacagtgattacaattatatgaaaattttggaacaaaagttaatactaagattcagtgcaaaatttggggggggggggggcacaggtatacttaagcacaaacactgtgacccaaagtgcttcaacatttagttacagatagtagtatactagaagtggtattttagaataaagtggttgcttagtattcacaggtcacaaaacaaaaaattattcttgtatagcaaattagcttcagttgaaaactatttgtaaaagcagattatgtaatgaccaggagttcaggaaaatgacttctgaaagcattgagaagggaaagccacgttaaaggacagtacagctggaaggaagcaagtacttacccactgctcagtcactaagacaacaagctccttggagtgctttaagctacggaatagcagaactggcccttcccaattttatgcaccgtcacaaatttcttcataatggttttgtccaaggcttataacccaaccctggcaactataatccttactttatgaaacagctgtatttcttttatactcataacccagaaaaatgagaatgtatgttctgagtataaaagaaatgtagctattccataaaaatacaggagaaaaagaataaagctattttaatttttttaatgcagtatcattaaaaaacaaaccaagtttgttctaagtttgactttagagtcaggagacttaagcttacatttctggtctgccatctattacttttagagcttgggtaaatcttcatttgagatctaaatgctatatatagttcattcatagcagtaccagataagggaggagtatatctatacagtatatagtcttgaagaagtgatctaaggctcggagcttttgaggtggccatgagtgactccaaagtccatggagctaaccaccctgcagtgctagccaatccagttgaacatacccttttctccattgttaactgtttgtttaaatagcaaacagaaggcggcaatggaggtgtggaaaactgaggatccgatgtcacttgaaagtaatgagatcacataacattgagggaatgtcctaagaggagtggcagggcataaatagaaatgaataaaagtgttttcaagtgccatttagtgggttctgaatttgaactagagattgagatatccagttatggagacattaactcaaattaacaaggtagtgaatgggaaagcacaaactataaaagactgtatcaatgtatggtattttttcccagagctgttttgacttaatggcataatagatatgtttaagtttttataacctcacgattatcattccaaatcttattttcctcctagaagcctctgtacagaaaagatgaacttaaaattactcgctttgtagaaacttaatctaaaagttcaaaatgtttaagtagcaatacctaaaacaagttgcagagtaaagaatcctctttttttctttttttcaacattaagatttggttaaataaaacctttgcaaacgtgttgccagctggaaccaacaaaaatgtaaagaaaaaaacttttacttttttttttttaagttttccactaaccactttgctcacatttcgttcctttaaatagagatgaacctgtcgtcccagattattttacagagaaatagtgaaattagtggaattcgatacaaaaatagtctccctgtaggataaaagttatactttaccataaaccttcctatgaacgccttctggagctttgatgtgttcacacctttcagaggtttggacataatttttattcttacctgtagtggatagtttttccaagacgctgcccagacacccgatctccgtgtactattgaatttcgtttattcccttgtcttggctccattctgggacggagaggaaagacaggtgcctgagagcggcagcggtcagagccccgcggggagaataccaagcatgcggaaggtacccggcacccttctgttcctggtgtggctggcgc

SEQ ID NO: 1885533 - DNA, 4001 bp, Homo sapiens; identical to SEQ ID NO: 1241390

SEQ ID NO: 1885534 - DNA, 4001 bp, Homo sapiens
tttttcaatcattttataagttggaggaatctttaaaagtagaaaagcaaaaaaggtgtaaaatgaacaactgacaaataagaaaatcatgatactttaccaagatgttgtactagctaattattaagcaacttaggtaatatctcaaaggcttttagaaaatgtgtgtaaaaaattattttaattccttataatgtttcttttttctttctttctttttttttttttgtttttttgtttgtttgtttgtttgagacagagtctcactctgtcacccaggctggagtgcagtggcgtgatctctgctcactgcaacctcctcctctcgggttcaagtgatccttgtgcctcagcctcctgagtagcaggaattacgggcacctaccaccacatcaggctaatttttgtatttttagtagagaaagcgtttcaccatgttggccaggctgatctcgaactcctgacctcaggtgatccgcccgcctcggctcccaaagtgctgggattacaggcatgagccaccgcacctggcctaaatgcttattatttatttttatttttatttttattttttgagacggaggctcgctctgttgcccaggctggagtgcagtggtgcaatctcggctcactgcaacctccacctcctgagttcaagcgattctcctgcctcagcctcccaagtagctgggattacaggcactcaccaccacgcccagctcttttttatttttatatttttttaagtagagatggggttttaccatttggccaggctggtcttgaactcctgacctcgagtgatccacctgcctcggccttccaaagtggtggggttacaggtgggagacaccacacacccaaacacttactatatttctacttaacggcttcaagtcttaaacagattccaggactagcaacattttgaaaactcactgttccactgcagttttgctcttaagtaaaatttgaaaaatttgcttttaaatatgggagatactgagcataatatttaatttttttttctgagacagagtctcactctgtcacccaggctggagtgcagtggcatgatcccagctcactgcaacctctgcctgccaggtccaagtgattctcctgccttggccccccaaatagttgggattacaggcatgcaccaccatgcctggctaattttgtatttttagtagagatggggtttcaccatgttagccaggctggtctcgaactcccgacctcaggctatctgcctgcctcagcctcccaaagtactgggattacaggcatgagcaaccccgcccagccaaaatttaattttcaagtggccagtagttactccaatgaagccaaaaataattagtatcattttccagcccaagttgcagaatgactgaacatagaaggcatctcagaaaaaaaaattttttttaatcactggacactttattgaaagcaaagcaagatttagcatctttgccttcgttgtacacagctgaagcggaagcccagggagatgaggactgcatggttttccttggcgtgggaggtgtgcacccttcagtcctctcatttgtgggaagatcagcccatgctctgttggctgccatagtccctaggatggatgcccttccagtcatcccactcccgaactctgtagagtgtttgttcatcatcctcttcctccttttcttcttgaccttcctgttgctgagctgcttttctgaattcctctggtgttgccttggctattccctgatctggtaatgctccatatttccaatgttgcttataccagtcactcaccgtcatagttgccagacttggataaccagctccaaatactttgacttgggccatgttccgagtgagaatgaagggtttcactggaggcctctcctggcgagatgaattagaagttgatgcctctcttgaagagtctctttctctcaggatctttatttcctggtcaatgctctcaatctcttctaagctgatatcagttcacctctgaaggtgaagaagataatattcacgaacacgctcatcatctgcttgaccagtttccacagcagatttgattgcagacaacctgtgctccaactccttctgcttgtgtctctctcttttagcctgtctttgagatgccatagcaatgaggctaggataagccatggagaaattagcagtgtgatttttcagctgagttcttggttttcggcagctcaagctctgccacctgatagcaatggcacagttaattagtttatagtgctcttgagcccactgcaaatgatctagacgcttgctgggcttgacttgtttcatggtgaaggctccttgaaacactggcaccaacaggtacttcaggtcggtggaagcaatcacttccaaatcttcattttagctgaacaagtcaagctgcgataacatttcggcagccttctcaaggaggtccaggcccttgaacaccttcttctggactatccgggaaccggcaggttcagtcactacttctacatcatccagaagctgtttgctggtttcaaacagctcggggagctgtggcagcagtaatttgtcttcagcagccatcttggagagggacaaacaagaaattatttttaaaggaaaactttcaaagtgaaaagagaaatatatcttctcctgggagtactaaaagaaaacctcacctcagatgagttatctcacaatttccgaacaaaaataatcacctttgggccaagaagaggtgtggaaagtttcaaacacagtttttataaagggggtacaactgaaaaggggttttaacacaaccacctctctcgcaggcttattagatcctgatcacctaagagtttcttgtcagcactcctgtcaaatggatgaaatgcgcccggaaggctacctctgacaaaagggaaggcacagcagaaatgttactgtgtaagggtgccagtgggtacagatgtggttatcatcttccactaatcatctaagaacaaagcatcttttgctcctttggggggctaaatgggatggttactaagtgggaaggatgtgctttcctaatacagcagcataataattgttctaaaagattttaaccctggctgggcacagtggctcacgcctgtaatcccagcactttgggaggctgaggcgggcggatcatgaggtcaagagattgagaccatcctggccaacacgatgaaaccccatctctactaaaaatacaaaaaaattagccgggcgtggtggtgggcgcctgtagtcccagccactcaggaggctgaggcaggagaatcgcttgaacccgggaggcgaaggttgcagtgagccgagattgtgctgcactccagcctgggcaacagagtgagactctgtctcaaagaaaaaaaagggcagggggtgtcaggcatggtggctcacgtctgtaatcccagcactttgggaggccgaggcaggcggatcaagagatcaagaccatcctggccaacatggtgaaacctcatctctactaaaaatacaaaaattagctgggtgtggtggtgcgcacttataatcccagctactagggtagctgaggcaggagaatcacttgaacctgggaggcagaggctgcagtgagcttagattgcaccactgcactccagcctggcgacagagcaagacttcatctcaaaaaaaaaaaaaaaaaagtataaaaacctcaacaattataatttatctgatcttattatgtaaaggggctcttgagaacagcaagtttatctcaatatggtatattcagaatagtcaaatatagttttttgtttgtttttgagacacagtctcactgttgcccaggctatagtgtggtggtgcattcctcagcctcctgagtagctagggcttcagacacgtgcccccatgcccagctgatttttcaattttatatagagatgaggtctccctgtgttgccaaggctggtctcaaatttctgggctcaagggat

SEQ ID NO: 1885535 - DNA, 4001 bp, Homo sapiens; identical to SEQ ID NO: 1241395

SEQ ID NO: 1885536 - DNA, 4001 bp, Homo sapiens
agcatggccagggccacacacagcagctggggaagggggtcctttggctgccaatggcttggaaaggctacagccccaggcttgagggggctagtgagagaccaggctggagagagtagcggtgccaggtgagttgttcatggggtgctgtgtcgggggcatggaggggcttctgcaggcgaaagctgggtgctccaacctgaggctatgggggaagagccatggggaggatacatggagggtgattagacagggctgcactggaaagcagacagcagggttttctgagaggggctgtggctgcagcctagtgaggggtgatgtgctctccaggggctcctgcagtgacagagggcagcaggagacagatggcagggtgtggtacctgggtagatgtgggaggtgagagggggaggatcagtccccagactcctcccttgtttctggccggagtgcctgggcatgggggtgcaggaggagcagccgccagggagggaaagcccatgccagcactggcgctttccgataggtgtgctgagtgcaggcagcggaggcctgtgttggtagctgctctcggaattcagagccagaggggactcacgtggttgcgtggtgtgcatctctggaaggattataggtgctaaattctccatctcagcattaaaaatgtacttgttatttaggttatatttttacatggtaccaacatttttttaaaaggtatgctgaacacagtgtcaaatgatcaatccacagcggggttccctctgccacccatactctccagcgtaccccagctggctgaccccggtgctcttgatggattttatttccaggtcactggggcataggtaggggtggacacctgtgaacatccttccttctgtcgattttctctgccgtgtgctgtggagccaagcgtaaagggctttgggaataacaatcgctgtggggttctgacgtctttggagctgggacagcccatggtagacttgcggtccacccatatcctgggcagtggctttctgaagttcacgtgagcctgactctgacctctccccagaccccatcatctccaaggaggaccgccacgggcttggggggctggctctgcacacagtgtttccatgtggtcatttgaggccagtaatggacacagattgctcttggctgtgcctcacttccctgtggggtccagagacctgggtttgagtttctgagtctgtttcctggctgtggatcttttccttcctctttaaagggatgacagcgcacaggattgaagacacctaagagatgctgaaggaatattaattgatttttactcatctgttgttatgattaatggtggcatttcagtggggaaaatacagctacagatgaaactgggctgttgagaaagatacattgtttcagtgtggagaatatagtattttttttttttttttgcctcccctctgtatcacttttgggtttctaacaattgtggattccagcttactccttccttttttaaaagatagattttatggtttttttaaaaaatttgaaatgcaggtatttttttccccctaaacattgacaattattttcattctccatcatttactatttgcttaggctatgtagataacaaataagacaaagttatgtgaaagcatgatccccatagtgttttttaataatgatgatacatgaggtgctgggaagggttatataaatgaggtctgctcatagcagttctccaatgtggccattaaaaaaaaatcacatttttcacattttggaagacagcgtggggaaatgctcgtgagttgctttgagtactgtcgtcatactctgagtggtttcatttctatccgttttattttggttcctgagctttttaggtttgctgttagaaatagaagctgtcaccgtgttgcagtcttgtgcagcttccgaagcctgtggcactcagttctagggtgattctttctccagcctttgatgcactgagtcaatttgagcaaatcctttaaaaaaaaaaaaaagttcccacatcccatgtcaagacaacagagctctgccagggcaggtggggctccctgtgctccagggtgcctgggtgccttcttgcaggcaggcttccagaaccccaggccctcctcaccacaccacgcagggttgggactggatctccctggtacctgccacccttgcttggctgtcaaatgtcaagaattccgtggcctcagtggagcgtgccaggtaagcattttacgtaaaagcaaagaaaagagatggaatgaagtacacaggggaaataggaagggatggaacgggggttttagaaagggccagaagcaagattctgctcttaaagtagctgactgtcctggcattctggggtgaaggtatccatagcattgctactcagagtgtgatcctagggaatctgggtgcagatggagaaactcggatgcaaacactggattcctcagcagtcggttcccgtttggcctggtgcagggctgagactctgaggaggaggcatcttgacctgagggccctggactgtgctccttgtccagctgggcgcagaaccatcgtagtcaaagccaggaatggagatgcattgcctcaggtcagttccaaagaccaggaagcgtccctgagtatttcagttgagtaaggacctggcatctccctcttcagccccttccctgctctcatatttttattcatgcttttagaactgctaaatgtcaggtgggtgcagtggctcacacctgtaatcccagcactttgggaggccgaggcgggtggatcatgaggtcaggagatcgagaccatcctggctaacacggtgaaaccctgtctctactaaaaatacaaaaaattagctgggcgtggtggcaggtgcctgtagtcccagctactcaggaggctgaggcaggagaatggcgcgaacgcgggaggcggagcttgcagtgagccgagatcgcgccactgaactctagcctgtgacagagcaagactccgtctcaaaaaaaaaaaaaaaaagaattgctaaatgtcaccttggcagtgacacctaccctgctttcccagcagacgcctctgccccctacacacacacacacacacacatacacacacacacatgcacgcgcacacacgcacgcacaccaagctgagctgcctgttggtgtgtcctcctgaggctgggacttgctggtctctgaggagcacgtggtctggccctgatgtgcgctgtgtctactgggtgagtgaattaaggactgaggtattgtgctacacaggatgtggccaggcctcgagggtctgtgcttgctaaaaataactctagattattcttttgctcattaagtaatatgtacttgtggaaatcttgggaagtcaagataggctcacaaatgaaaacccagagataattattgaagcaatttttacataaaatatgctcctttttctatatgatgtgcattcaggttaggcttttctgtgtccctagttttgccacttgcatttgggggaacagttgagcatttgcctgtgccatttaaacaccttggaaattgctgttagagtggctgcaccagcttcccaccatccctatgtcccagcatctagaaccatttctctgctccagagtctcaagttctaggttatttctggtttgctgttactaacagtcctgccctgggtgtctctggacctaaatctttggggacctaagtcacatctcaggctgtttcattgggttatggtctagaagtgacttcaggattttgttgctaaagaagaaggggagaatgggggacaggttgggctgcagctagtcagctgtgtccagcacacttgggccctggacttagaactggacaggttacttgccccctctaagcctcagtttattcttctgtaaaatggaaataataatggacccagtctcatagagttccaggagtgaggtcatgcagataaggaacagcaca

SEQ ID NO: 1885537 - DNA, 4001 bp, Homo sapiens
gtgggggcccggggtcgtctgctgtcctgctcagcccacagcacgcatggaggatctgaggtgccacacctgacgcccaggccagaacatgcctccctccagggtgacctgccatgtcctgcattgctggagggacaggggcagcctatgaggatctggggccaggagatgaatcctattaacccagaggaaaactaacaggacccaagcaccctccccgttgaagctgacctgcccagaggggcctgggcccaccccacacaccggggcggaatgtgtacaggccccggtctctgtgggtgttccgctaactggggctcccagtgctcaccccacaactaaagcgagccccagcctccagagcccccgaaggagatgccgcccacaagcccagcccccatccaggaggccccagagctcagggcgccggggcagattctgaacagccccgagtcacggtgggtacaactggaacgaccaccgtgagaaaaactgtgtccaaaactctctcctggcccctgctggaggccgcgccagagaggggagcagccgccccgaacctaggtcctgctcagctcacacgacccccagcagccagagcacagtggagtccccactgaaccccactgaatggtgaggacggggaccagggctccagggggtcatggaaggggctggaccccatcctactgctatggtcccagtgctcctggccagaactgaccctaccaccgacaagagtccctcagggaaacgggggtcactggcacctcccagcatcaaccccaggcagcacaggcataaaccccacatccagagccgactccaggagcagagacaccccagtaccctgggggacaccgaccctgatgactccccactggaatccaccccagagtccaccaggaccaaagaccccgccccggtctctgtccctcactcaggacctgctgcggggcgggccatgagaccagactcgggcttagggaacaccactgtggccccaacctcgaccaggccacaggcccttccttcctgccctgcggcagcacagactttggggtctgtgcagagaggaatcacagaggccccaggctgaggtggtgggggtggaagacccccaggaggtggcccacttcccttcctcccagctggaacccaccatgaccttcttaagataggggtgtcatccgaggcaggtcctccatggagctcccttcaggctcctccctggtcctcactaggcctcagtcccggctgtgggaatgcagccaccacaggcacaccaggcagcccagacccagccagcctgcagtgcccaagcccacattctggagcagagcaggctgtgtctgggagagtctgggctccccaccgccccccgcacaccccacccacccctgtccaggccctatgcaggagggtcagagccccccatggggtatggacttagggtctcactcacgcggctcccctcctgggtgaaggggtctcatgcccagatccccacagcagagctggtcaaaggtggaggcagtggccccagggccaccctgacctggaccctcaggctcctctagccctggctgccctgctgtccctgggaggcctggactccaccagaccacaggtccagggcaccgcccataggtgctgcccacactcagttcacaggaagaagataagctccagacccccaagactgggacctgccttcctgccaccgcttgtagctccagacctccgtgcctcccccgaccacttacacacgggccagggagctgttccacaaagatcaaccccaaaccgggaccgcctggcactcgggccgctgccacttccctctccatttgctcccagcacctctgtgctccctccctcctccctccttcaggggaacagcctgtgcagcccctccctgcaccccacaccctggggaggcccaaccctgcctccagccctttctcccccgctgctcttcctgcccatccagacaaccctggggtcccatccctgcagcctacaccctggtctccacccagacccctgtctctccctccagacacccctcccaggccaaccctgcacatgcaggccctccccttttctgctgccagagcctcagtttctaccctctgtgcctaccccctgcctcctcctgcccacaactcgagctcttcctctcctggggcccctgagccatggcactgaccgtgcactcccacccccacactgcccatgccctcaccttcctcctggacactctgaccctgctcccctcttggacccagccctggtatttccaggacaaaggctcacccaagtcttccccatgcaggcccttgccctcactgcccggttacacggcagcctcctgtgcacagaagcagggagctcagcccttccacaggcagaaggcactgaaagaaatcggcctccagcaccctgatgcacgtccgcctgtgtctctcactgcccgcacctgcagggaggctcggcactccctgtaaagacgagggatccaggcagcaacatcatgggagaatgcagggctcccagacagcccagccctctcgcaggcctctcctgggaagagacctgcagccaccactgaacagccacggagcccgctggatagtaactgagtcagtgaccgacctggagggcaggggagcagtgaaccggagcccagaccatagggacagagaccagccgctgacatcccgagcccctcactggcggccccagaacaccgcgtggaaacagaacagacccacattcccacctggaacagggcagacactgctgagcccccagcaccagccctgagaaacaccaggcaacggcatcagagggggctcctgagaaagaaaggaggggaggtctccttcaccagcaagtacttcccttgaccaaaaacagggtccacgcaactcccccaggacaaaggaggagccccctgtacagcactgggctcagagtcctctccaacacaccctgagtttcagacaaaaaccccctggaaatcatagtatcagcaggagaactagccagagacagcaagaggggactcagtgactcccgcggggacaggaggattttgtgggggctcgtgtcactgtgaggatattgtagtagtaccagctgctatgcccacagtgacacagccccattcccaaagccctgctgtaaacgcttccacttctggagctgaggggctggggggagcgtctgggaagtagggcctaggggtggccatcaatgcccaaaacgcaccagactcccccccagacatcaccccactggccagtgagcagagtaaacagaaaatgagaagcagctgggaagcttgcacaggccccaaggaaagagctttggcgggtgtgcaagaggggatgcgggcagagcctgagcagggccttttgctgtttctgctttcctgtgcagatagttccataaactggtgttcaagatcgatggctgggagtgagcccaggaggacagtgtgggaagggcacagggaaggagaagcagccgctatcctacactgtcatctttcaagagtttgccctgtgcccacaatgctgcatcatgggatgcttaacagctgatgtagacacagctaaagagagaatcagtgaaatggatttgcagcacagatctgaataaattctccagaatgtggagccacacagaagcaagcacaaggaaagtgcctgatgcaagggcaaagtacagtgtgtaccttcaggctgggcacagacactctgaaaagccttggcaggaactccctgcaacaaagcagagccctgcaggcaatgccagctccagagccctccctgagagcctcatgggcaaagatgtgcagaacatatgtttgtcatagccccaaactgagaatgaagcaaacagccatctgaaggaaaacaggcaaataaacgatggcaggttcatgaaatgcaaacccagacagccagaaggacaacagtgagggttacagg

SEQ ID NO: 1885538 - DNA, 4001 bp, Homo sapiens; identical to SEQ ID NO: 1241426

SEQ ID NO: 1885539 - DNA, 4001 bp, Homo sapiens
ccagctaagttttgtatttttagtagagctggggtttcaccatgttggccatggtggtctcgaactcccgacctcaggtgatccacccagctcggcctcccaaagtgctgggattacaggtgtcagccactgcgcccggcctctagtaaatctttttgttttgatgtgaataaatagaaagcttataaaaaataaagcattcaaccacttccctttctatagtcaaagttcaaacgccagaaaagccgaaataggtgatacaaagtcatcctttagtataagcagtagtatgttttgagaaaatcctaaactccactcattgtcttacttacaagtgcaccgaaatattattgcctgtaaatgacattgcggttttactggtcaggaaaatgaatgatataaatttttaattctaacctaaaacctgcgttagtactaacctgaggaaataacatggttgtttgtaagctaatcaagagcccttaaactccattacataaatgatacacttaccctttgtattaagggactaacggcttcgcttttcaacaaagctggatcttctggcacacgctcagaagatagccagtacttcagagacagattgctttgagggcactggaaccgctgaggggcagagtaatcctaatgagaaagaaaaaagaggacgcctctggagttaaaataagacaatgcatctgtggagaacacggtgactgaagactggcagaattctcaatatctcaggccactatacactgcgcagttttcatttgtattttggaggtgctctagaaaacttagaaatgattagaataaaaagtatggatacttttaaccagcccatgtacaggaaattctgttggtgtagaaacggttctgctgttcattccttaactgcttctgttcccactttgtcagatgtagggcgaggtggtggtggtgagtcctaattttttctatctctatccacagtctggaatcgttaggattattttaagccttcataacatttgcggacagcttggagtgttttgtacatgtagtggggcagtgcctggcctcctgtgagagattgatcatcggtaaacaatccacacgaaactcacttgccagtggacggggaggatcgctgccatcctttcagcaaagagcaaacgaataaggagagatccgggcccatccctcctcgcgcagcagtttctagatttttaccccggcttcataaatggctaccagctggcagtcacaacactttcataatgtttgcacacaactcatttgggtcgctttcttttctttcctttttttttttttttttttgagagaaacggagagtcttactctctcgcccaggctggagtgcagtggcgagatctcggctcactgcaacctccgcctcctagattcctgcgattctcctgtctcagcttcccaagtagctggggctacaggcgtgcgccactatgcccagctaattttttgtactttttttggcagagacgggttttactatatgttggccaggctggtctcgaactcctgacctcaggtgatccgcctgccttggcctcccaaagtactggggttacaggcgtgaaccaccgcgcccgaccattatttgggtcgctttctaatttctttctccgtttgtagctagcgttgcccgaaggagatttcagagagatcccctggagaaagggacgggggatgtcgttttccagtaatttctgggggaaatctgggatagtcagggggtaaatctagtgccgtttgctgaagttaaaaggcgtggggagccaggtggtgccctggagggagggccgcgcgagacgagaccaaccttcgggacaggggagagcggggctactgaacgcaggggattccgctgagcctccagcccctgagcgtccaccttcggcccagctgggggacgcggtctcgggaagaaagcccggaatcccgagccggccagccgcgagcagcgagtaccggagcgcgtgggcaggcgcgcggaggcagaggcgggccggcggctgtccctttaaggggccggtctcccggcgccgccggcccagacgccaggacgtgccgggtccgccccgccccgccccgaagccgcccgtttcctgccgagcggcgcgacggcacctgagcgactgcggcggcggcggcggcggcggcggcgcctcggagcgggcggcccgggctgtagtgccggcgccgccgcgtcttcccggtctcctttcccggccgcacagggtgagggagagcaggccgcaccgggacgggcgccggcggcggggagcgcggggggaggcggcgccggccgcggggtcctggggcaggcgggagggccgcgccgggcgggggggcgcggccgcggggcccggacgccgcccgctgggtaggcctcgggcatccggttgccgccgcggggctcttgttggggccgggacgccgcagggggcgggctcggagggacctcctcggcctcgcggggccgctctgggcccgaccccggctctgtcgcggcacccggggcgcggccgagggacaccccccaccctccccaaggacgactctcccgaaggcgaggtcgacccgagcgggccctggggtgaccgaggcacctatttttagccaagcctgagggcccccgggagggaaggcggattaccgcctcctcggccggtggacggaggcagcgcgtctccggcggcgtccccgggccggagctgggccacacttacgccatgctggagttccagtcctcgccgctgcctccggcggtctgggcgctcgcccccttccccggcgcccctcccgctgccctttgcgagtccccaggtcagggcgggaggcggttgggcacggaaagcagcatgaggggggactttggaaaaatccatggaccactctcgacaccggcgaagttatcccttcctgtccccgaggggtgtgtcctagcgattcggcctgaccccttcagtttccaaaagtgagatttttggccttggggacctcgccggaaaactacgcgggaagtctagagaagtcgtctggctctcagccatacgtctggtgtgggatgtgcagccccgcatgctggcggtgaaggcgctgggtgcactagatgtgggcagccccggacgcgggcagcggcgtcccagccggccccagttgcaccttgactaggttaggttgaaagtaagctgttcagtgttggcccttctttcctgtgggaggaaggaggaatctaaattcagaactgtgttggcaaacggattccttagccgctatttaagttagtagtgcttaaagagctacggttgaagttaactgttaaggtgtgtgtgtgtgtgtgagtgtgtgtgtgtgatgactttgtggaaagccttgagtaaagagctacggttgaagttaactgttaaggtgtgtgtgtgtgtgatgactttgtggaaagccttgagaaatgtagacactcatggccagcccagctaaagataagcatcttcggtgaactaaaggttctgaattgtataggagttgacttaaagttagaatttttgctaaattaggttgcatttgttttccttagcttacctagcaggctaatggcaacagtgtctccagtttggtccgaagcaattgctggtgagacttgggataatgatcccaagctggtgagacttgggataatgatcccaagaataacactaaattactcttgagtattttgggtagacatgccttgcagtagactttcatatttgatgtgctgcctgataaaaaaggctctttttttttttcctttttcctttttttttagtttaaggatctaacctgaaatagctgggtctgttcatgagtttccctcccaccccaacattgagtttcaaatgtctcttctaattttgtagccttcatcagacataacaataccttatcaagtgagcttagagaataaggtgttctacttgatttacttgaggctgata

SEQ ID NO: 1885540 - DNA, 4001 bp, Homo sapiens
atccaactagattataaatctggaaaggaaggatcctgtggctgagatgtatctggatcccccatggagttatgttttacacttagaattcacttgctatgacatattttaatttgcgtgaaaattcaacccttagatcacaaaattatctttagaaggtttttcaaaaccagattaccctggttcctctacatgtttgctcaatgaccctggacaaattatatcacttctctattgccccatttccccatgtgtgaaatggggttattaacagtatcttatagcgtggtaatggggttaaatgagattatccatgtagatgcatactattgacatgtactccgtaagtgttaataataaccaaaatgttctccattactacaatcttgatttatattcataagcagttttatcagtgccttcaaaatactcattaccttctgtttatactaaccacacacaataagctcaatatgaacacttaattttttgactctaccaacatacacccatggctggcccttgagaagtggctctaagcagcagctttaaagctcagggtctccctgaagccctctgcatgtcaagtacatgaaagaaggaatgccatctcaccagtggcccagcaggggcgccataggggccagtggcagggtaggctccggtggcacttggctgtccagaagatgggtaggccccagggccgctgggtggccctgggtagactccaggtgcaggtgctccgggataagctccaggtgctccagggtaggcgcctggaggtgcctgtccaggataagcccctgggggtgcctgcccggggtaggccccaggataggaagcccctgggtagccccctgccccagcaggctggttcccccatgcgccaggccatccttgagggtttgggtttccagacccagataacgcatcatggagctggaaagaaagacatacacaattacgggacagaaagcattctcaaaagcagaattttcaggaaaataggaatatgtgatctaagaaggagaggaatatggcaaaggcattacatgcatatcattaaactttttccacttattaatagtttgagtttctaagactaaaattagatgttgggattacatatactttttcactttattcttgcctcccaacgtctcagatcagggagggctgcattttcataattagctcaagtcaggagttagcgctcctctacttatagcacatactttttcatcaccgtgagaaaaacaatcacaaacatcagaatgcccagactgtaccgcacttcccgctactcagaggatttctcagctcctgccggcagagtccactcccttccgccctgggccttttggtgaaagggttactgtgagtgagtcccaggcctcgctctgcctggctttcttcccaaatctgctgctggaaaaacaaggctccagcttgcaagccctcattggacaaatgagtccaggggaagccacgcagtgggagagtgaaaagggaaagtcatggtaaaaacaaaacccccaaccctcaaccatgtggagctgatcaaggggaagaaacaggcataaaacacttaccgaaaaattgtctgccattttcctgaaagaaacaaagattatcattttatcctaaaagctttcaccaatttccattaaactgaacctcaccactagttcattgtgcagttctaatccatctctaggcattatgcctaagtcagtagtgtggcgccacaaaaacatctcttcaaggggcagggatgctatccagctagattgccaaaccctatttaactcacaagtttaaacttccgtcacactagcctgtgctctgaatcttacccatctgccctctgtccccactaactgccccatcccctactctgggtttttgaagataagcagtgattgattactactgagacaggaaagacaatgacctccagacatagttgctgccctgctatttattcctctatttgcacacacttatgcctgctcctggccaggcactgcgcaggctcctatctaggtgtgaagatgaataggccatgatctgcatggtcaaaggggccacaggatctaaaactcaaaacaattgagcccacagagatatagaatagaaggatggttaccagaggctgggaaaggtagtgagggagggtgggagggaggtggggatagttaatgggtgacaaaaatagttataatgaatgaataaggccgggtatttgacagcacagcagggtgactatagtcaataatttcattgtacgtttgaaaataactaaaagtataactggattgtttgtaacacaaataaatgagaagagggataccccattttccatgatgtgattattaggcattgcatacctgtgtcaaaacatctaacgtatgccataaatatatatacctgctatgtacccataaagattaagaattaaaaaaaaataaaagccgaagggcctacagtgcagcaaggcagatgagatgcatccatggaaatgtgaaataacaagtcacagatgctatgagtcagaatgtgtgctgtaggaattcaaacccagaaagcttacttctaagaaggaaaggaaaggtgctgttggagctaagcctcaaaggggagctgaagtttgtatgtgctttttttttttcaaaggtacttgttattccaaataaaatatttggcagtacaacaaactaaggtgaaaaaattcaggcaacgtgacgtgaaggaaaaaaatatttgggtctaagatgctaccaaagagggtttgcctaaggggtggtctggagacatcagtcctgctttctcctgttccttcccatgtcaaggctccaaaagcacaagatgcttcacagctgttgtaggtgctccagcagtgaggggaggagggcagctgggcccctgaggcatgggtgagttcttcctaagctcaggatcacctgtgccatggcctgaattacctggaccttgaaacaaccagaatatccttctctttgatttgcccacctgtgatatttactcaatcacttttagaaatggcatcggccccaagggatccaataaatgtccactacttgattcaaatgcaagatattggctgggtgtggtggctcatgcctgtaatcccagcacactgggaggccaaggtgggcaaatcgcttgagcccaagagttcaagactagcctgggcaatatggcaaaaccctgtctctatgaaaaatacaaaaattagccgggtgtggtggcgcatgcctgtgttcccagctactcgaggggctgaggtgggaggatcatttgagcctaggaggtcaaggctgcagtgagctgtgatggcaccactgcactccagcctgggtgacagagcgacctcatctcaaaaaaaaaaaaaaaaaaaaaaaaccataaaatattaccttatttttggtaaaactcaaacaggcagagctcctcctagggcttaacatatgcttcatttatacacactggatattttatacaggttgagtatcccttatttgaaataggaccagaagtgtttctgatttacatttttttttattttggaatatgtccttatgcccagttaagcatccctaatctgaagagccaaaatccaaaatctccagtgagcatttctgtagagcatggcctctgaacatcatgcaggcatgcaaaacgtttgggattttgaagcatttcagatttctgcattggggatgctcatcctttactatactgctattatttatatcatagtcagacattacctttgactaaaatatttttgcacatcttttttttttttagacagggtcttgttctgttgcacaggctggagtgcagtgacatgatatcagggctcactgcagcctccacctcccaggctcatgtgatcctcccacctcagcctcccaaggaactgggactacagccacacaacaccacacccagctaagttatttttttttttagacacg

SEQ ID NO: 1885541 - DNA, 4001 bp, Homo sapiens
aaggaaatttggacacagagacagagacatacagtgtgccatatgacagcagaggcaaagatcagagtggtgcagcagtaaaccaatgcatgtccgggattaccagtcacctccacaagtgaggaaagggcaaggaagaattctcctgagtctcagagggagtgcagcccagctcacacttgattttggacttctagtctctagaactgtgagagaatacagtcctgtcatttttaagccacccagtttgtagtatttcattttggcagccctaggatattcatacagaattcttcacccaaaaggaagcactctttcacacaaacagtcaaagtcctggatgacagacaacctggagactgcaaacctccaaggaatcaaaggaagttctataaattctaggggccccatctttcaaaggctgctcctcaagtccacacccacactttggaaggagaatcctgctcttggacatgggatccttagtgagccaactgccaataatccaacatcgtcatgaattaaagatctctgacatttcctcttcaccaaggggaattctgtcaagtagtaagtaaaacccttcttcagtaatctccacaccaaacagttctgcatggcttgggacgcctcaggaaacttataatcatggcagaagaaaaaggggaagcaaggcagtcatacatggtggcagaagagaggttaaacttttctgtctctcttgggtgtaaagatataatcttgaggcaaacagcagaatcaattttcttacgccttgaaatagactccacctttctccctttcaccataaatattcccttcacattaatctaactttatgtttgcatcgaactatgtgcctttttggaagttccggaagctaatttgagacagatagacaaagtcgggagaccctgatgcagaattccagaggtgacttcaatgttgctagttaacaacccaggcattgcccagatgatgccagcccaagatctaggtggactgggatgccagagagccgccagaacaagacgcacagacctggttctcagcccaaatcttgcatgcctttcttaccaacttttccttttttaaacccctgcctttccttcaaaattcaagtggttgcttgggatgggaatgcggtcacttcccctttaccattatggttaatacaataatctttgtaccagatctctctcttgttaattggatcctgcaggtggcagattccggaccagagtgaggttagaaactgaatgcacatactgggtggttcacagacacggtgttctgtgaagtttatgggtggattcctggggaagcctgcaagcctgttagtgattagcagaaccgcatccagctactgggatctgcacgccaggtgccgtgagcccctcaccatgttccctggtcccagctgcccgcggatggttcagccttgacaacgggctcggtgttctgggtggtgggagagcaagggggccccttgggcagcgtgctacagggctgtgaatccaggggcccacccggtgttccctgtggagtcactgagggaatgaggggcttctcagggcacagagctgtgccgcctttgtgcagtggtggctgaatacagtgacactgggcgcgtggtgagaagcggggcaaggtcagttcactggaccctccgccctgagcctcagatgagtcgggggtccccagacaggcccggcctctgccctgcggcggacactggagcctttgctgtggctgccaccgaggagccttgacctcaaagcagcgggaacctctctacccacctcggaaacctgaaggcagcggcggcctctcccagccaggacctcgccggcatccgggtctccaggcccaaccctgtaccacataaaggaagtccccgctgagctaccggcgggacacagcgccgttgggtgggcgggcgcggcggggcgggaagcacggagcagctgccacagagatgcgcgggggctgtcgggaagtgggcggtccgggaggcgcggggctgatgggacgtgggcggtccggggacgcgcgggggatggcgggacgtcggcgatcggagatgccagggggcagctgggacgtgggcggtctggagaggcgcgggggcagctgagatgcaggtggtccgggacgcgcgggggctggcgggttgtgggcggtccagggatgcgagggggcagctgggacgtgggagttccggggacgcgtggggtcgccaggaagcggggtctaggacttagatccgctttctcttcaggccatgcagccccgaagctccgaatcctgggatgactcctgtccatgttggaagggaccctgccagtcctggcaaggttcaaaggccttagggcaagaaatgttagtagagtcctggaagacgatgtggggaacgggtagcggccaccggatggtgatcgttcttctacaagaccttgacatggatggggagaaacagagaagaaccttccaagtttgtcccactggacatgcccaccacactttaccagccctttctagaaggcctgtgcgtaacacatgaaaaagctccgctcgacctttccctgaccttttaaaagaaaacatttgctgcatctaatccgcctagatataaggaggttcccaaatgtatgacagagtcagaaaattacatgtcttgtaagttaccatgtgcttgtcttttgttttccgttttttttcgtttttttgttttttgtttttgagacggagtctcactctgtcgcccaggctggagtgcagtggcaggatcttggctcactgcaacctctgcttcctgagtttcaacaattgtgctgcctcagcctcccgagtagcttggattacaagtgtgcaccaccacgcctggctaatttttgtagtttttagtagagatggggttttgccacgttggccaggctggtcttgaactcctgacctcaggtgagccacccaccttggcctctcaaagtgctgggattacaggtgtgagccaccgtgcctggccgtaagttaccatgtgctttttaaaaaaatcatagcaaaggggtgtcttctggaaatgacattttgaaatggtgttattagaccacccctggaagggacacagtaaccacacgtccacgttcgttcagtgggtgagaggacatggaggggagacctgggcaggaagggaagagggttccatgccaggctgctcatatttagaagacattttcatatcattgtcattgttttcttgtgtgcgttttattcctcgctattgtatacatcattggaaattctaagtattcttttgaaatatctagtctttctagatgttctgaagtgcctgatgtatgttaaaattacaggtggtaaaataataaattttgtaaatatctttttgttaaaattcatatgcagtgttttattttattttgatgttggtggggggtggggaggatggccaaatccctgcttgatcaacacacattgcgtttgtgctctggttcaggggaggagagaggaggagaaagtgcagacttccaggcctctgtgcgcaccgggaggagagattaatgatcatctcttctgtctgtgtgtttgttttatttatctatggatatcctgtgtataaaggatgaacaagtcctatttataacatctaatcttttcaggtgttaagttgccagtgtatgacggaagcagcgttattaaacgaacgcagcttgtacatattgtgttaaaattcataaaaagccagtcttctgaaaagaacccttgggccctccctccgcagcctccggcgccagctgcaggaagacctggccaggggaaggcgggcggcacaagctgctgctggctgtggggaaggcggtggagcccaggcctccacaggctccccacaggctccccacaggctcgcgcggctctggtcgctgggctccgcacgggccgcgtgggggcgcctgctgggagcgaggaggcgccatcctggctcg

SEQ ID NO: 1885542 - DNA, 4001 bp, Homo sapiens
tgctccgggcactgccttctcctcagccgtcccacccctgagcttgctatatagtaggagacatggaaatagggcccactctctgctgataaaaaccagcccagccccgaccctgcagctctgggagaggagcccagcccccgaattcccaggtgttttcatctggtgatcagcaccgaacacagaggactcaccatggagtttgtgctgagctgggttttccttgttgctattttaaaacgtgatctatagagaactagagatattgagtatgaatggatatgagtgagaaacagtggatacgtgtggcagtttctgaccggggtgtctctgtgtttgcaggtatccagtgtgagatgcagctggtggagtctgggggaggcttggcaaagcctgcgtggtccccgagactctcctgtgcagcctctcaattcaccttcagtagctactacatgaactgtgtccgccaggctccagggaatgggctggagttggttggacaagttaatcctaatgggggtagcacatacctcatagactccggtaaggaccgattcaatacctccagagataacgccaagaacacacttcatctgcaaatgaacagcctgaaaaccgaggacacggccctgtattagtgtaccagagacacagtgaggggaggtcagtgtgagcccagacacaaacctccctgcagggccatgcgggtggtttcctttctcagctgcaggaggcgggcttattgttgcaggactctggagacttattaggttgtgatattttactatggttatttatcatgaacttttttattgggaattgtgttttattaatttttattttatatgtaaggttatttttttaaaatacataccttcaagaaataattcttcctaataatttgcacttgttctttttagagttttgttaacatctgttgatatcagctactacatagctatagggacattaatttacatctatagacatatgtgtaaatacacaaacttatacatatatgtggtcttttatatttaatgttataataaaattattataacaattataaaatacatcctaaagaatgaaacatatatagtaatccatattcctttcaatcattgcctatagtttacataaattgatgtctatttgtaaccttaaacatagtgtattggtcattttcaaacatccaagaacaaatttcaaatgtccttgtcacacacacaaaaataaaaatttgaggatttgaggtgatatatatgtcaatcagctcgattcaattattccatattgcattcataaatcataacatagctttattcactataaatacatacaaccaaaatttctcaattttcaatgaaattttaattatacatattttatctgtcctaggtcatgaatgtttttctccctgtccggatgtgattaagattgtcctgagaaacaaattcagcctcctgcctcctgaaggcttcaggaagcagctcctagatggggtgaagcaggcaacccgtgtgtgtccacaggacccggagcctctctctccttggattaggccccctcctcaggattacagggctcttcagttttctcaacatgctgttataccagagaagcacaaaacacttaatttcattatatttttcttcaatttttcaaaacaacacaaaggtaataattttaacaataaacatattacaacctactatacatgagacccttcctgtgcttcgaggtttcttctcaggactttgtatgtattacatgttttcagttttttcctgagatggaatgttgacgtctccttattacagattattcttttaatttgtctcttagaataattttttccagagctcctgcccgcccgcgcctggcggaatggagcggcgccagggctgagccaggcgcgcaggggccgccgcacgtgccgcgcggggagcggatgcccagcgggcggagagccagcgccagaggccgggtcggagcggccgctggagcagcgtcagaatgggagaacagcccatcttcaccccccgagcgcgggtcttccagattgaccccaacaccaagaagaactggatgcctgcgagcaacaggcggtcaccatttcctgtttctatgatgtcacaaggaacagctatgggatcatcagtgtggacagcgccaaggtgaccataaacaacacaattacacagaatatgaccttcaccaacacgtcacagacgtctgggcagtgggccgacagcagagccaacacggtgtttggtttggggttttcctctgagcagcagctgacaaagtttgcagagaaattccaggaggtggaagaagcggccaagacagccaaagacaagacccaggagaacatggagccctcgagtaatcatcctgagaatcagggcgtggagccccatcttctactccggcatccagtgtcaacgggacggacgatgaaaggcctctcaggccgctgcagccgacacgcacctgcagtctgggaaccacaagctgaaggcggcctcgacgcagagctgcccacgggaagaggtgggagatggagctgcagacccggcgggagaccgacttccggctgcccacggcgctgcaggagtcgacggccagtgcggagcagaggaagaggccgtgagtcagagtgcgactgtgtctctgagaagatggaggcggcagagagaggatcaaaacctggaagataaagtgcgttccctaaagataggccctgaggagagcaaatcccgacagcgccacctggaggcgcttcctggtggcgctggaccggaagatccaggcctgcataacttccgcccaggcctcccaggctgggcaccaacaactagggctggcagaggcccgggatccccaccgtgagtcctaagtatgtgtgcgagaccagatggcgctaggacgttccctgtgtgcgttgcttctgtaaatgcaggcgccgtgtgtcgtgtttccaaaccagttgtgccatccactcactcctttccagaatagaaatctctcgcttctctggccttgtgaggttgtggacaactggaagattctgactgaggaaaccagaaccaggtctaccttcaacatttacgcagtcaggccagggatgtttatatcgttcataagggttgttggaaccatatgaactgaaaaaaagcattttctcatccaaatattgatattctttacaccaggccatcgggctccttttatccgatagcattcagagtatttgaaggtcctccaggtgccagccttgggggcacagggagaacaacattcctctccgaaaacatggggaagctttaaaataactgtttagtggagacttacccagagatggaaaacaggtttctggtgagtacattttctggtttgggaatcacctgcatccccgatcctgccccgtgccccccagtttgtatggttgtgacaatgttccatttctttgttttaatttctgagcagttgactgtggtgcgggaacagcacacagtgagggtgcctagcacaatgcctggcgcaaagtaggtgctttataaatatttgttcaattaaaaaaagagggaggctgaggcaggagaatcacttgaagctgggaggtggaggttgtggtgagccgagatggcgccacttcactccagcctggcaacagagcaagactccatttcaaaaaaataaaataaaataaataaaataaataaataaaataaaaaatattttttccaagccccactcaaaaccatggtattgttagaggtgtaatagttggaccaacattgaaaatacattccatttagttcatgggcgtgcaaatatccttttttctttaaaaattgttctcagttgtaatattacaaaaaatattggtaatttataccaatgacacaggttaaaatgttgtataaataatttaatgacgtttgattggaaaaaatacatgtgccacatgtcgacaattttttccttctctatga

SEQ ID NO: 1885543 - DNA, 4001 bp, Homo sapiens
tgttggagcatcagatgctagagatgagtactctgtctttctctccacatctgacactgcaatggaattgagccctattcaggaggctgttcctggagtccctcctacttcttaccaagttctgtttcatctcctctgcttccttaaggagctccatgaccgaggattcctcacaccccttccctgccatgatctgtctcatgatctgaagactagaagaaagagaggcatcataaaacatacatacctccttaagggtaatactgatgttctgcaactagtcagaaagtactctaccatgaaagttagatggcgactgaaatatcaggagttatggaagcccttctggtcatagaagatctctgtaactaagatgtttccatttctaattgacatttgcctatctatgtgctctagaatgaattctgtgctctttaatgcttaaaacttaggtctccaacagccagggagagtcctttccaccccctcagaagaatgttgcagtgtgtgacttttgggagaagaaggggtaattctgccccctttataagaagaggttgaagaacctgctatcttctaggataaatcccagagttatttcctaacccatctctgtcctctgtccactttctcccacttccttgcttcttcctatgaggacatttgagtctattggggaagtcactgatatcctttcatagccccagagaatgcaagccattaagaagttctaacaaaatctaaatcaaaatcaagtccttgtgagagaggatattccttaaaggcataaattattttatatttgtgttcttgtacttttttctccccagttctaagcgaagaacacaattctaagactttgtgttttcttgctctgagagaagtctattttgctgagttgtaagcagctggtgcttgttgctgagttgtaagcagctggtgcttgaccacaactttctgcctgcgttttgttctccaaaaatatgagtcctttgagatgcttatgataagggtatagaataaagatagactcactgaggagagaggttctgagactagaaaggaaacagagtttgtgggtcccaagtacagtgagtgctctggtaaagagttaagacttcagctgcctagtatatttagagaggctgtgccctaattcagagggctcctaggcttagaaaatactgccattccactgcttggcatagaaagagcagagttatttattctaaagtgatcatgcataagaaagcatctgtgtgaccgtggtaaactaatgctattaaaagcgtttcactatttcttgggtgggcagcctggggaggaagagttataactagccccacgaaatgagggctgagtcatatttaatttactaaaagaaaataaaggatttgttgtcaccctgacttggtagttacaaattgtttgcctgctacagctgaatgtccaaacctttagtaattaacaaaaaaaaaaattgtaagtaattattgccagtcctttggagatcaagttctccagcctttttacctctaggaatccagagtaagagcccgtacctcctttgtttttcctccaagttagacattaacttttgaaataagaggttgtttttatcttctagaggtttgagcatctctagcagttcctgcttccttagctttaagtcctcattcaattccttcaagtagttgtcatctattttagaacttctgtgggaagaggcacaataatatctgcctttagcctgggttgagagagagagagagagagagagaccctcttttctattcagcattttccatcaaagactcaccttatttctgagggcaggtaagatcctgaagagtttgcaccacttgtcatcttgaagggtaacttctaagaataaagaggccttcctgaaaatatgtgcctttttttctatccagttaagtcattatttttgtgctgctgttcttgaaactcctgctgcagtggactgatcttagctacagcgaggtcacaatggccctaataccacataatcaacaggtctttaaagtaatttcaacatcaatggcagtttgttgactggaaatactaactacatctgatcagttcttgccttagatctagccaaatgacaaagttttattctgaagtctttgaatgaataggatggaatcacatcatatctacttttgtgttagaaaatgttggactgtcaaaaacgactcatcaacaccttctttcatggcaacaaacctctgtgaaatgccactatctgtagagcacagtgacagagtctgcaaatgaagaaaagataaagacacagcatataccttttgggggcctcaagaggaagaaggaatacttctaagagacttttttttaaaagagatcaaactggcaaatacagggtatggatataatagaataatataatatataagccactgtcattatttttcaatctttaaaatttgatattatcataatggcaggtaaaagaatattggacatgtaggaagaggatttaatttgtgaaagatccatatcgtcagtatgtccttccataaccacactcttccctgaaagattgtgtaataattctagcctcccttcaggattttctggttctgcttctattttcttttttattacatttcttttactacatttcttttggaccttaagatctcttgtcttcatctatgtcacttattggaaggtaacccagttatacatttgtttttttttcatgccttttaaacacagttttagagaagtatttttagtgaaggtctcaaagtgagttaagtcatgtcaatgtcaagtactaactgaacacttccagccattttctaggggtgttctccaaagtaacttaacccctttatgttgtgggaaacattaaagggagagtattataatggaaataacacaagatttagtttgtcagactttggtttggatctcagcttcactgtgcatagtgagctgcttgtgagcaagttactaaattttctgagtctcagtttctgcttttgtaaaagtgagaaaggtaatatcgacctgataggttcgttgtgagtatgaaatgtattatgtacagagcttggttcatgttagatgttcccattttagtgagtttgtgtttatttggtttgggttttaggattgcttaatgcctcagttaagtggtcagatacagaaagggtgatttatatgaggctaatgaaacttaaactttagagccctttattttcacagacctcttccaaaggccctgaacctcattttgtattcgtaattttgtattcttttttggaaagacagaccactccaaattatgtgttttaggggcccacaaaacaaagatctgcttctggttaaataggatacatagctctcctaagtatcctctacatcaaaacttctttggtagtctctacacatacttctcttttttttgaggcagagtgttgctctgttgcccaggctggagtgcagtggcacagtctcagctcactgcaacctccacctcccgagtttaagcgattctcgtgcctcagcctcctgagtagctgggattacaggtgtgcaccatcacacccagctaatttttgtatttttaatagaaatggggtttcaccttcttagccaggctagtctcaaactcctgacctcaaatgatccacctgccttagcctcccaaaatgcttggattacaagtgtgagccaccatgcctggcctacaaatacctttacaacatatatatgtcacttgtaagttttggatgatacctggtgtaatatgatgttaaattaggacagccatatcaaatcatatataattcacattggttgccctaggaatttccatgaaaagtttggattgaatgagggtgagaaaacgcctcacagttaaaaaaaagaaactggttggatgaattatcattagtagcatctttgactgcatatgtgacaggtggtagcaaatagtagaggacaaa

SEQ ID NO: 1885544 - DNA, 4001 bp, Homo sapiens
aagctgctaagatacagtggcaaaggtagccttgcaatgaggttttatctccagagtcccaagtttttgagacaaatccaatgacgcagatcttgtggtcaaggatgatgcaatggcgctccaggaacaatatcaggctctgtgacttgggtgccttctgggtgtgtggcgtggtctcggtctgacaatctctagaacaaccctacgaggtggtaattattattctcatgctgcaagggatatctcccacctcctaggtggactcaggtcttgtggggcttaatgcttttaaatttgggctgccttttgaagggaaaagactacaaaattatgaatacaaaatgaggttaaggtcttgggaggggcccatgcaagctgggggctctgcaggtaagcttgtttagcttcccagcaaatccacctctgagcttgcaaattacaaagctggaatttgaactcacatctgctggatgcaaagtccgaggtcttcctgtagcatgaccgtcttcctgtgtgatgagaaacatcaggctgccgaggccaaacagtgggtgcgtcactttccaatgaggcaggtgtgcgggacaggaagtgggaggttctccttgcaggggagcggctgctgccaacatcccagctggtacctgtccctgagaatggtttggcaggtgggggccacttgaagtctctgctcctacaccccgtcacccctcccaggctgctttcagaggagggcaaagggtattcattccagcctccaatttcttcctcccactcctcgaaagcatttaagtgaggaaggcagggaaaacgtagatgattctgctattgacaggaggcctttttttcctgctggaagtaaaaggagacactctagctgggcagccagccccaccctccagggctccatctggcctggctgaggctggccagcccctgctgtgcatggaggggtgctgggaagcctaccttgcttcacactttcctcttccacacccggcctgtgactcatgcctgaaacgcctccgttcaagcaattcttccttttattgtgaagcactgctctcttccggctcctcccctaagtcaccacgcaggggagatttaagggagaggttatttccccaccgtgttcagggacaaccctgtgatcatggttttggtcacatagcttccaagtgagtgttgtgcaaacatttgctaggatctctcggggagcctgttagaaaagaaactcctgagcctgctccagagcttctgttcagcaggcctgaggtgggaccatacacctgtcttttcagcaagcccccccccacctctgaggatgcaccccaaagctagagaattcctgctctgagccatctctgaaagcaccaagagccaggtttggttttttgttgttgttgttgttgttgttgttgttttgttttttttttaattacacccagacctgggtacctgagcaatcactgtctctggaatcagtgcaaagttaccgggagctgcagaggcccagacagactggaagaggggagagcttggctctaacccatgcagcctccccattgcccaagtccacccccagaccacctccctgcattcaaccacgagctttgtagagggcaggcatgccccaggggctctcagcatcacccccctgcccctacctgtgaccagagtctccctggactctcagctctgtcttcccaactcgaagagcctgccaggccccacctgggtacccttgtccatactgtagcttggaaaccctctcaagaaaggaagctgggttaattgcaggctcactttattttccacattctcagaaatcattgtgcctagttacctgatatccagtgtattagtctgtcctcatgctgctgataaagacatacccgagactgggtaaattataaggaaaaacaggtttaataggtttaatggactcacagttccacgggcctggggaagccttacaatcatggcagaaggtgaaaggcacatcttatatggtggtggacaagagagaatggaaccaagtggagagggaaaccccttataaaaccatcagatctcgtgagacttgttcactaccacgagaacagtatgggggaaaccacccccatgattcaaatatctcccaccaggtccctcccacaacacatgggaattatgggagctacaattcaagatgagatttgggtggggacatagcaaaaccatatcatccagtgtcttgagaactcttgttttatatatttggtccaatttattttgactttttcaggcaggagaggaaatccagtctctacattccgtcttgtttgggagtgaaagtgttcattttcttttaaaacagacaatatccttccaaatctatagttagttcactcatccatcactcatccataaccactgttaatattttggtctacattctaagatattttttttctgtgcatatgcgtgcacgtagcagggtcacaaaatcactcacaatacatcagatgtgcaaagaaaatagagtgtcttcattttcctacttaattaatctgatctttcttgaaaggtactctctgctgggtaatacaatggggagaaacatccattctagtaaccttggtctaatacaaacatttaaccagttctttgagcagctcagcattctgaggctgaagtgtttggccagtggggcttctgatggctgccactgtctactcctctactccagattgtgtctgggcacacagctggtgggctgcaggatttgggggttcttttggtagccaggaggaaggggtcctctggtccacacatgttctccaagtttccctgagtttggctgcagagcagttggcctgggctactccatggaacggagtggtggctgtcgaggagcaatgagtcatgggagatcaggtcacgtagggtcttgtgggcactgcgaagactctggctttatttttcttttttgagacaaggtctcgctctgtcacccatgctggagtgcagtggcatgatcttggctcactacagcctcgacctcccaagttcacgcaatcctcctgcctcagcacctcaagtagttgggattacagccatgcgcccctacacatggctaatttttgtactttttgtagagatggggtttcaccatgttgcccaggctggtcttgaactcctgagcttaagtgatctgcccaccttggcctcccaaagtgttgggattacaggcatgagccaccgcacctggccaagactttggattttatcccaaatgaaatagggaagccactggagggcttcaatgtggtggtaggaggcaaatactgattgaaaaggttcaagagaaaatgggaggagaaaaattgaagataataagaatagatacttccagctgggtgcaggggctcacacctataagctcagcactttgggaagttgaggtagggattgcttgaggccaagagttccagagcaacctgggaaacatagcaagactctgtctctacaaattttttttttaattttttttttttttgacagagtctcgctctgtagcccagggtggagtgcagtggtgcaacctcagctcactgcaacctccacctcccaggttcaagcaattctcttcattcagcctcctgagtagctgggattacaggtgcccgccaacacacctggctaattttttgtattttactagagacaaggtttcaccatgttggccaggctggtctccaactcctgacctcaggtgatccgcccacctcggcctcccaaagtgctgcaattacagggatgagacattgcgcccggcctacaaaaaatttttacaaattagcggggagtggtggtgcacacctgtagtcccagctactaagaggctgaggtgcgagaattgcttgggctcaggagatcgaggctgcagtgagctgtgagtatgccactgcactctggcccagatggatacttccaaagagtcttgctataaaggagag

SEQ ID NO: 1885545 - DNA, 4001 bp, Homo sapiens
gtggaggtcatgagcaggccaaactcactctacccgacctgctgcctccaggatgggttctgaggagacatggggccctcccatgggacggatgacaaatgaaacgaaaaaatccatctgggtggggggctttggaatgagggctctggtctttcggacttgaaattggagggaaaacgtaatcgttcctccaaagctggtattggaaacttgccattttcccaacacacacacacagaaagagagagagaaaggagaaaatttaggacccacagaattaagccctctttcaaagcaggttatctgctatcctgagaaaaagagggcatcgtgtctaaaccagcccaaggaaattcccagatgacacagatctaaggggtcatctgaccttcccttctttatggagaatgccagggagaggcataaaaactctggactttgggtaaaacgtcctgagcccgatgtggtctccctggcttctgagagaccacaggctggtgtctgttgtgctgaagcccagagctggaagccagggctgcccagttgtgcttctgcatggagatgtgtgtagtactcacacatgctatgctcacatacgcgtgcatccctcccaccctgcccaccccttcacatgcacacacagcttcctctgtccgcttcctcctccccagtaaaacttctggaacatgcacaagcgactgcctccttgtttctcccatgagaggaattggaactgctcagcaggcagagaccgcgcaaagccaactctgtcctctgcctgcccccgcaagggctggcctgtccgtgcttttccagtgggaaggtagacagacagtgggtacctgctcccgtcccctgggacctcatcctggtgttgccagctcccttcagcggtgggagtcaacggacttccccgcaggagtgggcacaggaggaaagcagcatgctgcccctgctttggaatgttgccctccagctaactcaccagctgccagagtggcagcagcccgcggcctgcaaaggaaaggaaagcaactgaggcccagggaacattccatagagtggagcactgggctcggagccagtcatgcctgggtacaagtcccaaatttaccactccccgcctagctggctgctctgaggcaggctgctgaccctctccacactctggtttctgatcatgactccatagcacaggctttttgaaagtgtcatgaccatattgcaggcgctcggggtatgttttcttccctccctttctcatcagaacaggaagagggactgtaggactttgtccctcatctccacagaggtgctggggatgggctggcctggtgttcctggttgctgagctcagaagcaagcgtttcagaaaggaagcccaggatcctcgggggaaaccgaggtccctccttatgattgctgtctctcggctggacaaggtggttgggttggggatgatgttaccatgacaaccggagagcaggtgctgggagatgctgagtcctgctgactgtgctttaaggccctgaacatcctgctgaaccatttgcttttagaccacgagcctgtgttttaatgttcttttagaaacaaattcctccttgttcttactttgaaaaacagaagtcgtttctctcatacacagaagctaagggagaaacgacagctggttttaagtcctctttgactctgggcctctgctgaagcagcctgcaggcactggcaattgggtgatgagggccacctgtggggtgcccccacccactttccttttcaaagcctcaattgtctgctacaaaacaaagagctggcctggaaaggctcagagatcctcattttccaagatttgcacccaggagctcctcaagctcaagaagaaatgaaagcaaatatgcattgcctgggctgaatccaaacacaaagaaagtgttcaaaagcttagccctgggtgctcaccgccaggacaaagacgggaggggctgttcctgcacaaaaactctggcaagctgggcagatctatttgtcggttcccaagccttgcaggaagaatgtctacaatgcctttgggtagacctgaaggactcagggtcccctgagaggaggtggcaggccgtggtggcaggtcactctcacactgcaaggatgatgccttcgagttccacacaaggagcatacagccaaggcatggagggtcaggacaaactctggttttctcctccaattgtagcagagacagcgaagtgccactccaagccaccctacccttcattcttactagaagagcccccatctttttggggcacatgttcccagactccttgcagatgtgggggaaaacatgtgacacagtcctggccaatgagatgagaacggaagtggctggtggagcttctgggaaagctgctaatgaggagggcagattcgtctagttcactccccttcttcctacctggaacccagatgaaaaattggaggtacagcaagcatcctgggccatgaagtgactgtgatataaaggaaggacagttgcaaagccttggctctgacatccataacctgaggagacgatgccagcaaccgcctatatctagacttctcaggaggagagaaaagtaaagtctctgactggtttaagccaaagttggtcgggggaggagggattctgttactcgtggctgaatctagggatttctcttccagatgcgagcccacgcgcacaatcctaggatacctaatatttcagggagcactgaacgctccagggctgacttccctccttaccaataggtggggggaggtggtaaggaactggaccaatgtcacacagcccatcagcagcagagttccaactcaaccctgtctagtgctgagcagtatcaagctgtcatccagtgggtgcagagaccgacccccactcctggaactaactccctgagctcactggccaaacaagaactgctgaggtctcagagtcctaacctgtaaaatgggtacaaagttggaacaagacagtctatggaagccctccaactctgacagcctgaagaatccaggtatcctccttcaacagagaacttagcatttcctaatccattttgcctcccctaaaagtcctacttggcagttcatcccattgtctgctttctggggctagtttgtctcacccaattactagatgaaggaaaaatgattttttgattgggaacatcctaattttaacataaattcaaaaaaaaaaaaagaaaaaagaaaaggagaccagaattgagagctttctgagagggctggtacaggtgtaaggatgtcaaacaggttttgctcacataagaaaatgattgattggcagtagcttggagtagttttgaggactgtgaggtccattgggtcagagagtggggagtgggaaaggttggtgatcaactattttgatgtctgtcttggaagcagcaagggctgtagttgcccacacctccctccaatgctgacctagactggtgacaatgagattggggtgagaattagctgagtgcccatgagagagggaattagggcaggatcccgctgggctatggacacagaggcttcctggcaatcactgcagacaccggtgaaaaacactctgattacagaatccaaaggaagccgctggcatcatagggtgacagccacaggcacagcctccctgggggggtccctcagctcctctcctctggggagaaatcctaggcagggggcaggaaagggcaagagattatccttgagcatggacacgccaacccagatgatccccagtggggaaaagtgggcttctcagtttggcatttccaaccacacatttttaccaggaagacagactaataattgggctagtaatggacacgacaatcaacatccacagccttagccttaagcctccccttgaagcctccaggagcctcccaagctgtgttgttctgtgacccagcacagcccaacacacttctgacctcctgaggctg

SEQ ID NO: 1885546 - DNA, 4001 bp, Homo sapiens
gagtccttcttatcagggcatggggggaaccctttctcatgaaatgcaaaggccagtcttgaaagcaggactgtctaaggagaacagtctcaggcctgctatgttaactcttttctgcacacctaatcttagaaatgacacccattgctttttgtgtattgtgttccttagaagtgagtcactaggtccagccccaggcaaggggaggagcttacagaaggacataaatgctgggaaagaagtgtcactgggggctgtcttagtgactatccactacacggggtgattttactttttctcatttgtattttctgtttttctctctaatgatacgtagtacttttatagtaagaaaaagccagaaaaacataattatgtatacaactttggtggaagaaaattgggcttcctgttggtaccatctgcacacgtaggtgtgggtttttatggtgtaataattctcgatggtgttagagatggtgaagttacctatgaggaaacattggaatgtttctagttataaggataagtgctggatttaaaaaaagtttggtgtttttaacagcagcaacagtggtagaggagctgaagttgacaataatttgcgaaatggcaggatgtggaggctaagggaaactcaccaggctccaggaagcttcagaccaaggcaaatattgtgccttgacatgtttgtcaagaaaccctgcaggtcattgtttaatgtatgtcaatgtggggacagctgcagggacagaatgaggaggtgtgtagagggtggaggatggagcagagcacttctaccctgggctgtgtgtagggggcgagtggcagggtagcaatttcactgctgctctgaagggaaagaagagatctgggagagaaggatgaggtacctcttccctctctgcttttcagctcagaatttcagagaggaagggactctggcctgggagaggaagatgaacctatcatataatgactgagagctgttgcctgctggtctagtgttatggtagtaaagatgccactaaacttcagaggtagacaatggcacagggactcaggagtacccttgctgtcaggcatcagaatcatggacattttatgagagagaggtggggggcaggggaggagaagagcaatgcattcagaaggtctcctctagcatccacaacaccccacacttgtttcatctttcttcctcacagtcattaaaaccttctaatgcgctattattatttgattatgtttgttttttgtcttttctctccaccttgatataagttttatgaggacagggattttgtctgttttgtgtctgttgtataaacaggcactcaacaaacattgtaaaattgaattaaaaaacacatatgctagtacttcccattcattgccttgctctgttgcttattggtatttaaataaaactgcatgtgtttgccttttaactttgtgaattcatctgtagagctccatgaactttaaaacagatttgtcaatattataagtaaaataagctagacacaaaaggccacatattgtatgattccatttatatgagatgtccagaatacaccaattcatagagacagaaagtagattagtggttgccacaggctgcggggcagagggagtagagagtgactgctaatgggtatgggtttcttttctggtataataaaaatgttctagaattagatagtgataatggttgcaccactctgtaactatactaaaacccactgtaggagagaaaagtaatatactttcctcatctattgcaaggttcatgactgacactcctataacaaaagacagattaacaagagaaaagggtaacacatttgtattagttctcatgctgctaataaagatatacccaagactgggtaatttataaagaaaaagaggtctaatggactcacagttccacatggctgtggaggcctcacaatcatggcagaaggtgaaggaggagcacagtcatatcttacatggcagaaggcaagagagcttgtgtgggggaactgccctttataaaaccatcagatctcttgagacttagtcactgtcacgagaacagcatgggaaaaactcgccccatgattcagttcctttccattcagtccctcccatgacatgcggagattatgggagctacaattcaagatgagatttgggtgggaacacagccaaaccatatcagcatttattcaaccaaagttttataggacatgaaagacttcagaaatgaagaacccaagactcagggaaaagtgtctatttttgtgcttaggtttgatgaagaatggatagtcatgtagaagtataattggtcaaaaagaaggtgtggcctaatggtaataaactgaggggaacatagcaaggcctgtttgttctttcctctgggcatagggcaggacacctgttacatgagggtcttatgacctactttcagggaaagcaggtcaaagaattctcttatggccagctgtcacacagaaaggaaggagaaggtctgaaaatggccttcttgtttctgttttcttcccaatttccgaggcattgtattttgcagtaacatgtcctgaatcctgatgccactgaattgtgtacttgaaaaggatgaattttgtggtatgtgaattatatctcaataagattgttactaatgacccacagatttgtcattaatttcccatgaggtaaaggcagttgtttctttccacagataaaacctaataatatctttctgcagatatatcaggtagcttgttggccacctgatttttaactccttaccatcaggtgatattaggcaagttactggcttgactcctggggccttattactctcctttgaataattagcacactaatacctacaactaagggccatgtgggaggtcaaatgcattggcccatgcgtgaagcctaccactgagcttaacagatggacaatgagctcagtccctatcctttcctcctcctaccttagaagacctgtaaagcacctgggccagtggcaaagcaagttattagaatctgatcactgaggtaggatccatttcctggcatctgaaataacacatcacctcttgaagcctgtttctctgcagcagttcagcatgcttacgttcattagttgtcacagaaagtccttgtcacttgctcttcgttctcattaaaatccagagcacaggctttatgactattactgagtgcagacagactcctccatggcttcctgttggccgggtggctctgcagcctttccctcacacacagcagtgcactggcagatgcttcaccgccagttctctgggggatatatatattcctgatttgtagcatgtgccaattttcatggtgtaaatactcccaccatggctaatttcaagctaccaatgtgatattaccgaacacagagtagggaggagatgggcacagccagctctctctcaagatgtgcaaatgtgccccagcataccgctgcctttgtgggataattaaaccatcactgcttagcagagcttgtaggcagctactagacacaactgcttagaaagaaaggggtttcctcacatgaattttcacagcatggcacctctgctggggcttctgatttctgagagctcagcatgtaacacacaaaattatgagcttgaagctagggttgaaaatctgcacagggatttagggaggaggtgaagaggtggttaagatcccacagtaagcctgttttggagccgtatgtattttcaccatgtgtgcactggtgttggagacagcacattcaggtcattcagaaagcatcagacattatgacttgcagcctggaagaactgagtttatgcatatttgacaaggtcagaatcacataactaaggtccaaggattacaggatgcatgataaagaggaaggcaaaggtgtttggtgagttggcagcctcgtacacagaagctatgtaaacccaaactaaggaagcccgcagtcc

SEQ ID NO: 1885547 - DNA, 4001 bp, Homo sapiens
ggtggctgccatctcaggagacaggccggcccctattagctggtgacgtggggccagctgcttcacctctctgtgcccgggttgcccatctacagcagggatgatgtgagctgctggccagggtcatgcgtggggctcccagtgccttgggggcactccatcagaggtgggggccccaccagcccccagaggggaggcggccacgtgctattgcctgaccatacttgactctttggggaatccctaagcaagtcaccaacaggtcacctgctctggacccagccaaggtcagcagtcaagggcagagaccagagtggggcttggcctggccagctggccaagctcccaagccactctgactgtccaacaggggctgtgctgggggtttctgagtggcccagggcaagcccctctgcttctctgggccctccctctctcatccgtatgattctgaaaagtgcaggacaacatcatccttcccacagataccacgtggggccctgtgagccgtgacagtgctaaaccgtattgggatcaggaaggcctctgaatctgttgggtcagctcttttcttcataaaactttgcatagacacatccttttgcatcgaattcaggcttttgtgggtagcctgaaatgtcttatctccccaacctcccatccccatggggtgaggacccagggtcaccactaagagtcaaggcggcaacctcgtagactggccttagaggggccgagtggacaggtgcagacggatggtcacccacagtcctccttcctgatgtagaggctcagcctgcagagggcccgggactggcccaagatctcaggccaaagggcaatagccacacctcttctctctcccgtcacagctgttgctcagccccaccccgcccatttgcttccaagccacactgccctcctcatccaccccctgtcctggcctcctcggggacatgtttgctaagtccagccacttagcccactggggaagcactggggctggggctggggcaggggtgggacaacacatacttagcctggagctggtagagttcctgccacagcccttgaaggtccccttccttgtcaccaggattgcttgggtcagctctctggcctgtgtccatggctgccatcacctcaccaccgcaagctatgcaggaggacaggagacccgtgagtcaggcaggatgaagacagaccgaaaagggacagtcacagccgcagcttcctcttcagatccttggaagccagggttagcatccccacctcacagaaaaggagacagaggttcagaaaggggctgtgagcagcttaaggtcatctggcaggactggatgaggacccagggctcattaaatcccaagtccaaggtcttcgggctgcatccccagctctggagaggttgagggtgccattctgcaggggccttgtttcacttgcggccctataactggtacagccccatcacccccaagtcttcagttcctggccaccaagatgcctgggaactttcaacaagtgctggcttcaaataaatgatggaagaagtcatagggtcagagccagagttggttcagaaaacagcctgcttaaggaggaggcagcttcatcatcatctctgcccacccaccccccatccatgcatttattcacttaaccaacattacatgctctgagctcatacaggtcttacagagctacagtggagactgagaagagatgccttgaagaagctcatggtcaagctgggaaaatggtctagttacaagtagcttcaacacggtcttgcaaactgttcctgagccactcacccaaggccagtatgcaagcatgaccctcattggtcagctgctgaaccagcccagtgcattggggagagaaggtgaggggctacaaggtcagtctttctagccccaagcatcaaacataggtagacaggcactggaggaggaaggggcctagctgactcacctacagctccaggagcacaaagccacagccaggctgtgacatcacaatgctggcttctgtccttatgatgtgtccattgcaggatccacctgtgggtggagggccagattctccatggtcctaaaacctcccacccccaactcccagtcccgttcccaagaagatggggagaaagggcactggcaaccccatgtgagacttgggctatttttgtcctttctgtcaaggctggtctgctttatgtgctgcccagttccaattgacctgtcccgggactctcccttgaccccatcccacctgattttggtggctgcagctcaggcatttctccatcagcccccccaaggctcagccccacccatggctcaggaccaggcctggttccgtgcagggggtgggagcaagctgaaggacccatgtctgggaactgcccctgcctacagcttggcggtgaacctcctgttggagccactggacctgtgccaccggggaaggtggggtggggagggctgggcctcttgcccaccctgacaccccacccccaccacacgcaccaccctgccggctggcctggccttccccctcaaaggcttccattggctcagagctgggcaacctcagatggctcctgggaagccacagctcagtgtgggctccactgggaggaacgttgtgggtggggaaggtccccagagagggtgaaggaggcaggagccagggcagggcctgagccagagtgggggccaggaatgagggagggcgggggtctctgcaggggcagagcaagggctgggggttcaggtctgtggctggagttggggcacggctggagcaagatctggatcaaaggctcgggctggggccagggtcggggctgggctcaggggcaggggcaggggtttggactcatccccctcacaaccccttaccagcaggcagtgagatcagccccagccagcccaggagtccctgacaggtgcccagggctgcctctccatggtcctagagcccctcgcttatgtgctgagcaccgactgagaatgaaggtgaagggtccttgctctggccttgggttcagactcaggagggaggtggatgcaggtgtgggggacgtggatgcagagggagaggagctcaggggctggggttgcccagagaaggagtcagcccagttcaaggaggggtgggggagtcccccagagtcagcagtgtccgaggtgtttcacgaggataagaatgaaaggagaaggtgggaagggcattctggcagaaggaatggcagggacaaaggttcggaggcacggaacagcttgcacatcctgcgcaaaccgtaggcagcgccttcaaagcagaagggggcgatcagggtgggagtggtttggaccgtggctggtgaagctgttggcaggagtcaaagggtatcagccagcagcagagactgtccgggctactctgggcaaggagagatgcatgggaggctgtagggaggtgcagaatcagaagaaaagctgaaaatccagagaggacaggggctcagggcagccctggagatccatgcggcaggaactcagggaggcgcccccagaatgaatccttcccaaccccttttcatcatcctctccattctcaagaatcaagagagggtgcccaattggctgagcctgggccatgtgcccaccccttggcttgactgacagtcatatcctaagagcccgcattggggcccggaagtttcccagtgcaaaccctggcgctgttcccaaggaatcgggacagctgagcaacagaacccacaggtgctcctccatggaggctcagggacaacaggctgaggaggctcagggacaactgggctgcatccccagctccggataggtccagggtaccattctgtaggggccttgtttccctcgcagccctataactggtacaaccccatcacccccaagtcttcagttcctggccaccgtgatgcctgggaactttcagtaagtgctggcttccaacaagttctggaaggagtc

SEQ ID NO: 1885548 - DNA, 4001 bp, Homo sapiens
tcagtgcctcccctggaggctgtgcaggtggctgccatctcaggagacaggccggcccctattagctggtgacgtggggccagctgcttcacctctctgtgcccgggttgcccatctacagcagggatgatgtgagctgctggccagggtcatgcgtggggctcccagtgccttgggggcactccatcagaggtgggggccccaccagcccccagaggggaggcggccacgtgctattgcctgaccatacttgactctttggggaatccctaagcaagtcaccaacaggtcacctgctctggacccagccaaggtcagcagtcaagggcagagaccagagtggggcttggcctggccagctggccaagctcccaagccactctgactgtccaacaggggctgtgctgggggtttctgagtggcccagggcaagcccctctgcttctctgggccctccctctctcatccgtatgattctgaaaagtgcaggacaacatcatccttcccacagataccacgtggggccctgtgagccgtgacagtgctaaaccgtattgggatcaggaaggcctctgaatctgttgggtcagctcttttcttcataaaactttgcatagacacatccttttgcatcgaattcaggcttttgtgggtagcctgaaatgtcttatctccccaacctcccatccccatggggtgaggacccagggtcaccactaagagtcaaggcggcaacctcgtagactggccttagaggggccgagtggacaggtgcagacggatggtcacccacagtcctccttcctgatgtagaggctcagcctgcagagggcccgggactggcccaagatctcaggccaaagggcaatagccacacctcttctctctcccgtcacagctgttgctcagccccaccccgcccatttgcttccaagccacactgccctcctcatccaccccctgtcctggcctcctcggggacatgtttgctaagtccagccacttagcccactggggaagcactggggctggggctggggcaggggtgggacaacacatacttagcctggagctggtagagttcctgccacagcccttgaaggtccccttccttgtcaccaggattgcttgggtcagctctctggcctgtgtccatggctgccatcacctcaccaccgcaagctatgcaggaggacaggagacccgtgagtcaggcaggatgaagacagaccgaaaagggacagtcacagccgcagcttcctcttcagatccttggaagccagggttagcatccccacctcacagaaaaggagacagaggttcagaaaggggctgtgagcagcttaaggtcatctggcaggactggatgaggacccagggctcattaaatcccaagtccaaggtcttcgggctgcatccccagctctggagaggttgagggtgccattctgcaggggccttgtttcacttgcggccctataactggtacagccccatcacccccaagtcttcagttcctggccaccaagatgcctgggaactttcaacaagtgctggcttcaaataaatgatggaagaagtcatagggtcagagccagagttggttcagaaaacagcctgcttaaggaggaggcagcttcatcatcatctctgcccacccaccccccatccatgcatttattcacttaaccaacattacatgctctgagctcatacaggtcttacagagctacagtggagactgagaagagatgccttgaagaagctcatggtcaagctgggaaaatggtctagttacaagtagcttcaacacggtcttgcaaactgttcctgagccactcacccaaggccagtatgcaagcatgaccctcattggtcagctgctgaaccagcccagtgcattggggagagaaggtgaggggctacaaggtcagtctttctagccccaagcatcaaacataggtagacaggcactggaggaggaaggggcctagctgactcacctacagctccaggagcacaaagccacagccaggctgtgacatcacaatgctggcttctgtccttatgatgtgtccattgcaggatccacctgtgggtggagggccagattctccatggtcctaaaacctcccacccccaactcccagtcccgttcccaagaagatggggagaaagggcactggcaaccccatgtgagacttgggctatttttgtcctttctgtcaaggctggtctgctttatgtgctgcccagttccaattgacctgtcccgggactctcccttgaccccatcccacctgattttggtggctgcagctcaggcatttctccatcagcccccccaaggctcagccccacccatggctcaggaccaggcctggttccgtgcagggggtgggagcaagctgaaggacccatgtctgggaactgcccctgcctacagcttggcggtgaacctcctgttggagccactggacctgtgccaccggggaaggtggggtggggagggctgggcctcttgcccaccctgacaccccacccccaccacacgcaccaccctgccggctggcctggccttccccctcaaaggcttccattggctcagagctgggcaacctcagatggctcctgggaagccacagctcagtgtgggctccactgggaggaacgttgtgggtggggaaggtccccagagagggtgaaggaggcaggagccagggcagggcctgagccagagtgggggccaggaatgagggagggcgggggtctctgcaggggcagagcaagggctgggggttcaggtctgtggctggagttggggcacggctggagcaagatctggatcaaaggctcgggctggggccagggtcggggctgggctcaggggcaggggcaggggtttggactcatccccctcacaaccccttaccagcaggcagtgagatcagccccagccagcccaggagtccctgacaggtgcccagggctgcctctccatggtcctagagcccctcgcttatgtgctgagcaccgactgagaatgaaggtgaagggtccttgctctggccttgggttcagactcaggagggaggtggatgcaggtgtgggggacgtggatgcagagggagaggagctcaggggctggggttgcccagagaaggagtcagcccagttcaaggaggggtgggggagtcccccagagtcagcagtgtccgaggtgtttcacgaggataagaatgaaaggagaaggtgggaagggcattctggcagaaggaatggcagggacaaaggttcggaggcacggaacagcttgcacatcctgcgcaaaccgtaggcagcgccttcaaagcagaagggggcgatcagggtgggagtggtttggaccgtggctggtgaagctgttggcaggagtcaaagggtatcagccagcagcagagactgtccgggctactctgggcaaggagagatgcatgggaggctgtagggaggtgcagaatcagaagaaaagctgaaaatccagagaggacaggggctcagggcagccctggagatccatgcggcaggaactcagggaggcgcccccagaatgaatccttcccaaccccttttcatcatcctctccattctcaagaatcaagagagggtgcccaattggctgagcctgggccatgtgcccaccccttggcttgactgacagtcatatcctaagagcccgcattggggcccggaagtttcccagtgcaaaccctggcgctgttcccaaggaatcgggacagctgagcaacagaacccacaggtgctcctccatggaggctcagggacaacaggctgaggaggctcagggacaactgggctgcatccccagctccggataggtccagggtaccattctgtaggggccttgtttccctcgcagccctataactggtacaaccccatcacccccaagtcttcagttcctggccaccgtgatgcctgggaactttcagtaagtgctg

SEQ ID NO: 1885549 - DNA, 4001 bp, Homo sapiens
gcagaagtctggcaagctccagggatttcgaatcctcttgggaattctcgcaggagccagtcccctttttgccaagtgactcccacacagacccatcaaactttgcaggtccccatgggggagcaaactttgcaggtcccctgcaactggacggggacagccctgagtggtgaagcggggctctgtggcatatcccccggcaaggagcccccctggccacacccactgtccagggatgctgcccccagccagaccctcagcctcctagtcctggaccgagacagggtgggctcgggccacacatgagacctcccgtatatgtcctgggctagcacaactgctgggttggccagcactgggctaggtctgaccccaagatggaataaacaaaggaaaatccatgacaactggacttagctcagggtgggccctgccctgacatcctctcatcccgcagagctgcccacacactcaggggcatggaggagccacaggctggccaggggcccagcaccctggaggacacagagaggcacggaagtcacctgggctggaggggaggagtcaaggcagccctcccagggacaaggcccttccggctgcagctgcagagagggagggaggaggaggagcaggtctgccctctgttctgacaccaggggccttctggagctcccccaatgctgctctccccatgctcctcctcccctccatggcctagccacctcccctttgccctcctggctgcagcctctgctcccctccccatcccacttgcctgagccagcgccacctggccacatcctgtatctgccctcactgccactccccagggcccctagtagccccctgctgtccacagggacagtcccacccctccccaccgggaacagagcccagcaccatgtggcccctcaggctgtccagctccaggactcctgtcctggccacaccctgcactgtggccccaggtgcttgggggcgttccctgcacctccaagctttagccacaggtgcatcctcctgctggaaggttctccctcccctccccacctactgttcttgccccaagactggtcttcatagcccgtctctggggcctctccccattccctggctcatccacagtgaacccctcctggcttgtccagaccccacctcacctggaccacagcttgtcacagttggcctgcatgccagacagtggctcctcggggcaatgacagcatctttcttttcttgagcttctctgaggccagcccaagacacagttcaacccgtgtttgttgaatgaataaatgacctacaatggggccttaccctttcacacccaggacaaagtcatttgctccctccaggtttactttgctttactttgctaaaccaccacgcttgctctcctctgcttcactcttgcctcccactgcccacaccgagtgtccaccttaaagggaaccccagagccaatgagggaggcatgaaatcctgacttccgactcctccccacctgagctcctcccactggaacctcctgatggggcagaaggttcaggctcacctgagctgggacctgcctgtgctcctaagggcatggcctttccggcagttggctccaagtcactttggagagacattagcatccaggctcctctgaccctcgaacgggagttgctttttgcgcctcccggcagggagcccccagtgtccttgtcttctggtgtcacctgcttcacagcacgtctcccaaaatgcttcagagcatttccatttttccacgaaagaaatgacccgtttcctgggctcctttctcctctgtgcctctgtggcagagagagctgcctttgtcgtaaaataatttcgggcgcttgcctctctctcacgcacaactgttcaaggctctttcctccgactgactttcatgtcgcaaaactctattaagctttcatctgcctgggggagccgtgccttgaggaaccagggaagggaaggagtgctccggacagtgcgcaggggatatgtaaatgggtgcagaacccagagcctgcctctgccctccagtccacccacccgtctccaagcgagaaccgccctgcctcgcgctcccccgcctgttctggaaagggcggtgtgaggcaggcagggcagagccaccctgaaatcctcatctggattttttgttcattccagtggcaaagaagctcactcccaggaaaccgggtgcattcgaggaaggtgctttggtggaaagagcactggggcaggagtccaggcctgggttcgagtgacagcgggtgctgattcctcagggtttccacacttcctggcagggagggcctggctgcgttgccgtctctaatatttgcctaatatagaatggaccacttgctgggactccacacatgtctgaatatccaccgccgcaggattttgtattccttctctctaagaggaaccccctaactgtgtatgctgagatgccaccaggctggacgtccccatcagagctgccacatctccctgccgtgtggccctgggtgagccaccttctctgtgtgcctcagtctcccaactgtgtttcctcagtgttgtgaggactgagttccatcgcaaaccactctcgcatgtgccaatggagtgttatggtttccaaatacatgcacccatcatgggctctaattcccaccaaaaaaaaaaaaaaaagctctgaggttttcaccagtgagccagctgatagcagccaaaccagagctgggttcagggtaaccagcctccaaccatttcaaagcagccttcggacctaactttccatttcctctgggcagctgctgtcctccaagactccagctggggaagagaacagccccatcttctttctccacctctcagccgtgagctggctgttcacaaatcactcactcttcattctcacagcaaccctcaccaaagccccgtgtcacagatgaggaaactgaggctccacagcaggaacccgctttcccaaggccccatctgtctcccggtgagctccttcccagtgacatagcacatgctctgtctgtgcaagtcctgaagccaccacctgttttacctgactggaggctatcctgcagcaggacacagagggctgggctgggctgcctgattccgtttctgtgcttctgtctcctctttgcccagtgctgccagccaacatccagctgcccagggaaactgcagccccagcaagatgggccaccctgggccaccccctgaacttccagagccatcggctctgcccatctgtgcccatctgtctcacctgtaaccctaatggcagcctctgttcaggaccaccagcaggagccaggcctccccacacctcacagtgccacctctccaaacccatccctgccatctggagcccaggggacagtcggaagcctgctgagggaggaggtcaggagatggaggctaaaggggagagcaccagagtgaggaggggctccagaagctaggctgagggcagaccctgctgccccccaaaaagtcaccatccagtggggtcattatttttcaatcggggaggctttgtacatgtatttcttaaaaatgaggagggaaggacgtctgcaggagcgtttcctgtgttggagtcaccagcagctcacgcctcattgctcccgtctcctccagctgtaattaagccagagacaccaggcactgctgcctgcccagctccagtcccagcacaataatcagccctcagttaaatgaggaggataaatacaggcagaccgggactccaaggacaacagcccccggttaccgtcctccacagacccggaccaccacccagctgccttggtcgctgagcagtcagaggatggacagaacatgcagggcctccttggtgggaagccacggacagggggggccccccacgcagggcctcagttttctcatctgtaatatgggggagcagacaagtcccccacgttaccctctgcaggcctcgctgtggt

SEQ ID NO: 1885550 - DNA, 4001 bp, Homo sapiens
gagatttaaaggttaaacagaaatctggagggaaaggaagaattgcaaccacactggccaatgatctagtgttgttactctcatttatttgctaagtttccctttcagtttaaagcacggcatttaattcagacattgtccttcactccccatgagccaatgaaagaggagatgcgtgggctgtggaggggctgagatgcttgtggacacctggggcagcggctgtgggctgtggtctcccgggctgtgcaggtcaggaggtcaggaggtctctggagagaggcatcatcatggagctgggcctgctggagaaaggagttggccacggacaccccaaacaccccgatttgatcatgacactttctgtgcatggaaccccacatgtaccccttaaaattttaccctgtaaaatattatgtatcaatacaagagagcaccaaagcaatcatcctactagccaccatatgccatcctagcttctccacagtaacacgtcatttactcctcagagcggctcagcgaggtagggcctgctgatggtccctttcacaggtgagaacacagaggccctgggaagctgaggggtttgctagagatcaggaagccaggactcgggcttgggtgctgggctctgggcctgtgtgtctgacttctccgagggggtgctgccttctcctttcctctctttctccctaacccccccacactcagccactaagtatttttagaattattactatttaggtatcatctataaaacatgacatttaccattttaaccatgttttcatgtatactccagtggcatcaagtacattcacaccattgtgcaaccatccccaccacccatctccagagcccccattcaatagaaacccccccttctcccctcccccagctcctggccaccaccatcctgctttctgtctatgaatttgactgctcagggtgtctagagtggagtcctgcagaatgagcccttttgggtagaggtgatttcattcagcacaatggcctcaaggttcactggtactgtagcgcgtgtcagggtttccttccagtttaaagtagaatcctctggttgtttgtccattactccatggacacctgggtggctgccacctgtgccctggtctctaagagctgctggcactctcgctcctccctggtccctttccttgctcacctgccctcccctggctcggctcctcctcccaggcctccagcctgccttcccggcaccccacgcctgctgcctcgggaatcttgcccaaactccaatctgcttgggcctctcttactggtaaacccacaaggatccccaccttcagcaaaaaagagttccaaaggctccatgtaggagcccaggcccctcactgactgccctggccagcctctccagtgttgccccaacggagccctgccctatgtacctacccttgttttcctgaaaaccacactctttcctgcctggaggacacccttctcaccctggagagattacccttctagaaacaaaccaaacacaccctctgcagaggctctgccagccgccttctccaggcaaggcaggctgcctgcccccacgctcacggcagcttcctggcatacttgctgcctcggtttgtgcaaaagcaaacctgcaagtcgcatacttaggggatggcccgggaagcccataaggatgtgggagaacaagacagggagggcaagaaggacaatcacagactcatcctggagcacattcaactgtgggacacaggaactcatccctgagactgcctggaatgtagctcggaactgtcccaacagctcctaaccttccgaggttgatggtccctcctggttaactccgtggccagcaagaggtcccaggaggccatcactgcacacagcaaccatccaccatgcctgcatgcaggtggcctctgggtggaacagagggatgtgggcaaaaatctgggatgaccgcaagggcgccaggcacacagtgggtttgcgactgtggtatctgcctctcccacgggaggcagaccccatcaccaatttctctctgtacccccagcccatggcaggttggagacatctgaaaaaggtagcaaatgagtccatgagtggctgtgtgggaatgagatggactgggtcttgggagagaggaggcaggagtggatgttggaaagacaggctgctgagaggagaacacagtggcagggcaggtgagcagcggccaggggctccctcacacacttcaccccagcccctgcgccagcctcatctgcctgtctcccacctgacccttttgccgttcacctccgtcctctctctgctgggttctcaaggcaatcgcaccttgcctagcaactgttgctaccgaaagccaacgtccctggtattccaacaataaagcacagcgctccgactacaactcccagatattattgaaaagaaaggcaggtttatttcaaggccaggaggggagaggatctgcgtgttggaggctggagcagcagcgcattcgatggccggcctgacagcatggcgagcagcttgtgctggtgcgtcctccagaaaaagaatgcgcgctctccaggaggtgatggtccctgttcataaactccctgttgctccctgttcccattcagctgggtcaacatgtgcctgtaaattcctcccgaaagggaaatcataacagcatcagcagccccagaaatgacaaacaactcaagtatggaaagccagctgccaagtattcaacagtactcatgttgcaccagaaacaaaaaaaatcagataagaaaaataaacccagttgtgtgcatagttccttaaatatgtatcccattttgtggttccttccagtcttcggtgtaatgaatatatccattggttaggggtcacggaatggcaggtcctaccaggctgccttggattggcgaactgtgatgttctgctttctcccttctctgaagcatggagcggtgcgagacgttcagaacagacagccactgacattaattttcctgctggcctccttgctaaattgttttatgacttgtttgctgtgtcttggttgccctattgtgttgagttgatttggcagtggttatttaaaacatgctttgtcatcctcaggatgagtggaggatcccgggggtcacttttgcacaacaaatggtcattgagctgaagaactgtcagagtcaccacctccacagtcaagtggcaatggaatccgaagacagggtcagctcggtacaccacgagccgagatccacgggacggacggtgtgcaggcaccaaagcgtggacaggccatgctttgcttaacagcatggggctggccacggcaccagggcctctgccagcctcacgaggcccctcctggcgtggccataaaagccacagctgcaaacgctgacacggcaagaaaagaatatggtgagaaaccagcttttgcctttgcttctcagactcctcggaagatccgaagggcactttcccatccccaggaatgagaggccagattcctccatggtccagtcaggaaatgtaatcaagcatcaacgcggagccaggatctgtgcctcaaacttgaaacgtggccctatcttcaagggtgctcacactcagatgacttaaaccaaaaatgacacggtgtggcctgcacttgcccatgccatagtcaggaaagcctagtcaaggacaacgcaagcccagaggaagagggtctaaacccagccgagaacagccacccagagcagaggccctcccctgagagaaagccacctgctctcagccatccctcttctttccctacgagctccaggagacagaaaccatgatgcttaggtagacatcaatctgttatggcaggcaccagaatgtttcttctcctgtgtcccatcaggagtcaaaactgatctcagcctgggcaatgtagcaagacctcatctctacaaaagataaaaaggttagccgggtgtggtggggtgcgcctgtag

SEQ ID NO: 1885551 - DNA, 4001 bp, Homo sapiens
taggggcggggaatggctgggcagctccacctgtgacaatggactctgccccgtccctgatcgaaatgactgacagcaagctctccttcaggcctggcctccccggagttctcacttagcaaatggctttctaatgagagcacaggaatttgtccctatgtgtggactgacaatgaataaaagaagcagaaatccatggtgaactttatttcagcgaatagaggacaaagatcagcgacagctcctgtgggattcgggagatttgtcagccacgtaggcatagaagatgggaaaatgggatccacttttttcccctttggggccaacctggcaatttgtgtgcaaagcacaggaattccacacaaggaatttggcgtaatagaagtaattagggctgggcgtgctgcctcatgcctgtaattccagcactttgggaggccaatgcaggaggattgcttgagcccaggagttgaagaccagcctgggtaccatagcaagatcctatctctaccaaaacaaaacaaaacaaaacaaattagctgggtgtagtagtgtacacctgtctaaaaaaaaaatgtaattagtaacaggaatgctccaaactcaggaaaaaaaacaaaacaatatttttaaactgctaagaagaccaaaaattatttcaaaaccatgaggtaaaatgacagaggtcctggtgaggagaggactttatcaagggtgtaatggaagacgctgggcatgattcacatgttgtggagacccctggagaaggggggctagagtcaggcaggggtgtgagtgacccaggcacagaagtggggcaggagggacttgggaccctccttctgaagctccccaggaggctcctccttttacctgcccttgatcctggagtcctctctgccagagacaggaggccacatggttctcaccaccaggctagtggacaaatccctttgtttccagggtgggcctggaagggattaggttactttctggtccacaccagaggctcccctagaaggcagacagccccagggactgactcagggacccagaggctgggatgggggaggccagggagtgaggccagggcaggcagctgtgggggctgggctggggagaggaaacagtactggggcagaggggacgcctgtaatcccagcactttgggaggccgaggtgggaggctcatttcagctgaggagttcaagaccagcctgggcaacatagcgagaacggttcctgggggaaaaaaaaaaaagaaaaaaagcatgaaatacaatgtgtctatattgaaatctgtactgtaattgagatgaaatactgtggaaaaactcaaggaatttacctaaatgctccgcaatctaattccaaataccaatggtaattctcaatacctaattaggaaaacatcacaacctgcatttgaagaaaagagtaacgttcaacttctaacgaggcgtgcgatcatttcggcacttggaacatgaaacaaagtcaaaacattttcaggcaaggtgaattgctgatcaagtatcagatgtccaggtctgctccccttaccgttgcgattgattcaccactacatctcttctgaaagtaccacacggtgtggaatcctcaacttaagtacaaaacacgacgaaactgattaggaaaatccatttgtcaactgtgggaggctctggatgtgtagagtacctagactgtggtaacccctccaccctgcgtgcctccatcacatcatccagctgttcaccttaaataaatacaatttctatccatcaattacaccgcaatagagctgggggccattttttaaaaacttcctctggcatgcagcaattgataagaacttgcaaagctgagaaggcaccgatttaaaactcgcgccaacgcggctgcgcgccttgtcctccgcccaggaaccctggaggccacggcctcgcccggctcctgcgctggcactggacgtcccgccggctgtacctggcgccccgtggcctcgctcccgaccgctgccccgcagaggcctcccgaccgccgaggccctcgccacgcccgggtgcccccagggggcgccggcttccacccacagagctccccaggcctgggcgggcgcagggagggcgcgaccggggcgcacccgcgcgggaacttggcagagactcgcgggacgtggcgggggcgcctcaggaaacgcgccgcggggctgcggggtcgaggggaggggactagtgtgcaggggccaccctctccccagccccgccccccgagtccagctccgcccctgatgcgtacctggcgggactgggtcccaggggctctccgcgctccttctgggggcgccacgtccggaccttgtcccctgctgaggactacctcgcgggccgggcggggtgaagggcgctgttaagaaggacagtcccggggaatgaggggcgagggggagaacggggtcgccgggtcgggagaagatgacagacggggcagagtagaggctgcagagggtcgcccggagagcgcgggggtccccccaccagcatcccgtcgccgcttcccgtctgaccccacccgctccccgtccccgcttcccgtctgaccccacccgctccccgtcctcgcttcccgtcggaccccacccgctccccgtccccgcttcccgtcggaccccagggcaggtgggaacgaagaagtgagttgggtccccgctgtgggccctcgccctctcaagccgggccgtctccagggcttcaggttggggaacgggctcctgtggcctccagcaggctcttccactcggggcctgggtttcaactcagtcctctcccaccaccttttccatgtgtcttcaacgcccttcttcagccggggtgacccgaactgcccagagggcttgcagccttcagggacgcagtttccagtttctgggcgcccatatggacactcccctgaagcccgcctccccttcccctgggagcaggggccttgcaggttctcccaccgctcaccttgcacttgcttcctccgcctgtacagggaaaggcccacccagctcaacccaaaggcccagggccccttggtggaaaaccccaagggggacaaacaaaagacctctgcaatctggtttagagtagacaaagcttcccttaagcaagtgatctgttaggttttgtgtccccacccaaatctcgtctggaattgtaatccccataatccccacgtgtcaagggggagaccagatggaggtcattgaatcatgggggcggttttccccatgctgttctcgtgatagtgagttctcacgagatctgatggctttataaggggctcttcccattgctcagcacctctccttgctgccttgtggagaaggtcccttgctttccctttgccttccgccatgattgtaagtttcctgaggcctccccagccatgctgaactgtgagtcaattaaacctctttcccttataaattacccagtctcaggcagttctttatagcacatgaaaacggactaatacagcagttcaccacaaacccaaggcaggcttcagtctttttccgtcctgtacctagttcatttaagaacacacttagagttagaaactggatactttggccctcgttgaggatacggacatatatgtacacacatatgtacactcacacatctatggtgtaaagtggcagccatgacagtcccttcacctgacttgtctagaaatgctcagctcctgaggcagtgaccctagagggacagagagcgtgtctgggagaaatgtggaagggtcagctgcgtccagtgggcttcgtgaggcaccgcacctgccttttccaggtcgaatattccaagtggaactcaagcaagatggatctaatggggaacttgtggggagtctccgggtctgatgctggagtcgtgtccacagggtaggccacgaggaagggaacttcaggagcagctgccgccccgagaagacagactgaaacccatatc

SEQ ID NO: 1885552 - DNA, 4001 bp, Homo sapiens
tcaaggccagtagctaacttagctatttttagtctcactttttattttagaaattatttgctatataatggccaggcacagtggctcacacctgtaatcccagcactttgggaggccaaggcaggtggatcacttgaggccaggagttcaagaccagcctggccaacatagcgaaaccccgtctctactaaaaatacaaaaattagccaggcatggtggcatgcacctgtggtcccagctactcaggaggctgaggcatgagaatcgcttgaacccaggaggtggaggctgaagtgagccaagatcgtgccactgcactctagcctaggtgatggagtgagacgctgtctcaaaaaataaaaagagagagagagagggaaagaaagaaattatttgctatataaggattgttgttaggaggaaatcaacactataactgtttgtttctgtctttgactctggttaaattactgtacgtcccgccagcatacctgatttctattgataggggtagcacagcctcgtagttatgagcatggatcagaagctaggggctggtttaaatcttgatctgccacttactagctatgtttcttacctctctgaaccttggtttcctcatctgtaaaaggggctcatcatagttgtgaggagaattaagtgaactaatatttgtgcctggtatgcagtaaccactatgtatgtttttgaaataaataaatgttgttggagtgaaaccccccaacacatctctaatgccgccttgtgactagtggattaagtgagcactttgaaaatatgtattacttgagtgattaaattgccaagcttccccatttcatttacatcttatttccatttctagtgaatcattccttctaagcacaaggttgtgaaaggaaatcttgaacactaataatagcattacaagctactataaccagggcttacttacatgattatcaccaaagctccaataaatttctcaatttaaatattaaaaatcagtcaatgatctgttagctggaaaatatctggggtgaaagagtgattaccactaaaaaatagattgaagtcattgctgcttttagagcctagaaaaatacaaagatctgttattctaggtaagttacttactctctctgcctcctttatgggctgctggaaggattaaatgattagtgtgtgagaaatgcttagaacaatgcctggctcaaagtaagtaatcaataaatgccagttcttattatcacaggtattctgaatacaggttgtggcgatcaggagctttgatgaccatggcaggtggcaatgccccaaagtgcagaagacgtcaattcctcttccatatccccagtcaacacacacattcccctccacaaccaagagaagtgggcattaaagaaaggaagggcaagaggaacgacaattctaaaagatcaccaaggtgtatagtctgaattatttggactagttctgctgtgatcttagccaattgaccctctgccctaatttccccacctgaaaaaaaagaaggccaatttattaagggtttctgatgcgtgggtgaaagaggctgttaacactcgaaagtattatagattaacaatctttctaaccattttaaatattagcaaatgttccagctcacaaagtgccatggttttagtggcctggaaaacgctgcaatttgttcaaacatcagtgggtgttatttctggatgttaatcagtaccatttaccttgagaacctggaaaatgtgtggactgtgcaagtccgccatctgctggtcctggagactctgcgccgcagggcagagatgcttgtccaatgcggccggcacaggagctccttggagagcagcaaaccagccaaagctgttcccaccacctcaggtcctgatgctgaattatcacagtgaacatgttgctttcccaaagggaggtgatttgtttgagagggtatgtgtgtggtctttaaatagttttgttctttgtgcttacattatcatctaggaagaaaagataatttattgcatctcagaaatgaagcgactctgagatagcatctatttcaaatgcctcattttacacaaaagaaaaaatgtggcccaagagtcagacaactttcccaagttactcagccagtagtggcaggacagtatccccaaggctcatgcctggacacttactctcgctaccttggagaaggtgaaggagggcagaggaatctgccaaaacaaagaaaacttcccagccagtgtcctgggtcactgtatacgtcttactgacatggcactttagccatagtttgcaaagagctttaacttctcttcttatatccatataaaaactttcacctctgattgtagccaaaagccaaagcccttttatgccctattgcacttatgaaaggggaaaaatgcaagtaaggatactttatcttgtgattattttcacttcctgaaaagccaaagatctagcagtttaatcacaaagtctgtcctgtcattcagcagcagatgccagcctcttgcccggcagccaccagaatagaagaaccctacaggtcagaaagtctacactcttatttctccaccagagagaggtctctcttagtttatacaggccaactatttttttttaattggtcttagtccaataatgacatatttgcctgggtcacctgccagccaaccaggagcgctcattcagctggggtgtggatacagagaaattctagtgccatccaacagagggcagtagtgcacagacacataaccaccctgctcagctctctcctatcagaaaaaagggggtgggggacacaggtgcatattcttactgctctgactctgtcctgagagtggagccaaacatttttcagatgccaaaatcaatcttaaaagtcaatgatctgacaaggacaaatattaatcgctaattcctgtttccccccacttcatgacgctcagcttcatactctgcccctgagcctcccaaaccaaagttcttttatcacgtgacagagacacaagccttggatccatctgaaaacaaagctgacaagtttctcaccacctagcaacacaaaaaactctaaacacaatccaaagaatccccaagggaaacagcttcaagaatcttgaaaatcatacctatttttgtttgtaatgtgtgaaattattacaagtatgttcaccaagaggactattgatggatgactcacaatttagctaaattcaatgaaccacacactgtgcctatcccagtaggtgactcatgcattttttatttcaagtatcaagtgtttgccaaaaacagtatttaaaaaaagtaatgaaaattgttctgaaagagctcatgaatagggtaggactacccaccgacaacctcatttgtgctctgaccacttacatgggatttggtgggtctgctacagcagcgctcgacagagagtgcgctccccacagcaacggtggcaggcggagggcaggctctgcaactcaccacacgtggttatctccctcaaacccacatctcagcaaggattctaaagcccaatgatgtgtatgtgttgcggggggggggcaggtacatacaggttttgctaaaacatattaaaaataaatgcatacatccattcaattcctgtttgtcttctattgagcttatcatttctccccctaccttttttaatttaagaaatctaattatcagagaaaaatggagggaatgaaaggtcactgagcagaaataatgaaaatgattgctggtgaggaacagttaaggggtgtagactttattctgaccattagtgttttcgtgtgcacctgctactaggctattcacaaaaccctcagtaagagtccccctttctcagcctgcttctctgaccagccaaaggaaaagtttttaggtcccactgacttgcaaaaaaaccctcaagttcactgaccacctaataatatccttgtaaatctcagaaagacattactgat

SEQ ID NO: 1885553 - DNA, 4001 bp, Homo sapiens
gcagggagttaagcaatggagtacatcccacacataatgacagtcactccagcttggaaggggaaagccattatacctccttctaagaatagacgtcagcataattgaaatgacaattcttgcaatcctcaggtaatgaagattattttgaaatgaaaatcttttttttgtttttcttttttttttcatttacctacttgcaaggacatttttcttttcagaggaaggtcgttgaggtctcccttgacagaagcgccactgtctttctgagcgggtaggtccaccttgatcgtccaagctctgacgctgggtggcttcgatccagagtgtcccggggtgtggctggagggtggatataggattcggagccatgctgataacatgctggtaacatggagtttcccagggacaagggacgaggtgacctaccaggtctctctccgtcagcctcagagcccacagggctgggcagtggtgggctgggcaaggggaaggaaattcatctctggaaactgccctcctggaggccacctgaagtcgaagacaagaagtgaaattcagaagctgctccggggtcacactgtctgtctctggatctggatcttagggaaagagctgccccccacagtcccacctgtgaatctactctatcttctatcagttgtgtggttgtattcaccttcctgaaatttctttccccttcccctgacaagaattttctgcttctatcaatatctgggaactccttgagggaaggggtcatacatttttaccttctgttaccggtataattgtgcccccaccaaaaagacgtcaaaatcctaactcccagcgccagcgaatgtgactgcatttgtaaataaggtccttgcagatgtaaatagttatgatgcggtcctactggactaggctaggagctaatccaataggaccgctgtcagaataaaaggggatatctggacacattcaggcacacagggaacacaccctgtgaagattagagatctgcagccacaagccaaggagctacgagaagctcagagggagacctggaacggagcctccccaatgccttcagagggagcacagccctgcccacaccctgacgcaggcttccagcctgcagccctgggaagcaggacgtttctgctgtttaagctgctcttttgcagccttgtgttatggcaggcctgggaaactaatacagtgggtcatgttatttgtctcaatttcacagatggagaagttgaggctcaaagaaagggagccacccaagatctcatggcaggaagagagtgggactgaacccagctcaggctgacccggagccccagggacccgaggctgtgggaacctggtttccggctaggacttcgcgaagggctcaggggcacagctcagagactccctgcaactgagcccctccgggggagaaggggccatggagctgctggcctctctgatgggtgggaaataagcctcaggccagcctcacccttcccacgatcttgtgctcttcacctgccttgctcaggaaagctagggcccatcttttaactcctcctgttagaccagtacctgttagaaacatgaacccaaatgtgggactttccaatctttgcgggacacttcaaggtctgctaagaaccaggccctctctgcagtcgcacacggcagcaacgccagcaagatctgggggcaggttttcttccacgtggttgaaaagagttccatcccagtggctggggcagccagggctaggcggaactagaggacctctctccaagacacagacgaagatctgggggaacccgttccaaggaccaaaaagtcctatccaggcactggtgcctgccttggctttaaaacagcctcctccttgtcacctgtgcatcttacctgcacaaacagcaccatggatgcaacgtgtccccaccccttgcacgccagccctgcacactccgcccacgtctctacaccatcctgaagagatgtcatctcgtcctctcgtggttcccagctgagtcaagtcataatggcattcagaaggcagttctggtctcctaaggagaaaggggacacttggtgaggcagaatgagcacagggcaggcagcccggcaagtcacgttcccatcttgtccccacctgccacgatttagctctgtgagccttgcctccaccccgcctcttcttctgaccaacatctaaacctccttcaagatttagctcaagccttgcccttgcaaaaccttccaggcctcgccaccatgcacagcctgggcaagctgcccacaggccccccgtgcccttgacacacataccccctgtattatcaatgtctcggtgctgtttgccagcctgactgtgggctgctgagttgggggtgggggcactgcaaagtgcaagtctatgccgatgtattcgaagtgacccaaggggcagtccacgagctggcagaggactttgcctgcaaggtggcctgaactccatccctcgttattcggtacttgggtagggttgggcagtacctgggagggtcacattataattgggggcactggccatggggccaggctgcctgggttcaaactgtggctctgctacttagtcgttctgtagaatcttgagtatgctgctgaaatgccctgtgcctcagcttcctcgtccataaaatggggagaatacaagtaacccttacggccattatgtgggtcaaatccacataaggcacttggaaaaaggtcaggcacacagtgagtgctcagtaaatggcaacttttcttctcattattgacccatctctctttccaacatctggtacatgagtcaaaggcaaatgatcttaccccagcagaagagtccccttatttataaaacaaggggattaaatgaactgatcatcaacctctgtcccactctatgttttctgatttggaggtgcatttcagacggtcatgcaaagtcctcccccagtccccaggattgtccccttccagcaccaaaccaacacaccagcatgcagaggcagggaggccacagtgcaggaagggacaactcctgccagcggacaagcagaagcattcgtgctgaggtttacaactgttcttaggaaccttgtaggctggtctgtttcactatatccaggtaggcattttatttatgcctagaaagctgaatgatgacaattagtttccagttctgtaacactgtccccttcaaccagtcaggtcccatcctccctgctcattagggtgaaactcttgttagtggctttgcaagttgggggacgggaaatcatcagaagcgggtgggtggactcctgcaagtgtagacatctcacttcctcacaaggcagcccacggccccctcctctccacctccctcatgccaagcttacctcctatccctgggcaggtgaggcaaatgcttatcatctgcctaattgtggaacacgataatatgctagatttcaaaataattaggctgatggtaatgagggtttgatggtttctgtgcaattagacggatggacacaaacactttgtttttaacctatgctggggctaatgacctcaagtgggaatatggcagtgctgcattttaaaaggaggaaaaaaataccctgggaacctcagagaaaataaatcacagtgggctccttcccacagattcgttgctctggatacctgaccagatgttccctagacatcaataatgagggatttcagggcaagggggacatggcgtcagaggagctagctcgctctgggtttgaatcctttctgctgcacctattgactctgcaacacggcgcaagccacttatccttgcagagtttcaagttttcatccataaaatggggatgataatatctactgtgcagggctcttgtgagttcctggcacccagtaaatgtgtgataaagatatggtggaggccaggcgcggtggctcacgcctgtaatcccagcactctggcgggacgaggtgggcagatcatg

SEQ ID NO: 1885554 - DNA, 4001 bp, Homo sapiens
tgttgggaatggtgggggcgtggaggctagagcagtgggcttataatgaatgagcttggtccaggtgggaggtgatgggccgatgcctggaggtggcaggctgggtggagaggaggatggggaccagcgggaaggacttgagggggagctgaccagcctgcctcaaatggacccttacctggaggatataggatgctttggtgtgaggcacggtagctgccactgtctgtgcccacaggtcctgcaggcaagaggggagcccttgtgccaatgcttcccttcctggaagagcaggctcatttggatcaccttaccccggggggcacctctctgaagagccttggcaaaacctgtcctttgtcaggcttcgtgggccagaagtaccccttcgtgactcagggacatcagctgtcaaagctggggaaaccaaggcccagagaaggagtgcaagttgcctaaggccccacaggaggtcagaagcagagcagctagaattagaacttaagtatgtctctgactttcagcctaggatcactcattatctagagcctcctcttctctccaaactctgctcccagaagaggggtgtcattagccattcatgcccaggtgtggataggtttaaaaatcccagggacgtctgtacactaagcctccttgctaatcacggcccaactacagaatgctatttatggaacagctaccacgtgccacaaattgtgctgggcgctttccatccctcgcatccgaaaaagcctcttgacacgaggcaggcactattatccctacactctcccatcacagagacaagcacactacgatgcagagaagatgcggcttgtttaggatcccaggcgagggtgtggcggaggcggtgctgaaccaagtctgtctaactggaaagtccacactcgcaaacacgagcccccgtggcctctgagggacaggggtggctccccaggaatgggctggtgggagctccctggcctcctcccttgctctgcccccactctgcagcagccagaagcctctccgagaaccagacaggctccagactgaccctgacctcgcggcggccttctccactgggccggcgcttcccagggcggcttacgccttctgtgtctggggccatccgcagaccttgccttctgatgcccgtgggagttcggtgctgccgcggggagcacctcagtccccctgtctgctctccgccgcggtccgggcgaatggcaccatgtggggggccccgagcgggtgcctacccccctggcagcctttactgagggtctgctcagggccctgcccagggctctgtcactccggcgctcaggcccgagggggcggcgcctctggagacgggactgcagggagagacccaggccctggagacgaggaccggaccctccccggggacgctggagctggacctcgagggatgctggcgcaggtgggcacaggtggcacaggtgggcgcggggttctaggcgggagatcgctcgggcgaaggccaaggctcgggagctggtgcggggggcgcggccccgagagccgcggaagacgccggtgggggagaagcaggtgccagccaagggcgtcgggccggggctggttccgagcgcgcggcctcgggtcacatgctcgctccgggggccccccgcgcccctcccactggcctctgggccgcagccccacggcgcgccggcagccgggggtcaggccgcggtcagagtgcgggcgcgcgccgtcgccgcagggacgctcccggcccacagtcggcccccgggagcccgggttcgagtcccggccctgccgtgatccgctgcgggacccgggccggcccttccctgtcgggcctcagtcctcccaccgtccgcggtcttccctagtcggggctcacgcaagggcgggggaggccaccggtgcccactgcgcgtccgcccctcccccgccgccgggagcgcggacgcgcacgcacctggccgccgctgagagcgagggtagcgggcggagccgggaagccccgcccctctccccgcccccgctcccaccgggccaatcagagggggctacgggacccgtgcggggcgtcgcgctgggggcggggcctgcgggggctgaagagcgagccgggcgggcgggccgcaggctgtcgggctggggctgaggctgaggctgaggttgaggcggcggcggcggcggccgggtgcccgggacagcgacgcagcgcgccggcggccgcgacagggccagcgagagccccgcagcccgccgcagctgccgcctcgccgcggccgggccggagagcacggcggcgggagcgcggccttaggaggcggccggagcggtgggcacagctcggcgcggagcgtcctgtcaggcggcggccgagggcgtcgcggactctccccgcgatgatgccggtgggtgagggcgggcgggaggtggcggcggcttcctccgcgggccgctggccaaacctccttcctcccgcggctcccagcccccgcgggccggtgcgaggccgggcgggcggggaaggaagtggctgggcgggcgcgcccggccgcggcgccccccaggcgggcaggtgggggcggcgccgggctgtcagcgcggggccggggccgcctgcgggcccttcctgctcggcctccgcggccgcggggagaagcagatgcatttggggccggtcatctcctcggtcctctcaggtgcgcggtcggacgctggggcacaggtctggtgggtggcgcagctgtgacccgcctgaaacgaacgttctggggtcgccctgggagtcggcggggtgggcacccgcgcccggagttcccacactctgcaggcgcattcccgtagccttcgcggttgtactgaggaaaggtgccgagtgcacggatttggagagccatcttaggaattcccttttcccgtatctgcaatgttggttcgttttgctttaactggtttgttctccgtgttctgaaggttgaacgaggttcgtttgtagtggtggtgtctttgtcctgcccttaaggatgctttcgcctagaaagacattggccattagatttgccatcgtcctaccgacccttccctttacctataatctgaataggaggggatgctgaattctgatttttaaaaattggctttttgggaggtaagcatcatgacttatgaaaaaatgtgggactggttgtacccagttggagaggtattggttttctgagcgcctatatcgtaagtaaaattctcaaacacgtttatagtaaagtaacacagtcatttttttaacctacaatactacgttgaaaatcacatttcacaggaaagtgcagtttccctgcattctctacttgaatattgccattctgctatgctgcacccaaggacatttagattagatcccccttcttcctctttgatttcctttctcttgataatctcttctccccgtttttaacggattccagcatgttttgtagccggctttcagcgttttccaagtcttaaggtttgatctacttgatccttaggtctttctttagcatcagacttgttgggtttctaaacatttggttttaaatgaataattgtcttgtaatggaaagagaattggatgagcatcagaagatctggggtgaaacgctggttcttccactttttagctatgtgaccttgaagaagtcaaggtctttgagcctggaattacctctaaagtagggataaaaatgtaccaatatctgagcgctgtcctgaggatcaaataggatgatgtatccaaaagtgatggttgaacagaatgtcatacaaatatttattattcttaatatggctttgaattttcaatttctaactttataagataaggcatttggaaacttccctccctaattctcactagctagattttgatgaaaggcattatggtgtttcagaattttgaaagtagttttagttaaatcctgtaatagttgattgatgcattcatactgtgg

SEQ ID NO: 1885555 - DNA, 4001 bp, Homo sapiens
ttcggtggacggacacatcatggccttgccacgcctctgcagtcctttgcacaaagtggctgaggccacaggcatggtggccacacaggctccgtagcctattcacccccaccagacccttccagcagcatggacagctgggcgcccatctttccaacagcgaggatggtgtctgagccctgatgtggcaccaccccctgtggggagggcagccagcctccaggaagcaggcagagcacacggcgtgccttttgtcgagagccagtccttgcagggatggatcctcaaagggacgggtcctcgcaggcttctcccgccagcatgccatccttggcctccttcgctgccttgggattccacaaatgacacttgtaatccagggccttgtttcagaggaaaaccagtgtggcgataagcttgtgtccatcagttccactggtctcactccacgcccttcacctagaagcaggaggcctaacagactggtggaatggttgcagcggggagactgcaccccttaacactgagatgcaggcctgtggggggcagaacaggcttctaacctgggaccgacctaggaggccgtttccccaccgccagaatgccgaactggaggtggccatgcctgtgagagggcttctgtggacggacgccagtcacggccttgccacgcctctgcagtccttacacagagtggccgtgacagctaatcggctatggagggatttttctttcccactctggtaaggtggggtcgcaggagtggcagtcctggctcccggtcctctggggaacgtgggtctgcttcccaaacacaggagcagagatgccctctggccatgtggggccgctcactgccgagctgaccgctggagaagggagctccgcgggccagagatctctgcagaggaatctcttcggagagatccctgcaggagggtgggaatgctgcctcaggtgaggaggaagcactgtgtcaaaacccagggattctggggcactgctcgatattcccatgtcacctaataaaggtccgtggaaaactagggcagctcccacagacagagctgtgaggctcagagccggcctgagtgaggactcgggtcgaggtgcctggtagagaccccagcctaagcgtggcagagggagaagcacatcggatgtgtggggagacagaagctgttacgggtcgaattgtgtcccctcgaattcatatgttgaaggcctaacccccagggcctcagaatgtgaccttgtttggaaatagggtctttgcagatgtgatccatcaagttagggtgagtcatcccgggagtgtgggcccctgatcctgtgtgactgtgtccttataaagacgggaaatttggacacagctcgcagggagaataccatgtgaagattcgggcagagattgaggcgctgcctccaccagccaaggaacagcaaagatggcctgcaaaccccacgagagtggaggagaggccaggttccccacaactgcctcagacccaaccagccctgtggacagctggagcctccagaactgggaccacacgctgctgctgttcacgccccgttggaggcacctccttacagtggccctagcacaccaacgctggagctgtactcaccagtgcgggcccccgacccgctcctgcgttgcaggccggcaatgccccgacccaggagctctgtcctgaggtccatgctgcagagttccttgctgtgccctcctccagctcaagggacatggcccctcagcacctagccccttccgtctaggttgctgcccacacaggcctgagcctgcttcccagacggcaggcctcttcctggggtctgcctcctgggtggacgccgccgctgcgtgcacacatctaggctcaagtggtggctgttggtggtgggcagtggacagagcttggtcgtcaggctggggttttgacatgcctctgggagagcctccatggtgcagggatgaggagtgggccagccgcagcaggagcttctattcccggacgcagcgtattgcaggttaatttaccatttcctttgatcctcttccctgccacctctaaggagggattactagtggctcacaacacagctccgatttctgtgggaagtgccgctgtggtttcttccgtttggggttagaaattctttctcttagggaaggacagtcaccgaggacaggacgcagagtgcaaacgtgggctgtgccatgaacctccatcggccgcccagtgctgtgctctgcctgggacatcacccccttcccgccagttcctgcaggaagccgccagtgggagctgctggcaggagactgaaaggcaggaggcggctagggccttgctcgccacccctccctgctcaggcgctgcctctgcagccaaacgtgccccgcagcgcccacggggtgctcgctctgctgggatccaggcagaggcacatgaaggtttgcagggcccaacaggcacattctttaagctcctctttaaggtacaaggatacacacacacacacacacacacacacacacacacaatgtatattttaatatagaaatatgttttctttgtttacttttggctaaattgtgtccctgcccccaccaactcatatgttgaagtcctaacccctatccctcaaaatgtgactgtatttcgagatggagtctttaaataaggtcactagagtgtgaggtccctaatcccatctgacggataccctcataagagatcaggacacacacagggaagacaacgtgaagacacagggagaaggcagcgtctacaagccaaggagggggcctctggagaacccaagcctgctgacaccccttttcagacttccggccgccagaactgtgagaaataaagttccattgtcggccggccatggtggctcacgcctgtaatcccagcactttgggaggccgaggcaggtggatcacttgaggtcaggagttcaagaccagcctggccaacatagtgaaaaaaatttgtatttttgtattttgggtctctaccaaaaatacaaaaactagccgagcatggtggtgggcacctgtagtcccagctactggggagggtgaggtgggagaatcacttgaacccaggagacagaggttgcagtgagccgagatcgcacccctgcattccagcctgggcaacagagtaagaccttgcctcaaaaaaagaaaaaaatccattgtttaagctgcccaggctgtagtattttgttttggcagccctggcagactgtagatagatggacagatggtatggagagaaatgtagagatatgtgtatttatttaaggtatgtaaattatgtcacatgactctgcaagtacatttctggggtccctcccagggccctgagaaagggcgtgaaggtcagggtccctgactctcaaacctcaccagcctcacggccctacatggctggcctccgggcacctcggcccctggtctactccctgacccctgcctgcacctctaaatgagttcgaaggagagagctccagtttctgcaggccccacccagggcgttctcgccccaggcctgccaccctgcctgcctccttactagtttggtgcctgctgctctcatgggctcccacattcggaaatacccaaggtggtgggcatcgtctccacgttcatctggacagcccaccttcggggacaataagcccagccccaaggatcgctctgctcccagggagacagcaggactgtctgcagggaatgtagcttggctggctcccagctggggggtgagatgccagagtcctcacctgcaagcatttcaaatgcacaccctcgctgcttcaggggtgacaggggtgggaatcactgcattttgcctatcaggatatgtgctctgaattccctcccctcttgtaggtaggacaggagagggtatgacatgaggctgccagagctgtgtagcttataggactctcgctcagtcacctgggctggaatacagggg

SEQ ID NO: 1885556 - DNA, 4001 bp, Homo sapiens
gcagtattaagagggaaatttatagtgctaaatgcccacatcaaaaagttagaaagatctcaagttaacaacctaacatcaccactaaaagaactagagaaccaaggccaagcaaatcccaaagccagcagaagagaagcaataaccagaatcagagctgaactgaaggagatagagacatgaaaaactattcaaaagatcaatgaatccaggagctagtttttggaaaaaattaataaaatagatagaccactagttaaactaataaagaagaaaagagagaagattcaaataaacacagtcagaaatgacaaagaggatattaccactgaactcacagaaatacaaacaaccatcagagaatattatggacacctctatgcacataaacttgaaaatatagaagaaatgaataaattcatggacacacacacccttcctagaaaaaagggataaattcccggacacacataccctcccaagactgaaccaagaagaaattgaatccctgagtagaccaataacaagttctgaaattgaggtggtaataaatagcctaccaatcaaaaaaagcccaggtccagacaagttcacagctgaattctagcagatgtacaaagaagagctgatacaaaggctagacacagtggcccacacctgtaatcccagcattttgggaaaccaaggtggacagatcacttgagctcaggagtttgtgaccatcctgggcaacatggcaaaaccccatctctacaaataatacaaaaaattagtagagcatggttgtgtatgcctatagtctcaactacttgggggggccaggcaggagtttgtgaccagactggttgacaaagtgagacactgtctcaaaaaaaaaaaaaaagaagaagaagaagaagaaagaaaaagaagagctggtaccatttccatacatcttctgaagtctaggcagggggtctcaaacctcagttcttgacttctgggcacccacaggctcaagaccacatggaagctaccaaggcttggtgcttccaccctttgaagcaacagcccaagctgtaccatggccccttttagtcagggctggagtggctgggacacagggcaccaagtccctagactgcacacagcacagggaccatggggctggcccacgagagcattttctcctaggcctctgggcctgtaatgggaggggccgccatgaagacctctgatatgccttggagacatttttcccattgtcttggggattaacatttggctcctcattacttatgcaaatttctacagccagcttcaatttctcctcaggaaaccggttttctttttctatcaaattatcaggttgcaaatttcccgaatttttatgctctgcttcccttataaaactgaatgcctttaacagcacacaagtcacctcttgaatgctttgctgcttagaaatttcttcagtcagataccctaaatcatctctctcaagttcaaagttccacagatttcttgggcaggggcaaaataccaccagtctctttgccaaaacataacaagagtcacctttgttccagttcccaacaagttcctcatctctatctgaaacagcctcggccaagaccttattgtccatattgctatcaggcttttggtcaaagccattcaacaagtctctaagaagttccaaaccttcccacattttcctgtctttttctgagccctccaaaccattccagcctctgcctgttaccgagttccaaagtcacttccacattttcaggtatcttttcagcagcacaccactctactgctaccaatttactctattagtccattttcttgctgctgataaagacatacacaagactgggcaatttacaaaagaaagaggtttattggacttacagttccacatagctggggaggcttcacaattatggcagaaggcaaggagcagcaaatcacatcttacatggatggcagcaggcaaaaaaaaaaaaatgaccctgttcaggaaaattcctgtttttaaaactgtcaaatctcgtaagacccatcactatcatgagaacagtatgggaaatacccacccccatgatttgattatctcccactgggtccctcccacaatacatgggaattataggagctataagatgagatttgggtggaggcacagagacaaaccatatcacatggaatcaacctatatgtccaccaacagtagactggatgaagaaaatgtgatcaatatacaccatggaatactatgcagtaataaaaaagaaagagatatgtcctttgcaagaacacagatggaactggaggccactatccttagcaaactaatacaggaacagaaaaccaaatactgcctgttctcatttataagtgggagctaaatgatgagaacacatggacacacagagaggaacaacacacactggggcctttcagaggctggagggtgggagaaggaagacaatcaggaaaaataactaataattaaataactaatgggtattaggcttaagatctgggtgacaaaatctgtacaacaaactcccatgacacaagtttacctatgtaacaaacctgcatttatacccctggacttaaaataaaacttttaaaaaataaacaaatgataatagcagattatagcccattaaataaactaggaattcatgagttcaaattacataaacaaacaaataattattccttacataagaatgctaattactgtatgcagaaggaaaggtagaattggaaggtcattatttggcaactattatagtagtagttgattgaagaagaaagcatcaaatgatgctgaatctgagtgaaggtttgatgacaaccaacatggtctcaaattatctccccacaaagtgctgttaactgcaaaggggagatgagttactttgcagtcataaatgttgtatcactgggcacagtggctcatgcttataatcctagcatgtgggaagctgaggtaggctattttcttttagtaatttcatggcttgtggtcttagatttaagtctttaatcaattttaatttgacttttgtatatggcaagagataggggtctagtttcattcttctgcctatggatatccagttttccaagccccacttattgaagagactgccttttctccaacatatattctcggtacctttgttgaaaacaagtttactgtagatgtatgagtttgtttctgggttctctattgtgtttcattagtctatgtgtctgtttttatgccagtactatgctgttttggttactgtagccctgtagtataatgtaaatgacaagttaaccagtgcagcacaccaacatggcacatgtatacatatgtaacaaacctgcacattgtgcacatgtaccctagaacttaaagtataacaaaaaaaaagaaaagaaaagaaaggaacagaggaaaaggaggaaggaaggaaggaagaaaggaaggaaggaaaagagggagggagggaggttgtattaaaatgagaaaattgattagttcacaaattatgcattaaaaggcccacagtttactagatctataaattcctcagaacccctaaatacattggctttttagaataagtgttaaatacacacacacacacgaacacacacaacccacaatacaactgatgtggccttgtggaaggaatacgtaaagctatttgcattatagtgctaatttagcttttctttacattgaaccttaataaccagaatctgcttctttgtaacttctgtccatttatccagtttccacccaaggagagagagcaagtctcattgctcaactattctaaatctgccaccacgatcccctaaatcttttccaggctgaacactccagatttcttctactcttccttaactgataggactttagttctcttggctgcttttctctgaagtatcccattttgtctgagacagtactgtgacggtactatgatacctctgaaacaata

SEQ ID NO: 1885557 - DNA, 4001 bp, Homo sapiens
ttcttgcctgaatttctctgcctggtttctaaggtcctgcgcaatctagcctacctttcccagttcccatcatccctctacactagctaccttgctcttcccggtgcagcaccagctcccaagcccactcccacctgaggcctctggacatcattttcctcttgccggcaacttcctctcctctttctcaaggtccccacaactaacaattcttcacaattcagcttacgtcccatctcctccatgaagcttctcctgattatgccaggctttggtttttacctaacatttaactttcctaccaggtaatttagtacttaattatatgttacttcacaggattttacagagcggaagttctttgagggcaagaacctgccacatggcctgagtgtctctccctggtgacattataacaaattaacaagcaaaacaaacattattgagctcctctcctatgataaaagtgcttaaacacttgctaattcgttttttgaaacactgagtaactgtgctgggatgcatcaaattcttgcccatttatgtcccatctggatcataacagatccttctctccctgaattaaagaaaaacttagattatgctggagtccaagaaagtatttgcctattaggctttggcagtggttttcaagcttttaataccgagagtcatctggggtattttctagaagagtagatttctcagctgcacggacaaagttcctgatttcgtggaatagggcctgaagtgtgcattttaataagtggtctaggtaatcttaaagtagatagtttgtcaatcctactctgaagaaaaaacggggctgtgggaacttgctttcccagagacaatctgcaatgggtggggcaaaggcaaagaaggggccaccacccccagaaaggtctatccagattttcctcagcctcttctttggttatactccaactctgattaccaaatctttgagaccctcagccaacaggccacttggccttgaagagtcatttttatctgcagggatctcccacccacaggcctccacttggcctgccctcactggaggaaacaaacacaccagtgctctgttaaccagctgcagtgttgggcttacaggttattttaactccactatgaatcagaacagaattatgaacaatttacatgagacttgtcacatcttgtttcagtctttctttggctcatagttttccttgtttggcctttcaaatacttatacgtctgattattttcaagtctggaagactacataggtagcattacacagatatggcttctcatggctgacatctcaggaagctctcaaattcacaaccccacatgtcaaaagtaaggaaacagagaaagcttccaaaaaggcagggcagagctgggtagagcatctcagctggcacccaggctgagtaattcttctctgtgtcttagcatgccatatacagaggcctgaggccaaatggatttccacaacaacttctgcagcctaattaagacccatcctgtttgcacacgggaactttgtagggtagacaactgttaataagaaagaaataaagtatttttttagaaaaatactcctgccctaaagcagatgttaaacaaccaggctcccaaaagaatcttgtataaatgatcctctaagcatgagttagaatctctacttcaaatgagagaaatattctctggagatttcccctaactgaggcaatgaatgctcccatgagcttcctgggcacaagagataccccagaacactggtatttcttctaagaaggcagagttcaagtgctctgtagagtgataaaacttaccacgttctcttcctccgatgcttgattccacccggggttcacaataagtctgtgcaatgtgtttgttgaaaaactggttctcactttcttccaggtgtgcagggtttctgagccaggagcagttgaggagtgggaagaacatctggaaagactgggagtaaggacgccccatctgatggaagaaaggaaacacatgcccacccatttttgcacctgggtctttcatttgcctttacactggactcttgcaagccctaagcaggacattgcatcaagctaatgggcttgtgttgaggtctctttcaactcaccccaagccttgggagagtcatatttctgacaactaaattcatgaagtcttcctaagcctcttttaaatcatgattctccctttgaaacaataggcacacacattaaagtccaaatagtcattaacctttatcaccattcactaggaggtcagaacagaagagcaccatgtaggaatggacagccttgtgggtgtcgtggatgcatggtcccatctggaaccctggggcacagatatcatgagcagaggaggcagcagggccaggggtggatgcgaattctgcctctaccacttctaaccagtacaccctgggcagtgtacttgactgctttgttcttcagtctcctcctctgtgaggttgagataatggtagcaactaatttaggagattattgtgagaattaaatgagattgtctatgtcataataggtatgcaataagtgcctaatatatgttgattttttactctgttttctagagaagacagatgtagaatttagtcttcatgatgggtggcttctgaagatgtcaaaagggacaatgcctcagaggctggcagccccctgacatggtgaaataggcagccgtgtggtcaggccagggcacaagattcacacactccctctctccctcagtaatgctcaggttgtctacaggaaacatcctatagtcctacatatcttgttccccacgttgaacaaagtgaggagaaagacataaaaggatttctctgctcttgctcagttttcatctcatgaaagaataagacttgcctcaaatttcatgagtgtacagtcgagttcttacctggcagaactaatcttctgggggaacaataataggtcatgttaattaagtactcattctcctaagtatattttttattatctcatttttttctcatagcaaccctctaaagagggtctattgtcatccccatcttacagaggaaactgagcacagaatggtaacttgcccaaggtcatcatttagccagaacttaaacccattgggtcaaactccagcacccactatacaaagctgtctcatctcaaccagccctctctccttctgactcacttcggtatttcattttttaattgacatttgctaagaaggtcaaatggatgacgaaggatgttgttgagcactcattttagcaaagttgtatctagcacttaatcatgtgaccaattgctgtactaagactaggggataaagggaggggaggacatgcagtccatgtccctaatgaacattccatctccttgattggcgggggagagagagaaagagagagagaggccacatgaaagaaaaataacaatgtaagaaagggagagaggaagagagaggaagcagagatctgggagagtacagaggagtgatgcggtgattcaaccccacaaggaaggtcagtgtgtcttctttgcatatacggtaaacagaagaaactgaagcttagagatcttaaatagcaaatcctagtttgcttagcaagtcagtggggggaggtaggagactagtgtctgactctgaagcccacaccctcttcactgcacatatgtctccctgatcctgaaagggtagtttacgaccatgtccttaagggcctgaatgttgcactaaggagcttgggctttattctctaatgaatataagtacccacaatgctcctctgctctaaagttaagagcatcatctagggattgccgggcagaaggcaaatcccactggtttccttctacgcacacatatatcccctccaagggtgtccagtgagccaatcaaccacttttttcacttttatgcaaacacagcagctggattagctgcacctgcagcctctgctgtgtcacaca

SEQ ID NO: 1885558 - DNA, 4001 bp, Homo sapiens
aaagcagcatatacttcactgaggagtactgccatatttctgatccccatgctgggggagttggtgagggaacagtagggccattatgttgcaggggcaattgtattcccaggtgagaggggataaaagagcaaacactaaggctgtctccagaggtgcttggctaacagtgagaagataaagctgctttgatttcccctggggaactagattctaccaagggctactcctgctgctcaaggcaaagagctgggtcaccactcaaaggaaaaatactgagggtcagtccaggatggggacaatggcagggcagatcacagcatttccagcacgtatgaaaacaactgtttaggctgctttcatactgctgtataaaacccccccaagactgggtaatttataaaggatcttgtttgacagttctgcgtggctggggaggcctcaggaaacttaaaatcatggcagaaagtgaagcaggcacgttttacgtggcagcaggcgagacagggtttgtgtaggacgcaaagggggaagagcccctcataaagccatcagatctcatgagaactctcacaagaacagcatgggggaaactgcccccatgatccagtcacctcccaccgagtccctccctcaacctggggacggggattatgaggattacaattacagatgagatttgggtggagaaacagccaaaccataccaacaattttgtcaaccagaccccagtggcacctgggaccttgggactgaccaagctggtgctacagaagcttttatggagagtggatataaagttctgggggaaagctaagtttggggggatgagtaaactaaagtaacgagaataatattgtagatctgggcaaagttgggctggcagctagctctagctggttatttagcagactaccctgtggtttgaggtaatttcccccaggagggccaatggggactttgaagtatttatgcctctttaaaaacttaagtatccttaaaacagggagggacaataaatgcagcagacaccaagacattatggtccatagaaaggttaagcctggatggaaactagtaaagttgttaaccaacgaccacactagaaatggagtctgagtcattgaacttgacgggtggattcttggatcaagaattttggggagggaaggctatgtcccaaattcactgcaacttcattattgtggcttgtgagggtctgcaaaagtgactgaatctttgtcactggacctctttcacattaatgtccctgtgggaaagaccaagtctttctttagaactcgtgcaatgtcactgccaggtgcttgtaatagtccatggcaggcatcaagagtagaaacttggctagacacagtggctcacacctgtaataccagcactttggaaggctgaggtggccagagatcaagaccagcctgaccaacacgcgaaaccccatctctacaaaaaacacaaaaaaattagccaggtgtggtgtcgagtgctactcacgaggctgaggcaggagaaccacttgaacctgagagcaggggttgcagtgagttgagactgcactccagcctgggtgtgagagtgagactcttgtctccaaagagtagaaactgtggttttcccaagatatttggaaaagtttgtcttctgggccagaagaaatggtttaaaatacacgttgtgggtgggagaagctgtattttctctatattcctgcttcacttctaaagcctaacaaagttgcatgaaatggcagactttcagctgttagccaggcactgctcaatatgctcttgaaactattcaatctatgaaacgactctagccctcattaatagaatgaagagaaaaatggtatggggatatttttccccttttgttaacttagagaagttgctaggatcctagtctcttacctctatttaggaaatagtttattcaatttctaggactacagactacagttcaaagacaccatttcctctgccaaggtccaaagcccatggagttaagtcagaacatagatcaaatttttggctctaccatttgaataaccatagggctttgaacaaggcaatctctctgaagctccttgaagcacagaaattatttgcatacgtacgtaatagaactgttgtttgagaaacaacagtctatgtcaattaaacgctggcctaacaggctgcacacaaagcctataaaacatactctcttccctgggcatgaagcaactgattgacaagatgggttcctatttaacaatagtttattctgtaagaggcactgctatatgaaggtgtgagcaacatggattaagcctgcaatatcgtcccattgaagacgccctcactagggaaatcttcaatattaaagcctaaggtctaggaaagaaaacatcaatgaactcaggacacacaaaatattggagtcacatttgttcatgtacgtttgagttagtaaccactagcagtacttgtgtggaaacttctcaatattctacagcacttaactatccaataaagtagtctcacgtcacacgtctctaaataaaaatttaaatctaactcttcacactagccacatctcaaggctcagtaaagtcaccagttgttatactggtcaatgcatcataaaacacttccatcgccacgaagtgttactgacagtactatagctttaacagctcactgtaacatgcgttgataacaaggaattttccccctccctaaccaccagatgactctttgggtgccttctttactctggggcctagactttaatgagggtacaccttggcccttttagctgccttcagttctttgatgaaaacataccactcacacatcctcttactgcacttaattctgacatatacagtcatccctctactaaacttattggccagccacccagccaccgtttcttgaaacccgtgtcctttcctaatcctcacccctctttatcacacagggttttttgttttgttttgcctttggtgagtagttcacaatttgggccaaaaattggaattatggcaacttaaaaaacaacgaagagtcccaaccccagagatttagtaggcctggagcacacacctggacatcagaatttaaaagcccatccccctgctcccaggaaattttaatgcacattgacagttgaaacctattaaactccacaaatttggtaatgtaataatccaaaagccacaattttcctagacttctgaaagtcttgtaggagttatttttgcaaatgcaaatttgtcagagcttcagagccatgtttctccaaacttttatttctgagtgccacttgaaaaaaacaatccaaacatgctttcctcttcctatctgcatttatcttgggttctaactccttcctactaatccctttgtcatttgcattcacccccttacactgttctccccttcctcttactatgctttgtagttctactcacaaagggcgttaactccaatgaagaagccctgcttttcaaaattgagatttaacttgaaagttactaatgcaaacacaaattctgcagttttctactttatttacttcctgtctcctaacacttggaaagcttttgtctggtcaggtatgtctacgttcttttactctgcagttcaactggctacatttttactttataccaagttctctccaaacactagaattctccaacagagtgctccttcttagtgtgaatgaggtactcagaccataatccacatattatatgtaactcatttactggtcaatcatttctacatcatatgtttactactgtcgactggttttctggtcagggtactttttcttggatgcttctaaattcctatgaaatgcatttttttggtcaatgtgatgtgaactagggtccagaaactgaaactccatttgacatcagtgtagctgaattcccctaataaataaaaaggtcaactgtcagtaggaataagtatgttttctggttttcc

SEQ ID NO: 1885559 - DNA, 4001 bp, Homo sapiens
cactttggaaggctgaggtggccagagatcaagaccagcctgaccaacacgcgaaaccccatctctacaaaaaacacaaaaaaattagccaggtgtggtgtcgagtgctactcacgaggctgaggcaggagaaccacttgaacctgagagcaggggttgcagtgagttgagactgcactccagcctgggtgtgagagtgagactcttgtctccaaagagtagaaactgtggttttcccaagatatttggaaaagtttgtcttctgggccagaagaaatggtttaaaatacacgttgtgggtgggagaagctgtattttctctatattcctgcttcacttctaaagcctaacaaagttgcatgaaatggcagactttcagctgttagccaggcactgctcaatatgctcttgaaactattcaatctatgaaacgactctagccctcattaatagaatgaagagaaaaatggtatggggatatttttccccttttgttaacttagagaagttgctaggatcctagtctcttacctctatttaggaaatagtttattcaatttctaggactacagactacagttcaaagacaccatttcctctgccaaggtccaaagcccatggagttaagtcagaacatagatcaaatttttggctctaccatttgaataaccatagggctttgaacaaggcaatctctctgaagctccttgaagcacagaaattatttgcatacgtacgtaatagaactgttgtttgagaaacaacagtctatgtcaattaaacgctggcctaacaggctgcacacaaagcctataaaacatactctcttccctgggcatgaagcaactgattgacaagatgggttcctatttaacaatagtttattctgtaagaggcactgctatatgaaggtgtgagcaacatggattaagcctgcaatatcgtcccattgaagacgccctcactagggaaatcttcaatattaaagcctaaggtctaggaaagaaaacatcaatgaactcaggacacacaaaatattggagtcacatttgttcatgtacgtttgagttagtaaccactagcagtacttgtgtggaaacttctcaatattctacagcacttaactatccaataaagtagtctcacgtcacacgtctctaaataaaaatttaaatctaactcttcacactagccacatctcaaggctcagtaaagtcaccagttgttatactggtcaatgcatcataaaacacttccatcgccacgaagtgttactgacagtactatagctttaacagctcactgtaacatgcgttgataacaaggaattttccccctccctaaccaccagatgactctttgggtgccttctttactctggggcctagactttaatgagggtacaccttggcccttttagctgccttcagttctttgatgaaaacataccactcacacatcctcttactgcacttaattctgacatatacagtcatccctctactaaacttattggccagccacccagccaccgtttcttgaaacccgtgtcctttcctaatcctcacccctctttatcacacagggttttttgttttgttttgcctttggtgagtagttcacaatttgggccaaaaattggaattatggcaacttaaaaaacaacgaagagtcccaaccccagagatttagtaggcctggagcacacacctggacatcagaatttaaaagcccatccccctgctcccaggaaattttaatgcacattgacagttgaaacctattaaactccacaaatttggtaatgtaataatccaaaagccacaattttcctagacttctgaaagtcttgtaggagttatttttgcaaatgcaaatttgtcagagcttcagagccatgtttctccaaacttttatttctgagtgccacttgaaaaaaacaatccaaacatgctttcctcttcctatctgcatttatcttgggttctaactccttcctactaatccctttgtcatttgcattcacccccttacactgttctccccttcctcttactatgctttgtagttctactcacaaagggcgttaactccaatgaagaagccctgcttttcaaaattgagatttaacttgaaagttactaatgcaaacacaaattctgcagttttctactttatttacttcctgtctcctaacacttggaaagcttttgtctggtcaggtatgtctacgttcttttactctgcagttcaactggctacatttttactttataccaagttctctccaaacactagaattctccaacagagtgctccttcttagtgtgaatgaggtactcagaccataatccacatattatatgtaactcatttactggtcaatcatttctacatcatatgtttactactgtcgactggttttctggtcagggtactttttcttggatgcttctaaattcctatgaaatgcatttttttggtcaatgtgatgtgaactagggtccagaaactgaaactccatttgacatcagtgtagctgaattcccctaataaataaaaaggtcaactgtcagtaggaataagtatgttttctggttttcccctgaaataaaattggtcagtcaatgctgacaggccaggcatatgttcctgagctgatcacattaaatatacacaatttctctatcctgcgactactttcaaaagcacattgtttcatcaaggttatctcaaaacactagtacttgcatatagtgtatcatctgctctacttctgtactttctatattatacactgggttttgcttcccctaacacttgaataaaacatactgccaagttatagtagattcgtatgttcacacttcatggttatcttatggtttaaatgatggttacgtctattgtactattacattcttcccaatcctaatttgacacctgttcatttccttccaatttaccacctttttgttcccatttacattattttccttttctattacacccggttccctctgaaaaagaggatttaaaccacgtaagtaataggtactaatcacacaatctttgcatgttggggtaatattaacatcagaagtgaaatacaagaggagccctccttttgagaatcccaaatttagcatccattcccacctgacagcttccagttagctcatcccactgagacagcagcaatttattaattaccctagaagaagtttcccaattatacgttatgcagcaccagaaaaaaatgttactaaggattttttatctacctcctctcctgctttctaaccctgaaatgaaaactgcattcttgaatgattgcaggacattttcttagatttcatggcatattgagaaacttgtgttctgaattttatcccaaattaaaatgtttttacttttaaatcttacttccactactgcagtgtaatcagactatcaatctgaaatccctcaattattaaatcagaaatcactcaattattaccgtcagatctaacccctttacctgcactgccatgcctactattctgaatttctattgagccaactcaattcttactttgcagggcccagggttaagtaatgtcacactgactataagcatatcatctgataaatggcctttaaaaacactagcccctttcccaaaaagcctgtacttatctgcattagatcagatttttaaaagccttttaccatgtggtatttcaatcctggtctctttactttgctacagttttggcctaggaacctaaatgtcaaagtactcaatgagtacacctgtgattatagaaaacctagagtactgttgtcttaaacacgaggaaatttaagccacagtagcgtagcctaaaaccaagagcgtgaaatgacttccccatcaacacaaactagacatgtcagtattccaacaaccctaccatatgtgtgtatagattttcaatctgtgatcatgctctacggctatttgcaaaagtaactgc

SEQ ID NO: 1885560 - DNA, 4001 bp, Homo sapiens
tgtggtgagggttaaacaccttgacatattaacatgccccccagttctctaattcctatagctgggagttacctctagaggcttgatccgattcagatttgatttttcagcaggtgttgtggtcttccgtcagaaggaacatcatatccggccatgtatctttttatgatgttagttatcattggtggatcactgcctggattcattgtcctctaaatggtgataaaccggccacggtgatggacaagtggcatattcagttaacggactcactgtgccctccctccttccccatccccggcagtattgtgggcgaggcttgacctactctgtgatggggttggaggcaacacttcctgcccacttctcccctcttcctccccactccacatccgtgtgggaaagcttatcattaagggaaggctggcaaattagaaagagccttgagtctgggcctagccctgcagatgccagcctcagaggttgctaggatacaccgctcccagagcctcctcagagctgcatccttctggagcagctcagggacactgatgggctgtctgtgcagtggggaggtgggaggaggagtggcaccccacagacaggcctgcaaagaaggggttggtccgcactcctcccggagctccatggagcagggaaaatgtcaccccagaagcacctgtatacagggatcaattcggaccgcccacagtgaaggccactctgaattgtaaaagttccccagtcttattcttcactgtacttgcatttcttctgcaacatgtccttctatatataattcagaaaacataacctgaatggacgaatgccagccctctccccagctcctgtctgcctggtaaacttctggttcaccataaggctcagcaatgagctgtatcctcatcctcaacccagccttcaggactccctccctgtgctccagatgcccacgctgacctctgctcacactcacagcagcattgcaagtgcctgtttccccactgggtctcgttctcctctgcactcctagcacttagcacaacgccttgcataggtcatcttgaatgcatatgtgaaagtgtcctgcttgcatgcctctggagacagggagctcactatcacaagaccgctcattctgacaacttcaaagttcttccttaaacacagctgaaatctacctgtcagaaacttctacctgggaaccttagggaggctgccagtgccacactgaaccagccagctgcctcttccacaagaccactcttcagagttgactctctctccattgtcctctgcagcacccaccaaaaggtagtgggatatgggtcagacattcacattctaagtcaccaagcttggctcccaggaagcctccctaaggttagaggttctggtcctactactccctcagatacctgcaccctcaccctggtcccactgggacatcaccccaacggcccagaactgtagggcacaagtctcgacgccagagaacccaggtggagggtagagggtgggccttgcagcctccctgggtgtgagagtatctgtcgccaccctttcctgatgcaggttaggggatgccaagtcctaaagaggaggcagttttctcaaaaatcacccagggaatctgtgctgatctcaaactagagctgagagagggagagacgcaggcaaggaagaggagggagcaatgcgctaggatcaaattccacagttgacctgacataagccagctcactgtgatttacgcgccaccgtccttggggtggcagaagagctgaaatcctttctgacatctcaggaccaaacttgtcaaatctcagcaacagcttttccccatcagcaccccaggctctctgaagactgttcctcggaatagcctggagctgccgagccagccgcgacggctcccgccagactacacgcctggctaagagctcaaacgagtcacaatggggaggctagtgacccccatccagggacggctcccgccagactacacgccgggctaagagctcaaacgagtcacaatagggaggctagtgacccccatccattcccatggcatcgtttgaagggctctggagccagccgcctgggttcgaatcctgactgtccccctcaccaggtccgtggccttggccatcactcaacctggcccagcctcagagtcagtgcttgtctctgaacaattagggctgcgtggggggctaatatttaggacacgaataaaataatgtataaggcttagcccagtgtgtgctctttagaaaacatcagttaacattaaccatcattccatatgttcacttcctgccaggctctggggaggaaagggagcccatggcagaccagacccctggccggccagggtccccggggtctgcgaggaggacgttcatgggcgagtgtgtggtggtgggtgaactgcggcagaacccgagattaacagctggaaccctctcctcttgcaggtgaggaagatgacacctggcaacactatgcctcacccctagttagtggctcagcccagacctcgggctcccgcctagcccaggactctgcccgactgtggccttctgggcaaagctggcaccagggtcagaagcctggggagcagagaggcccattgttaaggctgggaggcggagtcaggaagcccaggatgtaaaccaatgggagaccacggtgatgatgtaatgctcggccttcaccttcattggctgccggtcctgccactccagaccctgctctggggctctgcctttcgccgcaggttctcccgcagagggggtcattggtctgggaaggagattgaagagtgggggttggaggctgaggactgagccgggagctgtcgtccttccctgagcctaccagggaactgactgctgcctttactaaacacaaagctcctgggcgagcccggggagcgggttctaaacaccccacctcctggggcagcgccgcgcctggcgtctgcggggatgcaaatctcaggagtgttaggaggagacagaggcaccagccccgctagcctgggaggcagcctggtacccaggagggaggagggtgggggcctgggtcagcagaaataaagcatgcagctctgtacttaccacctcctctaaacatctgtgatgattataggtctgggtgaaaagcgtgggaccctcagcccagagccgcacaagacttggatttgctttggaaaccactgtgcttttcaacaagatcgttcaaatggcctgggtggagacggggagctggagagttggggatggaagccgattttaagcctggaggaatccaaactgcacacagtagtccaaggccctgccccgcctccgtccaccaccatcctccccccgcacccccgccatgaggtccatgactgtatcctcatttcacagatgaggagacaggcacagagcagcagccatggccatgtggccggtcacgcagtggagggaggcccgggggcaggagaggggcgcctaaggccacacagcagggctgcgccggcgcgcatggctgagaagcaggttccaggagtttctgggagttcttgctcaacatcaagaaacttccaccaggatccacggggggaagtggaagcagccttgtgatagcagtttcaaaggcctgggctctggcaaataggaaaaaacaggctgagaaaacatatcaggcaggcctgcttgtgagggaacctggcagacatccaaccagcagtctggtggccaattcggtacatcagacatgcgcttaatccatcattcggcagcgggcaggtcactggccacacaggcttcagacctcctggcttgagggaacttggggttgccatcaggcccgtatgaatcagaaattctgggcttctcatcccccaccaggcactcccacactgtccctcctctgcatgtttgcctctccattctctctaccttcactgtctcggttgcctatggtcacagtgatactcaataaaccac

SEQ ID NO: 1885561 - DNA, 4001 bp, Homo sapiens
gaaatgggatgaaatgcagcatggtatattcttataaatttgattgcaatttgctaggctggttacctataggaagggcacagtacatgtgaaagttacaaatgctggagggttgaacactcatttaagacgtattcagtcttgaaaattgagtttaaaatgttgaagcctcataagtttctatcctcatgaccttatgcaaattaaatttgaaacatcacaataatctctttctgcaacttggagagttctcctcacttccttcattcggacatgcactcgtgtgctcagtaggcttccgcttggcatgtttccggagccaggctacctaatttggcccaccctattcacacggatcttagagaggaaaatcagccagcccacaaatgtcctttttacagaaaacctctattgacttctacccagcaaccatctatataaacaaccccttatattgatcttataagttatggtaatgttacattagcattcatttctctggatacatatttaaacagtaatttcttttaagctagcaattacctggtaatgctgaatcaatccgaaaagtgtatttctagaacagtttcagaaaatctggtgagagttcccctttgcacagcgagcatttctcacagcctcaggctcatgaatggttacctgagatcttgaaacaaggagacagacacaaataacatcgggcgagtcaggactgcactgacatgaactggttctcaagtcaggagaaagcctgcagcaggaggatattatctaagatatttgagatggggttggtctggactagatagatagataaaccttcaaacacacacaatcacttcagtgttgtccagatttaagtttaaacataaggaatcttaactatcctaagacatttggaaataactgaataactcatcttaccagttatttacttgggagattatttttggaagattatcagtaggctgatatttttttaaaaaaatcagagtcattcttaagttttaatgccagattttatataatttcaggaagtattccctctaaagtaacaaaccagcagttagctcaaaacacgaaccccgtctttctttggaatgcacattctttctcacaagatttgaaatcgccaaatgctactttttctttgaagacagcatttctttaaagggccatgtttaactgcaccttttctacatggatgtatgcttacggatctcatcatcttctaaatttagagagatgcgctttccaaaggaagataggcagccaataaggaggatcccatcaaaagagaggtgagttactatggttacttttcaggaggttgagtaacagtgaacagtgctcttggccaaatggaccctttccagaggaggacctaaaaagaatgttgctatccatacgtgttgattcaattagtcgagactacactatgtcgtttgagctttaaccacaggctttctatcagcgattgctgcttccagcctagctgcacataggcagcgaagtcaacgggaaaacaaggactgaaaacttccgaacgctaacctaatagcgaagagcagcggactcttcacccaagaaccaatcctaaggtttacatttaaaaaatcgaatcaggtcatttgggaccagcagctggctactcttcagtggttgggggcggggtgggatcccggaacacgtccctatcctccccctcaaggaaaggagtcccttctgagctcggaggaaggcacctggctggatgaatccagacataccttgtgagctgggtccactcaccagatcggcgcatgcacctgttaggtagaagcgcggggttcggtgctcactcctgcttttgcggctgtcactcttcagtcgggcgctgacagcggcagtagcggcaactgcagctcggcgggcagccctggctcctgcaggtccgtccctccagtctctgaagcgcctctcactccgggttcgcagcgctaggcgggcgcgcagctgttctcagctcgcattggaccacagggagcagatgttacccggttgctaggagcgttgctaggaggcgatgacgcccctccacagctcgggagcaactttcctgtaggtcgagtgcgccggcgggggctgctgggagcaaggttgagagctggaacgccgaggggcggcgaacaaagagccccgacagaagggtcccgactgcgctcgcctaagttggggccggcagagtgggttgggaggctggggctgggcgagactcgcgggcccgggtaggtgagcctcggtcccgcgcctccccgggcaggtcactcgctgcaggccttggctcggtgtcccctacggaggtcgggtttggggagaggggtggggcggcactttcagcggctgaggaagcagcggggtttggctcagtgttttttttttttgttttttttttaagaccctgacccttcctctgggatactcttcgccttggagtaggaccctgagaagggagaaccggatgagttcgtgggtgtgacccggggtgaggcgtttggggatgagcagtacgggatcttccgccttctgggactctcctccctagtgtgttcgtgtttgtgtctgcaggtttgagcacttgatagattctgaggagggatatgttaactaatccataaaaatcagcccagagtctaattccttttggcgttgtctgtggctgcctactggcagggggcctcagatttaaaaaaaaaaaaaaaaaaaaaaaaaagttcttgtgctctaaaacacgtccttcacacaattagaaagtcctcattttggtccaacagctacttaaaacctcaggccaacatgtaaacttctttaacatgaaaatgcacaaaagcaaaggtatttttcacaaaggagactagaggtgtgcatgatttagcactttagtacactttagtgtacatgtacacattagtatacatttccccaaatgattgcataatttctcatatctcaagctatgttttcatgttttacattgcttttgttgttgttgttaaatagggctgttttcttggggatgggggatgattagaacatcaaagtgggcaatttgggtagccagtaagccaaattaaagaagggaagatgaaaaatctactagagaaatgttacccaaagctatcttcggagagagaatcgcactgaagaagagacacatcacttccctggttccctgtagagtcatgccagggcctggaaggaagagaacacgactgggaatcaattagaaagaaaagttgctgtctttggagccagggcagggctgctgtgcagtgttatgttgattcctctggtggctggcactctgtgaggctgaaggggctacaccagcggccccaccactctcagggccccctgcttgctctctcagcacctactgaaagcctgtggcaaagctaacagtttgttagccctaagatttaaaaagctggtaacctaaaatcgaactgtctgaagaagtaataataagccacagtgggttgaagatctgatgataaagtttcagctatcgggtatgacagggggctttgagacgggtacacttcacatccaggagatggtcctagccagaagtacaccactgctgcttccttcttcgttggaataagggcaagatgcagctgatatctcaatgagccttgtcttcttgtccagctcatctcaaaacactctcctccttgctctttaaggtccagtcacgctggacttttttcagtttccttgaatagggaagggtctcacttgcctaaggtattttgtacatgctgtttcttctttcttaatgtgcctcccttttacctggcttactcctactcagctttcacgtctcagcttaaataccacttcctcatagcagcttcccctgacagcctcccaccgactacattagccccctaattatgttcccaattcaccctaccaatcctatttcacaatattcattacaccagattttaagctag

SEQ ID NO: 1885562 - DNA, 4001 bp, Homo sapiens
ctgcatgagaatttcaagccacattgagaagcttaaatatagcggaatttgtgagttgatagttttaacctcaaaacgaagatccaccacaaaaaaatttctgtttttatttcccaacactactccccaaccttattctagcttattcctggcccactgcttctgtttcagacctgattgctgtcactgaaattatatattaatggtaaactctaccaggacaaatctttcaaaggctttggttaaatcaccccagtcgtttcttcacattttacttgttttcttacaattcctctgtgtgttccatacagtgagactcactaccaaacatttacttatctgaaaggtattcatactgttgcctcatggattttataattagaagtgtttacaaacagttctatgtaaactcaaattatacagaattattactcccctcaatgcaaaagaagagatattaaattattattagttcatacgtacaagtagaatacagcaccactttgatcaattatggtcatagtatttctatagtttatgaagaagccaaatacagaagttttatctgtatgtctgatattccctccactttctttttatcagtttgtgaaaaaaagggtacaattctttaattatctaattaaaatacttcatgctcacctgacctcattggcaggaggaaagactggacatctttctcctgggagagcttaccccaaggttctccagggccatgtccactggtcactagccagctgcatcttgtcaggagagagcaggactgcttaaggtgtctaatcttgccaactagaggctgctggggctcaagtagcaaagtgatgtcaccatggaaaccaagcccttccagggcaggccttactactacttgtggttaccgtgaatagggaaactgtcttcttacaatggaaccttatcctgattgccctatttttataaaacacacatagactaaactccttttcatgtcatactccccaaggaaattatctctgtggatactaaataattaagaggcccaaataaactagaaactgttgtctctgtttagctttcaaaatgagccaactgcaaaaactcttcactctgttgtagttgataggccattaggaactggaaaacaagcaaaacccaaaacactaagtagttcactgtctctggtttgtattatgtccactttcccggatccctgcatgattgaatggaatggaattgatgtagtcagcattgatggagagagttttctgcctggggataagaagcagtcaagtcgtggggaggcagaagcatggaagcaacctggacagtgggaacaaatgcaccagggaattaaatatttattcctatatttagaggaaaagaaccctaggcatgggaccaaaacttcgacagtgctgtttttccttctttgaatttgctctaagggtgtgagtgtctttcagacagatggctgaaatgattgctaccatcacttgcatattgcacaatgaatttagtttcatggatttggttttatctaaagaaacttttatattatttttacataccactggcctactgatttacaaacttgtatcctattaccctggaacaaagacccagtaattgtcctggttatagaatgagacatcatctgggagaatataagggatatcctcagccaaaaacaagattatagtattggaaaaaatgctcctggagatggtgaggatgcacacattataatatgacagcccttcagtaatgatgccaggcttctctctcctatgcagcagtttccaaaacaatgctgcctgaaaacacatctccaaaagagagtctgtaggctagctttttgggttttaaccttaacttcccatttaagctcacagaaaaaaaaatatgacattaaatctccctgcctttatgggtacttactgttgcctgaatgatggaaagctctttcgaaaagatggttttctgcacttttgcttttcttcaccaatgggtctcagagattggcttctcttacgtatctatttgtagattcaaggaaccagttgactgttgcctgggatactgagattttaaagattccatcctggctcgcaacaggctaaaaattagaagggataagaaaaatatacacaaaatagatttgcctaagttgcatgagaaatacagaatcgtgcaataaaataatgaagagattctatttagttgggaaaaacaggcaagcattaatgaaaaagtagagttcagcaacaactttgaagaaagagtaaaattttaataggcagagaggggagccaatgaccaaagtgaaagggttgggaaagtagggatacgatgggggaacaatctgtagtctggattaattgaaggagactagtgttagagaggggcaaagaaaagtgatgccctaaaataatcagggcactttttgtggaaggctttgaacaccagtgtgaggcatctgaatcctctttggtaggcgactgggagccattgatggtgtttttgatagcactttggagaggttggtcttacatgtgttgaatagaaatggcaaaatagttatgagagacattacggagacacactaaacgcttggagatggagggtgagggaacaagagtgaagagtcacttttcagatgcagacagacctgcattttctatgtaacaaagacccagtaatgtagcaactggccgcttgaactgtggatggtctaaattgagatgtactgtaattgtaaaatatactctggatttctaaggtttttatattgaagaatgtaaatatcacattgcttacatgttgaaatgctaatatttagttcatacagcattacataaaatatatttaaaattaacttaacctgtttctttaaaaatgtttagtgtggacactagaaaatttaaaattatgtatgtggctcacattgtatttctatttggatggcggtcgtttagatttcggacaaatggaacaacggtcggccacttacagacaaagaaaaagaagaacatgaggtagggagagggatcatcaacttagtgtttcatattttagcttggagtgaaacattcaagtggaacgtcaataaagcagctgaaaatataagtctgggattaggagggaattgagtgggagaagcagttagaaagccagttgctaaatcttctagaactactgataattactcaaaaatactatatcattatgattctctgacaaataatttctttgggcatgctccttaaaattccatatggtatatatggacctccttgaccttccatgtgggccttctccttacaaaattctctctagtttccagtgcccatagatatggatgacttacaaggtgccaaagacttgtaatggagtgagagatgatggtgtggggtgcaggctgctgccacaattgtgaacaaactggtccctaggggttggtgacgtgagtgaatattgacactcagaacaaccacaactgttttgcagtgctcaggagggaacaacagaagcagtctttgctcttcacgattttataatctgatttgtggacataaaacaccatcagacagtgggatttttctttttcgatcccagtgtctagaactgtatgaccagcaatttaaacgctccattcatttttggtccaattctaatgtcatttttttttccattaaatgtcttgtactcttccaactggatatactctttttttcatttgggcccttatagcattttgtatctctctctctctctttttcattgtctgccttgtgttgaattatttcattacatacctctcctctcccctagactatatggcccttggatatggaggccacatattatcttgatctttcctgataatttgtctttaattcattcagccagtgctatgctgaatgaacaaaaattaaaatagctaccatttgttcagcatttactatatgtgaggttttgtaagtgtttaattgacttctcaccaa

SEQ ID NO: 1885563 - DNA, 4001 bp, Homo sapiens
ccatcctgtccctcggtgggacactctgtggcagagggacttagagtcaagagacttatagccaattaaatattccaggccagacaggaatgaacatggacaggcattcattatcccataatttttttttttgttttaaagagccaacaaacaaaaagccgaaggcgaggttacaaaactgaattatatttaacttctgtgtgttgagctactgcaatcttggttttagttacagacataaaacaattcactatataaagcataacattgttctgaaaaataaattttaaatatatatttatctgcacaactcataactaagagtattatactcaggaggcttggtcacgaggtatcataatcctcttagtaattattttctcttaattgtatgggaagcaggaaattccttatggttgaggtgaatgaaaaggtgctacataatagctcagaaaacaaagtcctttgttttactagccgtttcggtgtatttgtacccatctttgatttggagtgtctgaccttgatctacttctatccctcaaaaccagcccttacaatcttatgtgccaacctcttccatgatagtctctgggcctagagggagggggcttctatagccttaaacagcagggtatttgcagtgaaaaacagatcaggcccagtggaatgccaaatgagggaaatttgcatcttgtagccaagaaataattcatgattcaatctacactcaaaaacaaaagtcagggctgaaatctagtaaaaagtataatagttttactttgaaacaatttcttcctctctctagccctcctttcctattgaagagaaattatagtaagactaatttgtgtgcaaaataagttttaggctcattgtactttgcctgattatttgcataaattgcagcaagaattgattgccatataggctctttctaagttggcttttctgaaagtttacctaacaatatgttattctagttaaagccctggtaaaataaccagtgtctcaaataatcctgttttaaaagaaaagactcttactaaacttatgtaaataaatatattttcataaaatcagaatactcacggtttctgaattttggagaattcagagagaaaggtaaatttgctcacaaaaatatacttcgtccaattgctctaaactataaaaaacagaaaagaaaaagattttctagaattttccttggagcagcaccattccaaacaagatgtggtttgttcaccttggaactgctattcacatgctaagtagctcatcttagatgagagctgtttattaggcactgtagaatctagcagctcctcacacagttagttacttctagggaaaatggaggttccctgctcatgagaatttccttctgccatccctaggtagtaagattctatttaaaccatttttattttattatagaactctttggggcaccactgtttccattagcataagggtagcttcaattaacatttcatagcaaggcagtaaattctcctcaggtggatattctctagtccagaagttgtcattgggaagtgcttacagtcttttgtcatcagtcccaataaatgttccacaaagggctataaagtggaggatttttcctgattagcactccaacttttgccctatattctgtgggctcaggcaatcttactagttcctatttatttaccatgtccatattctctttgggaaatgcacaaggggagaggaaaagacacacacacaatacctttaaaagtaaacaaactttatcccatgtatatggcaatgcagatgtaataagcaaattatataataataaggaaatgatataataagcagattgacataataagcaaatcacaatgggaaggggagaagggaaaaggtttttacactcaccagactgtggaggattcaccaccagactggatagcaacagcctgggcttcagagtcagctactcctctgtccacagacgaggatcggtctcatgaagcttcggcgcagtctgggaccctagctctttttgtaacaagttgtttggcatgaggcccagtcacgagggcccttcatgactgggcttaaggaacacaaaaatgtcaacttgtttttgtgattgtctattgtttttcaataactaacatataggaatagattgaaatagagatttgtccgaaacagtgctggataaatgcctcaaggggctcacacaaccttttccgtgacttggtgaccagtgtttgtgtccatgttcaattgagttcaaatttaatatttaacttttcctccacagtccaatgaacagttctcataggatacatttacatgccttcggttttatggtactacctaggggaatcatcccccgtcagatacaatacctattttcgtagccatttatgtgaaggagtcacaactaacttacatgaaatctgtttaaacatctcaaatttcataactctattaacttatacatttttatgctttggtcccaggaccttttttttttctacccccagtccattttaccttttcccttgaaagaggatctggatccccagcagtgggttgagccagggaacttggtctcttttgtcaatctttatcataatttgccttagccttgcttcatgcaatattagcttattattataacctttgccttttgatatttcttaaatttccccaatttggggtaaatgcagaaaatgggtgtggggccttttaatgttagagaatgaacagggtgggtcataataaagccagtcccacagggctttcatatgaagcatattaactgcttcgtctggggtgctctacttggcatttatagggagagttaggcagcttccttcttagggtaaatagaccttacagtggcatttatctgggtcactggactggtcgttctctcaggaataacctcctgtgcatttggattacatatattcatcagtaattgtttaatagtaagctatgggtcttgcattaacttaaacaagcactttcattctgtagcatttaaaattaaagattgtgtccttaaagtagttatttttacaattcactatagtaaagatttctcaggaaactgattatatcaatctacaaaatggaacaattcccttacactctggttttaatagttacttggtcttgcccttctcctgcattgactaactcattggtaaccacaggtctaagaggtaagttttgttgccctggcttaatttttccttttgtgtgtagctttcaggctagtggcctgacctgagacagacccacatctgagcttggcccagccttaaggccaaacccagcactcttttactttcatttagctattgcagataacgataaccaagagattaaatattttgttttttcttactaatttgcatttctgtaattaattagttccgtgaactaatgccctgggactatgagtatgattcgtctctgaattccaccatagcttttacctttagtaattgaatgcagcccagctgcagctctttaagatgggtaaacacgtggccactcaataatcaagctttctcatcacccgcctttttatttttctctttacccatttagttttatttatactttctttttctttattttaaagcaactctgaaatggtctccaaactagaaaaaaaaattacattttccttagcaaaaccacatcattgtgtttttacaaacttcaccaaaaacaccttttactgtctattattttaactcttagtaacccaaattcccagtgaaaaaaattgaggttgtgtaatgtagcataatatgactttaagattttaaactactagagataattttgggactaaatttaccaaattaagcttaccaaagattaccaaggtcatgtgaattaaaaaggatctgagctagcttatatcagactgataggcactttcttttctttaaacaaattgattagagccctttcatatagtttggtagtgaaat

SEQ ID NO: 1885564 - DNA, 4001 bp, Homo sapiens
aattaagtacaagctctttatcagatatattatttgtaaatattttctcccagtttatgacttgtcttttcattcttgcaactgcatccttcacagagcaaaatattttaaaattttatttaaagtttaatttttcattatgttctttcatgagttatactgttaatgctgtactttaaaacacacagtcaagccctaggtaatgtagattgttgtcctatgttttcttctagatgcagaatttctttttcactctttttgctgtaagtttttatgtgttttgaccctatttgtgtaagtatatttttggaatctctattgtgttccagtgatcggtatttctatctttttgttaatagcaaacagttgtaattactgaagcttaataacatgctttaaaatcaggtaataggagtcttgcaaattttttttttgaaaaattgttctgattattttagtagctttacctttccacataaatattgaaccatcttatgaacagaacatctacaaaaagcttgctgagatttttatttatttatttatttttgagatagagtctagctctgtcacccacgctggagtgcagtgatgcgatctcggctcactgcaacctccgcctcccaggttcaagtgattctcctgcctcagcctcctgagtagctgggattacaggcacccaccaccatgcccagctgatttttatatttttagtagagatggggtttcattgtgtcggccagactgatctggaactcctgacctcacgatccgcccacctcagcctctcatcttgctgggatttttattgagattctgttaaattaatagatggaattgggaaaaattaacatctaaacattatggaatgttcaattctttctttttttcattgctgaatataaaaaaaaaatttaaacttaaaaaatactaattatagtagcataaacattgaagcacatagacataaatatagcaaaatatgttaacataagttttaaggaacagaaatcaacagagtatgttctctgaccatgtgggaattaaaatagaaatcaataacagaaagataattttgacaaacaccaaatttgtgaaaattactcaacatactctaaattgccatgagtcaaaaaaaaaaaaaaaaagaaatcagtattaggaaatacttagaaatgaatattagtaacaacatgaattttcaaaatgtgtgagatgaagctaaagtgtatactacaaggtaatttagtaactatgtttacaaatcaaaaatacatggaatttataatatatgtctcaaatttataaagttagaaaaaagaaactaaagataacagtggaagtcattaaaaatgaaaatgaacaaaaagtaaagaatgtcaacaaagtaaaaaggcaatacttgaaaagactagtaaaatttgtaatcctctggaaagagaaaagctacaaattaccaaaataagaaatgaaataatggatgtcatttctcagtactacattactaagaaaatgcaacaaataattcggtgtgaataagtttgacaacgtgaatggagtagaaaaaaattgttttgaattttttgaaagacgtaattggcacaagacatagaaaaatctcaacagtattattaatatttaaaaaaataaaattttaatgatggaatcttcttgcaaagataactctaggactgttttgcttcactagtggattctaggcatttaagaaaatgacaatatactaattatattagaaaacagaagaaaaagaagtatttaaaacttattttattaggcaagtatgtctttgattccaaaaccagacaaggatactcaaacagagaagtattgcagacaaatacctctcatgaataagaggcaaatatttcttttaaaaatatcagcaaattgaatgctacatataaaacatattacaagaaaatatggtttaccgcacctggctcggagggtcctacgcccacggagtctccctgattgctagcacagcagtctgagatcaaactgcaaggcggcagccaggctgggggaggggcgcccgccattgcccaggcttgattaggtaaacaaagcagctgggaagctcgaactgggtggagcccaccacagctcaaggaggcctgcctgcctctgtaggctccacctctgggggcagggcacagacaaacaaaaagacagcagtaacctctgcagacttaaatgtccctgtctgacagctttgaagggagcagtggttctcccagcacgcagctggagatctgagaacgggcagactgcctcctcaagtggttccctgacacctgacccccgagcagcctaactgggaggcaccccccagcaggggcacactgacacctcacacggcagggtattccaacagacctgcagctgagggtcctgtctgttagaaggaaaactaacaaacagaaaggacatccacaccaaaaacctatctgtacatcaccatcatcaaagaccaaaagtagataaaaccacaaagatggggaaaaaacagaacagaaaaactggaaactctaaaacgcagagtgcctctcctcctccaaaggaacgcagttcctcaccagcaacggaacaaagctggatggagaatgactttgacgagctgagagaagaaggcttcagacgatcaaattactctgagctacgggaggacattcaaaccaaaggcaaagaagttgaaaactttgaaaaaaatttagaagaatgtataactagaataaccaatacagagaagtgcttaaaggagctgatggagctgaaaaccaaggctcgagaactacgtgaagaatgcagaagcctgaggagccgatgtgatcaactggaagaaagggtatcagcaatggaagatgaaatgaatgaaatgaagcgagaagggaagcttagagaaaaaaagtataaaaagaaatgagcaaagcctccaagaaatatgggactatgtgaaaagaccaaatctacgtctgattggtgtacctgaaagtgatggggagaatggaaccaagttggaaaacactctgcaggatattatccaggagaacttccccaatctagcaaggcaggccaacgttcagatttaggaaatacagagaacgccacaaagatactcctcgagaagagcaactccaagacacataattgtcagattcaccaaagttgaaatgaaggaaaaatgttaagggcagccagagagaaaggtcgggttaccctcaaagggaagcccatcagactaacagcggatctctcggcagaaaccctacaagccagaagagagtgggggccaatattcaacattcttaaagaaaagaattttcaacccagaatttcatatccagccaaattaagcttcataagtgaaggagaaataaaatactttacagacaagcaaatgctgagagattttgtcaccaccaggcctgccctaaaagagctcctgaaggaaacgctaagcatggaaaggaacaaacggtaccagccgctgcaaaatcatgccaaaatgtaaagaccatcaagaacaggaagaaactgcatcaactaacgagcaaaataaccagctaacatcataatgacaggatcatattcacacataacaatattaactttaaatgtaaatggattaaatgctccaattaaaagacacagactggcaaactggataaagagtcaagacccatcagtgtgctgtattcaggaaacccatctcacgtgcagagacacacataggctcaaaataaaaggatggaggaagatctaccaagcaaatggaaaacaaaaaaaggcaggggttgcaatcctagtctctgataaaacagcctttaaaccaacaaagatcaaagagacaaagaaggccattacataatggtaaagggatcaattcaacaagaagagctaactatcctaaatatatatgcacccaatacaggagcacccagattcataaagcaagtcctgagtgacctacaaagaga

SEQ ID NO: 1885565 - DNA, 4001 bp, Homo sapiens
tttctagttctagatccctgaggaattgccacactgacttccacaatggttgaactagattcaatgccatccccatcaagctaccaatgactttcttcacagaattggaagaaactactttcaagttcatatggaaccaaaaaagagcctgcatcaccatgtcaatcctaagccaaaagaacaaagctggaggcatcacgctacctgacttcaaactatactacaaggctacagtaaccaaaacaccatggtactggtaccaaaacagagatatagaccaatggaacagaacagagccctcagaaataatgccgcatatctacaactatctgatctttgacaaacctgagggaaacaagcaatggggaaaggattccctatttaataaatggtgctgggaaaactggctagccatatgtggaaagctgaaactggatcccttccttacaccttacacaaaaattaattcaagatggattaaagacttaaatgttagacctaaaaccacaaaaaccctagaagaaaacctaggcgataccattcaggacataggcttgggcaaggacttcatgtctaaaacaccaaaagcaatggcaacaaaagccaaaattgacaaatgggatctcattaaactaaagagcttctgcacagcaaaagaaactaccatcagagtgaacaggcaacctgcagaatgggagaaaattttcgcaacctactcatctgacaaagggctaatatccagaatctacaatgaactccaacaaatttacaagaataaaacaaacaaccccatcgaaaagtggaccaaggatatgaacagacacttctcaaaagaagacatttatgcagccaaaagacacatgaaaaaatgctcatcatcactggccatcagagaaatgcaaatcaaaaccacaatgagatactatctcacaccagttagaatggcaatcattaaaaagtcaggaaacaacagatgctggagaggatgtggagaaataggaacacttttgcactgttggtgggactgtaaactgatacgtcctctttagcagcctgagttactgcatgaggtcacagcatccattcatgaagtcaaaggaaataacatcttccttcccagcaacagatcctcttcagtgctatggggcctaatttctgtgattagccaattataaatgggaatgctatttatagcacataaagtagtggtcactcctttatgtgttctctatatagagacaggaaaaaaaaaaagaaaagcttatttatttgacaaagactcctgttctctgctggacagtctgaaggtagtttcttaagatatggggaacatcatctctgttattccaaatataaattggattataagtataatataagttggattatattaatagctgcatcataaaacaataagcctgtctcccaatatcacacatctttaaataaaatttgcttccactttacaacaatgttaccaagtacaagaacccaatctggaaagtctacataccatatgattctaactataggacattctgaaaaaggcaaaactgtggagacaataaaaagagcaataattgccaggggttgggagggagagtggggaattgaaatgaaatatacaggcacagaggatttttatggcagtaaaagtattttgtatcatattgaaatgtagaatatatgtcattatacatttgtacaaacccataaaatgtaaaacatcaagaatgaaccccagtgtaaactatgtgatataggagttaagaggaaatgacttagggagttagggtatgggagtcctcggtaaggttttcctttttaatgaaaagcagccttaaaatcattttctaacaaagagcagcctgtaaaatcgagctgcagacacagataagcaagctggaagcttgcgcgggtgaatgccagcaggaaaaagctacctgaaacttgacacgtgcaaaatggcagttccatcttcccttctctttgcgagtcatgtgtacagtaaggagcagataaaatggtgctggccaagtggaaagctgatttgtttaataagattagggtggagtggccagccttccctgtgtgctatgtaaacgtcacaccgttccaaccaatctgtgagccctgtgtaactcagacaccgcctcctcaagcctgcctatgaaatccggtgcactccaccaccggccagtcttttcctctcagaagcccctctctcacgctagaaagagagttattttcctttgtctttcttttgcctattaaacctctgctcctaaactcctcctcgtgtgtatctgagtcctaaatcttctttgcacaagacaacgaaccccggctacttaccccagagaacagtgtcacttcacatgaactttgagaggtaaaaatgtgtcaatacatgttcatcaactgtaaaaagtggaccactgtggtgcaagatgttgatagtggaaggggctctgcatgtgtggggtcgggggaacacagaaactgtgtagtttccattcaatttttttgtgaacctaaaattgtttttaaaaataaagtctattagaaaaaaataagaaacatctggagtatttgatgcatccctagcatcaagctaattattgtacatcaacctaatgtgaaatattatgagctatgtagcaaaaatatagggaatgtcttacaacacagcaagtggagacctaaatgccaaggtttatataccttattattagagctatggaaatgatatacgaaaatggacatacattgagaatggacttttgaagtaaagtaaatatgggtatgtgggtcatttttattgctttaaatccctgtaactattgtactatgccacttagtataaatgcatttgcaaagaaggaccatgtcattgtaggactcattcagttgagactgcatggtaaaaaatattatcaattgcccctgtggatcactatcctctgctatattatagtacaataaataaaaattcaacaaatattaaaagaacatttaattgtgtgctgcaaaatatatcaggcaccatttatggaattgtgagcaaaacatggcatgtctctacttattggaggttacatacttatctgagggagtattaaaaacatgttgggtaataaaaattctccattgtatatattctacaaaagaaaagtacacaaaactttctttaataacaaataatgggtctgtttgatctagctaggacagtgagaaaaattctcgaaggagagatgagctgagttgacaggtgtgtcaaaatataggtggaaaagagaagggaaatagattcaacaaaaataataagccatgtaaaaggtttgggactagaaaaatctggcaaatagatgagactcaggtaagttgggtgtggctacagagggaaatgagatttgagaggtaaatgggcctaattaatacatgccttcaggaacatgatgaagcttattatcctaactgctacagaaagcccttgagggatttctggaaaaggagtgaaatgtttacatctaaataatgaaaagatcatgtttaatgaaagctgtaggagttgctattagagctagttcagtttcttagacaagagattgcaatatattcaaccaggctggtaatgacagaagaaaatgaacagatttaaaaggtaaactaaattcatccagtggactggatggatggatgaagggtgaaagaataagaaggccattaggatacaggtcagtttccttgacatgtcctagaaggattttccaaagtaatttttcatataccgctatcttcatgttctaatatctccttctttgcagcctatgctgttttctgaccactcaccatcccctgaacatggtatcctatcatatattttctttttcctgctcttaaaatattctatattttcactcaagattaactagtttaaattttacttcttctgtaacttttttttttttttaccatttctttcatagcaaacttagctg

SEQ ID NO: 1885566 - DNA, 4001 bp, Homo sapiens
atgagaacaaatggacacagaaaggggaacatcacacaccggggactgttgtggggtggggggaggggggagggatagcattaggagatataactaatgctaaatgatgagttaatgggtgcagcacaccaacatggcacatgtatacatatgtaacaaacctgcatgttatgcacatgtaccctaaaacttaaagtataataataaaattttttaaaaaaccattaaaaaataagaacttcataaaaattatgcatagcttaagaaatgttgaatatggaaagctctgttctcatggatgaaaattttaaaaggtaataaatggaaaatcctaaaaatacttagtaaaataaaattacattagaagtaaaaaaaaagaattctaaatactcaatataatcccttttgtaagtatgaataaaatataaatactataagacttaaagcttatggaatcctttctctttaccttattaaaagtcaagaatctctctgtagaatagttttaggtggcagaaatggttttcctaccattatattcctattatgtgtgcatctgtttcacagtattttttataaaaatactcactgtgatggccacagagaaccagcatagttgattgacaagcattatgggtatctgtggctaagctagtaagcaaaataaatccagacgtgaataaacctatttattcttcagtaaatgaaataactcaaaggtgaaatctttaacattataattcacatgctgctcagatgtctttctactttgtgtttttgccttggtactggactttatagtaacattgcgattgaatgtgtttgcattacaaacggggttatactagctagccaagtggagtcagccattcatacattgtcattgcatcaatcttccaatcaagcaacagacaatctgtctcccactgttccaagaaccatgctagatgtcttattagtcttaacattccatttctctctctcagaactgcatgtgctctccaattgtgttatagtctcctataccttgtcttgatttgctgtcagttgctttgctagataattgaggagttgcatacagtatttggatatcaaatctggaagagcatggaagccatagtttcgttaaaatgtaaacatgattagatttttagcaaatgtgtttggaactactaattagttagtttaatgttttaatatcgaataaaatgaggttggagccttgagtcaagaagattctatttgcctgatctaaatcaaatactttctttggttttcatttaataattccattacaactaacctcaaatgtcttgtagttacttttctgtaatcattctctatgtggtcttaattttttatatcaataatactataattggtggtaagctagtgtgataacttccctaaatatacatcagataatacaaagactgttaggaaaatgactattcctttgaagtatgagataatcttgttggcttattcataattaaattgccagtcaaaaaataaattagtcatgggcaagtcttattagtattaaatagcaacatagagaaaaatatacatgatagttcaaatactttctacattaaaaaataaaaggtaaattatcgttgttgacttaggtctcctcattcaactcccagcttagagtgcctaatctttagctcttcaaataatttgggattgcgttgtataatcacatatagaaaggtcattgcaaagtctttattcctttacaatatttacttgaattctgccctatgaaagagttatcatcaacttggattttaaagaaatggaaaacattttggaaagagtaagcacagtataggtacttactgggctaaagaggatcatttagatatgttgatgtaatggactgcaaactgaacagcatttactgcttgcagcacttttccttttacacatgtcatcaccagcttgaaattttatataaaaacaagattgttccatcaagatcaattgtttctgcattaagaaaatagaaacattttaaaagaagaatagagcaacataaaaatactataataaggattaaaaaacagaggaaaagcaagatttgaaatcagcttgtcttacaaagcaataacaatgcatacttacaaagctagaatgatggtaattattttgagggaaagaataacctctatttctggaggtgaaaaccattacagatttacatattagtttagtttgacctctaagaatctgtttttacagagctgactttgtaaatttactcaggttcatgtattcctcatttaccgtatttcacaattatacttaaagtttaagtataaatagagctccagggtcaattcagggtgagatgaaaatcgagctaatgaaaatgattacttcagcagagtttagtttgtatattgtttattcttttctgaatcaggaggtactgtggcagagtcctagtcagcaaaatttgggctctgcaatggtaaaactttcccttgtatcttaccacacattccaaagtttgattcaaatggggctgagctaattttcttagaaggcaatttctacatgtaagaaagccatatgaattcaaacatcagtctttggttatgttcaccttgccattagaaaaatctatttggagtctatgtttccgctacagtggcatagcataatatattgtctactattcataaattaatcataattcatgagattacataatcatagaaaagaaaatgaaagtagaagagctaaaataatttatttcaacaatcttaaaattttatttgaactctgatccttatataagcccaaggatatgattattcattatggtaaatgtaacaatcaccacttcacttctataattcttgttctacaatatccaatagccattaaacatgactatgtgacaatatcaaaatatttttgcattgattatttagtccaaccattctgttttgtaaaggaaggacctgaaaaccagaagaactgattttcctagtgtcacacatgtaatcctgatgttaaaatatgataagaacctgtgtctcttgatttctagatgaaaattcatttccctgttgtctctcaacagtgttttgagttcttagtatgcttgtagatttgacatttgaatttttcgccgggtaacacaaataagaaattctttaaaaacaataaagtgaattcttggtcttcgagctaattaagtctatgacagatagccagatagccagatagttgatcagaaaaaaacatctgtaaggctaacattgctcgaaaatataatgtttgattgaaggcccattaggttttgtgcctgtgatttcacttcatagttaaaaatgttatttgataataattgataaactacaaaaatatatctgtgtataattttcccaaattttatattttctcatataattcatatgcaaacatattcttagaaattttaaaacaaaatagtaaataaatgtataggatgttcctctgtgccagaaaatttaaaaatatatattagccatatatccaaaagctgccccagtgacaacagaattcccttttcttttcaaattagaagcacaacagcaccaataacatagtgaagaagtacagccccggcaagccagaggctgtaactttactattggttctgtgatactccagaagtaattccccacgtctttctggatttttttctgtattttcgtacaattgtgacttgttgctgaaataagggagcaatagggcaaacaatactgctctgttaccccatcagatacatattgccatactgtttaccccagactagaaaaaaatatgaaaacagaaagctgaatatacattgtttagaagttctaacttataaatatattgagtgtatatatagtacatatgtatatatacactatatatatacatgtttatatatgtatatatatacacacacatatatataaacatataaaaagagatattgcagacaagaagtgcaa

SEQ ID NO: 1885567 - DNA, 4001 bp, Homo sapiens
agcatagtacccaacagttagttttacaatccttatccccctcccaccagttctctctttttgctcccttctcctctgtcttgagtgtgttcccagagactcaaggagtcagaggttatatttgattgtgagtacggaggccttgtaaaaacacatgcacgcatatgtttgttgaagcagtattcacaagagcaaagacatggaatcaacctaaatgctcatcaacgatagactagataaagaaattgtggttcatatacaccatggaatactacgccacaaagaaagaacaagatcatgtcctctgcagggacttagttggagctagaggtcaaccttagcaaactaatgcaggaacagaaaaccaaacacgggaagttctcccttataagtgagagccaagtgatgagaacacatggacaagtggaggggaacaacacacactggggccttttggaaggtagagggtgggagcagggagaagaacaggaagaataactaacaggtagtaggcttaatacctgggtgatgaaataatctgtacaagaaacccccgtgactcgagtttacctatgtaacaaacctggacatgtaccctttaagttaaaataaaagttaaaaggaaaaagaaattcttattagtcatccagaagtgcctaaacaaccatactagaaatcaagtagcccttatccttgcttccagttgcatgtactcactcctatccctgctgcttccagttgcatgtacttactccagtcttgcaatttaagctgctgtttgatacattcactgtgtaggcgcatccctagataaccgattgcttgatttaaactgtgtttctgtctcaatataatctttactaaagcctctggaatcaacaattattcaagtaattttcaaaaaaaaaaatacaaccaatagccctgtagttagttcctttccacagttttgactttgcatatgttcaagtcagaatattctttttctcactgagcataatacaattgcataaaaaacatatttcgggccaggtgcggtggctcatgcctgtaatcccagcactttgggaggccaagacaggcagaccatttgaggtcaggagttcaagaccagcctggccaacatagtgaaaccccgtctccactaaaaatacaaaaattagttgggcgtggtggcgcaagcctgtaatcccagctattcgggaggctgaggcaggagaattgcttgaacccgggagacggaggttgcagtgagccaagactgcgccactgcactccatcctgggcgacagagtgagactccgtctcaaaacaaacaaacaaacaaacaaacaaacaaacatttcacagaggatcaatggataccattttgtaatcatttgtcttcttaaatgtcttctcctttttcatattcctggtttccatttttaagctaagtaaatctacacatgacttttaaaatatttattcgaacatacacctagacatttgttgatatatttgtatatcataacatggaaatggtgactatttctgctcatttttaaccttttcacattttaaggttttatttggtctcttaattgctttgcatgctatttaaaaggaggaaaatattaagaaaaaagtgtgtagctcaaagacagcttgaaatattaatcactctctgacttgaggaccccgtgagtaacgtcaaaactcatagtatcataaatagtcttattgtaatgtgaccataaatgttgcacacaaagtcatgagtcttgaataaggcaccctgtgaagaacgttcaaagacctaccatactctaagggtaagcaacaccagcgctagagttatgaacatctgtttggaacagttttccagtaagaactgttccttttgagaggaaaaatctgaagaaaacatcaagtgcttaccattacatcatgctacagattttctacacctccgtaaggaacaaggttatatgagcttacctccccctgcctgcataaactgtcagtgaaactgccctcatgtcatgcacaacggacattcctggaggttctacattgaaagaaggacaactcagccagacccgtgctggcaactgtatttaaattatatctttaaatacacttttaaaattaaatctgtaccctgtaggcccccactaagcaatctgtgttggaggaaggaggaagcaaaacaagtcaaacaaaaataaaaataaataattctaaagcatatatgatccacaaagcagtttaaaaggaaaacggttttcagaaccattaatcacgttatgtagggcttgcttttatcccttgcaaaattccaaagggagaatttctccagggcaaagtgtaactaacaaaagaagcattcgacaagaaagcaatctccctttcagtggcatattgatactaggagagaaaagccacctaatcagcactataagtagggtagagagtgggagaggttagcagcaaagacacaggatttgaagttctgattctaacactcaattatgagcccaccggagtcactcaaattggcttaagctcactttcattatcttagaaacaaacaaacaaacagacaaaaagccaggaccactatgacacctgagcagtaggactattttattttgagagccaaatgacatatgctcatagaagtgcttggtgaaatgtgaaacactgtgaaatgattgctttgtagtttttaaaaacaattgcaggataaatgaatgaaagtttttgaacaaaaacaaaacctgcattttgtattcaggtttcacttaaataaactgttaaatattaggtattttaaatagataaaaatattaaataaaatattgagatattttataggatttcccaaattactaaaaagccatctgcttttccagtattcccttaaatgacctattataacccaaaataatttttttttttattttacacagtgtcaaaaaccggggcagcacatgatacaaatttctaaattctgttctacaaaattgccatccttctccttcactcagcactgtttgataacccaaaatcagaaaggactcaagatgagatagggtgggaatccaacccacactgccttctaagcacgagattttaatcagcaacactcatttttaatacaatagagaaatacttagaagaaactaagaataattattgcataacagggtgactacagttaatgacaatatgctacattcttgacatttgctaaaggagtagattttaattgttctcaccacaaaaaaacagtaagagtgtaagataatgtatatgttaattaccttgatttagccattttacaatgtatacatatttcaaaaaatgtacatgataatatatttaagttttatttgtcaattaaaaattaagtacaggatattaccacttcctatgtcaaggctctgtcacatgtaagcagattcctttcgaagtatgtttgctctcatgagctcatgtatattgctattctaaaaacagatgagctcttttaataatctgtcaaatttattttaacacaataactaggccttcagggtgcatctgacttgacccttttctgtacagtaagtcctcaattaacatcacccagagaatcttagaaattgtgactttaagcaaaagatgtacagcaagtcctcaaataacatcattttcttcaacatcatttctttataaggttgatgaaaaaaatggtattgttatgtgtcatttcacttaaaatgtggcagtttccaagaacccatcggggacgttagctgaggacttcctgtagttttgtctgatctgtcccacgttctagccaccagccacaagtagctctttatatttaaatttaaattaattaaaatccaattaaaaattcagtatctgagtcacattatcaatattttcagtgctaaatagccagccacatggctattgctaccatattaattactgattcataagataccataccatctaatgctaccata

SEQ ID NO: 1885568 - DNA, 4001 bp, Homo sapiens
ggtttggatatgaatgttcctgtcattccgctggcgagcatagtacccaacagttagttttacaatccttatccccctcccaccagttctctctttttgctcccttctcctctgtcttgagtgtgttcccagagactcaaggagtcagaggttatatttgattgtgagtacggaggccttgtaaaaacacatgcacgcatatgtttgttgaagcagtattcacaagagcaaagacatggaatcaacctaaatgctcatcaacgatagactagataaagaaattgtggttcatatacaccatggaatactacgccacaaagaaagaacaagatcatgtcctctgcagggacttagttggagctagaggtcaaccttagcaaactaatgcaggaacagaaaaccaaacacgggaagttctcccttataagtgagagccaagtgatgagaacacatggacaagtggaggggaacaacacacactggggccttttggaaggtagagggtgggagcagggagaagaacaggaagaataactaacaggtagtaggcttaatacctgggtgatgaaataatctgtacaagaaacccccgtgactcgagtttacctatgtaacaaacctggacatgtaccctttaagttaaaataaaagttaaaaggaaaaagaaattcttattagtcatccagaagtgcctaaacaaccatactagaaatcaagtagcccttatccttgcttccagttgcatgtactcactcctatccctgctgcttccagttgcatgtacttactccagtcttgcaatttaagctgctgtttgatacattcactgtgtaggcgcatccctagataaccgattgcttgatttaaactgtgtttctgtctcaatataatctttactaaagcctctggaatcaacaattattcaagtaattttcaaaaaaaaaaatacaaccaatagccctgtagttagttcctttccacagttttgactttgcatatgttcaagtcagaatattctttttctcactgagcataatacaattgcataaaaaacatatttcgggccaggtgcggtggctcatgcctgtaatcccagcactttgggaggccaagacaggcagaccatttgaggtcaggagttcaagaccagcctggccaacatagtgaaaccccgtctccactaaaaatacaaaaattagttgggcgtggtggcgcaagcctgtaatcccagctattcgggaggctgaggcaggagaattgcttgaacccgggagacggaggttgcagtgagccaagactgcgccactgcactccatcctgggcgacagagtgagactccgtctcaaaacaaacaaacaaacaaacaaacaaacaaacatttcacagaggatcaatggataccattttgtaatcatttgtcttcttaaatgtcttctcctttttcatattcctggtttccatttttaagctaagtaaatctacacatgacttttaaaatatttattcgaacatacacctagacatttgttgatatatttgtatatcataacatggaaatggtgactatttctgctcatttttaaccttttcacattttaaggttttatttggtctcttaattgctttgcatgctatttaaaaggaggaaaatattaagaaaaaagtgtgtagctcaaagacagcttgaaatattaatcactctctgacttgaggaccccgtgagtaacgtcaaaactcatagtatcataaatagtcttattgtaatgtgaccataaatgttgcacacaaagtcatgagtcttgaataaggcaccctgtgaagaacgttcaaagacctaccatactctaagggtaagcaacaccagcgctagagttatgaacatctgtttggaacagttttccagtaagaactgttccttttgagaggaaaaatctgaagaaaacatcaagtgcttaccattacatcatgctacagattttctacacctccgtaaggaacaaggttatatgagcttacctccccctgcctgcataaactgtcagtgaaactgccctcatgtcatgcacaacggacattcctggaggttctacattgaaagaaggacaactcagccagacccgtgctggcaactgtatttaaattatatctttaaatacacttttaaaattaaatctgtaccctgtaggcccccactaagcaatctgtgttggaggaaggaggaagcaaaacaagtcaaacaaaaataaaaataaataattctaaagcatatatgatccacaaagcagtttaaaaggaaaacggttttcagaaccattaatcacgttatgtagggcttgcttttatcccttgcaaaattccaaagggagaatttctccagggcaaagtgtaactaacaaaagaagcattcgacaagaaagcaatctccctttcagtggcatattgatactaggagagaaaagccacctaatcagcactataagtagggtagagagtgggagaggttagcagcaaagacacaggatttgaagttctgattctaacactcaattatgagcccaccggagtcactcaaattggcttaagctcactttcattatcttagaaacaaacaaacaaacagacaaaaagccaggaccactatgacacctgagcagtaggactattttattttgagagccaaatgacatatgctcatagaagtgcttggtgaaatgtgaaacactgtgaaatgattgctttgtagtttttaaaaacaattgcaggataaatgaatgaaagtttttgaacaaaaacaaaacctgcattttgtattcaggtttcacttaaataaactgttaaatattaggtattttaaatagataaaaatattaaataaaatattgagatattttataggatttcccaaattactaaaaagccatctgcttttccagtattcccttaaatgacctattataacccaaaataatttttttttttattttacacagtgtcaaaaaccggggcagcacatgatacaaatttctaaattctgttctacaaaattgccatccttctccttcactcagcactgtttgataacccaaaatcagaaaggactcaagatgagatagggtgggaatccaacccacactgccttctaagcacgagattttaatcagcaacactcatttttaatacaatagagaaatacttagaagaaactaagaataattattgcataacagggtgactacagttaatgacaatatgctacattcttgacatttgctaaaggagtagattttaattgttctcaccacaaaaaaacagtaagagtgtaagataatgtatatgttaattaccttgatttagccattttacaatgtatacatatttcaaaaaatgtacatgataatatatttaagttttatttgtcaattaaaaattaagtacaggatattaccacttcctatgtcaaggctctgtcacatgtaagcagattcctttcgaagtatgtttgctctcatgagctcatgtatattgctattctaaaaacagatgagctcttttaataatctgtcaaatttattttaacacaataactaggccttcagggtgcatctgacttgacccttttctgtacagtaagtcctcaattaacatcacccagagaatcttagaaattgtgactttaagcaaaagatgtacagcaagtcctcaaataacatcattttcttcaacatcatttctttataaggttgatgaaaaaaatggtattgttatgtgtcatttcacttaaaatgtggcagtttccaagaacccatcggggacgttagctgaggacttcctgtagttttgtctgatctgtcccacgttctagccaccagccacaagtagctctttatatttaaatttaaattaattaaaatccaattaaaaattcagtatctgagtcacattatcaatattttcagtgctaaatagccagccacatggctattgctaccatattaattact

SEQ ID NO: 1885569 - DNA, 4001 bp, Homo sapiens
cttacagtcagcatttaggaaaaatagattaaattccatacatagacttataatcatttatcatatttgtattccttttacattttcatatttttaaaatcctgtgccatatttttatcacaatagtgtatcacaaagctgaacacacctcctcttgaacatttatcactagtggccttgaatcttatgtgatatcataatcagaatttctacttcatagtgactgatagagagcagcagtctcagctgtaaaaatagagtccccagggaatactgatagcctttttccaataaagcgaaatctatttgcaataataggtatatgcaaagacctcctgaaattacaggagcaaactccttccgcatctcgacctaattaagatccgttactcaacagtgatcagtcagattttactgtaagaaggaagaaaacaaggatcctgctagaacaacatggaaacaggtaggctatatgtatggtggttacagtcacaggcatttgggttcaaattcttgttctgcttttagcctctctagctttccatctcttattgtacaatggggaaaataacatctacttcataatattgtggggaaattaagtaaaatatcagatgtggagttctcagcatatagtatcctctcaacatacccatggcagctatcactgatgaattcccagaaacctgggacaataaggaagtctattaaaagagccttagcgaccagcatcttcagggagggatgggggtcaaggagccagagggaggtgagagaggatgaagggagagtgaccattttctctaaagtagtttttattaaattttaacagcttccaacccggggttcagaactctaggcaatgacctagtagtcagtaaggcaggaataaattgtgataagcctggttctattatggaaaacattctcagcaaactgcaggggagagatagcaggaagatccatggctaatgcactgcttttaaagaactttcataactcactggacacatagggatgttatgtgcttttgcctagtcatgaacagaaaataaacacagttacttacttgtcaggcagaaaacttgattaatttttttaagcagtaagcagaatcataggaaatcatttccttcatgcaagcctgcaataaacgggaggtgcatttgccacgaattcattttggtgttcacatggtaaaaaaatactgccacatgtggaatgagccaagtgggctttagaactgaaggggaccagcccctccacacctgtgggtgtttttcgtcaggtgggacaagagactgagaaaagaaataagacacagagataaagtatggagaaagaacagtgggcccaggggaccggcactcagcatacggaggacgggcgccagccctggtctcttgagtttcctcagtattaattgatcactatctctaccatctcggagagggggatgtggcaggacaatagggtaacagtggggagagggtcagcaggaaaacatgtgagcaaaggtctctgtgtcataaataagtttaaggaaaggtgctgtgccttgatgtgcatgtacacaaacatctcggtgcattaaagagcagtattgccgccagcatatctcacctccagccataaggcggtttcctcctatctcagtaaatagaacgtataatcgggtttgacattgagacatttcattcccagggataagcaggagacagatgccttcctcttatctcaactgcaaagaggccttcctctttcactaatcctcctcagcacagaccctttacgggtgtctggctgggggacggtcaggtctttcccttcccacaaggccatatctcaggctatcacatggggagaaaccttggacaatacctggctttcctgggcagaggtccctgcagccttccgcagtgtatcgtgtccctgggtactcaagattagagaatggcgatgacttttaccaagcatactgccttcaagcacttgtttaacaaagcacattctgcacagccctaaatccattaaaccttgagtcaacacagcacatgtctctgcaaacacagggttggggctagggttacagattaacagcatctcaaggcagaagaatttctcttagtacagaacaaaatggagtctcttatgtctacttctttctacatagacacagtaacagtctgatctctctttcttttccccacgtagaactctgaaataaacattgcaaaaaatcatacccataaaaatattaatctgtatttcttatgctcatattttaaggttgaaaagatcaatataacattagtactttatcactctcaaatacttttatatccaatatttcatttgcactgaataacagataccattaggtgggcaggggaaatatcctcctattaaagacaaggacacagtctctgagaggttatctcatttgttaaaggtcacgtagcctgtaaatgaaagaacaaaagttcaaacaaacctcatgcctccaaatcaagaggaagcctcaagggaccacactgatactgctgttagatatgttcaccgtctcatgtattttgatgtttacacaggccatttttaacatacatgtttagcagtcaatgccactggaaatcagaccagggcatgtgtttagacatcttatgggtatttccctgaatgagcccatgaatagagtgtaaaaatagataagaaactgacttcctgtttgtttctctgctcccactttttgtccttcttccgttgtgccctgggaggctgatcttaggacctacaacaaagagatttctcactggcttcctggtggttcattcaatagggaattcctgcagcaagttggagggagggaggagaagcaggtatggatttttgtttctttccctagttctcattttaatgcctggccataggctggctatgcctgggggtctgcagacagacttctgtgcctccagctttggtaaccaccccctctgcttgccctctcagagccaggggcctcagggtgcccagatgttcttatccccagttcacgcatcatccttgtggcttccttgtaccctgcccatcctttgtaaatatctctttactaaactttcctcagaatacctgaatttgagtgatctctccattgcctgccaggatccttcctgacattaccttccagaatgaatatttctgaaggagtctattctctatgcaaagaaactcaatttctcaccatgtataaaaggaaataaacatcgttttcaatggaaaataatgtaggggacatgtctggtgtcacaggtgtgtttggaccacacagcccagaaagatgtagtcatagaaacagactcttttctctcctttgtttggtaacagcatcctgattttcccttgagaaacgatcctctcttctccttacagtctctgttattatggtgggaccgaccctactctccagggcaggcatggggccctgccctggcttatgagaaaactatacacccctaaccacagtgatcagtttaaagatgggaaggaacaagggcaggggaacctttacattttccagagataccaagaaagaggctctcttcccgctggattttctaatctgtggaacctgggcctggagatgctgttaaccatctttgacatcatataaaagccaaaataaaatagcaaaaggtggaactgagagatggtgaaaatgtcctcctggccacagaggttgagcatttgaattcagccatacctgaaagtgtccctgcacttttctcccctggaccaataatctttgtgtgtgtgtgtgtgtgtgtgtgtgtgtgtgatctgttgtcacctttatccagaaaaatctacagtaaagaaaaaatttatgaactgggagacttggaattgggcttagatccctcacctataaaatgagggttttgtactggatgttcttcaaatgcctttctagagctaaacatggacaaggatcaacagtagccaat

SEQ ID NO: 1885570 - DNA, 4001 bp, Homo sapiens
tttggcttgggttttttttctgtcaagttttgctatttccaccaaagtgaatacagaaaaactcccttgctggcagcaccgcgacgaggcttctggattggagaagggcgcgctgcctcacatgtgcactagggggcagagctgccgcggggctgctgtaactccaagaacaaccagagggcaaggggaaggatcccagccccttcctcaaatcaggcggctgcaggacgggagggcagttggaaagcagtcgtcttcttagtccgagttgccttcatattcagcctagaagttagggaagaaacagcgtgtaagaggaagttgggtgagactgaaaggggaaagagaaagagagaagcattgaagaggcactcttccccacccccagcaaggaaccctccatgtgccatgaaaagacttccaaacagcagaaaagggttagggctactcctgcctcctgctgtaatcttggctgagaaaagtttaatgcaaggcttgggtaactatgaaaagtgaccaactgctagactaagactggtttcagaacagccgactcctgttccctggacaggggtgaccattccagctgctctaaggaggaatgcttgaggctttaggaagtacacaattcttggccatcccccccaggccctggtgtcatggtgtgggctgcgtgtggcagcagacgtgacaatggcgttctttaagagccctgaagtcaatatttagcctaaatgtacaacccaccagctgagccaggcaacagggttctgaagcacaggaaattagaagcacctaggcgatgtggaacactatttgaagctagatatcctgacttttatcagtttctaactagctgtgcaagtttggatggtcgaaccaacttctctgagctttaatttccctgttggcgaaataggttaaattagattaaaagtctccgatgtgacttccagctctgaaactctggaaaacacacactccttcagccagaggaactggggaatctagggggcagggatgggggtgggaggatggtgacaggcgtcttgaaggattaaccccacgcttctcctcgcaattgcaatcggctccccagcagcggccactgcggcactgcctgccccacccccgccctctgggcccggcggtacacacccacggctccctcagagacttctggaatctcgctggatttctcccaggaatgcttattgccctttagatctgcaaatcgctttacatcagcaaccctgccgcgcgattattaatcatctcaatattctcccccatcccctaccctccccctcgcccggcctggaagaggaattgcaggggtccggatttatgaaggtgattcgtattattcattcaataatcagttaactaaagttcattaagcgcctaataggagcaaggtgcagagacacacaaatccaatcaccacagggggcagaactgtagggggtcgatgctcaaagaacttcactgatattccagttatgtcctggggagggggtggttagagggtgatggaaaagctcccctcacaagcctgatgacagtgctgcaaccattatggaccacccccacggttcgttttatcatgccaggaaaaggaaaatggccttcccaaggtcacttatcccccgaggggcaacactgaccccagaaccgccgtcttcaaagctttccactgtgccatgaaggaaaattttgagttgaagcctataaaatacagcgttgggcgagagatggcatgatttccgggcacagagtgagaaaatcgtgatcccagatcacccacccacaacaaacgagaccgccccaaatcttgactgcagctacaaccagcagacgcacaggaatgctggaaacagctcattcatccatcgcggcgccctctctctgggcccccagcgcccctgcccttgcctccgcctgggtgggtcccgggacaggaggcgggggtctcgtggctcggagccttcgcccagcattccaggggcggggcagggaccgggggcggggcgcggcgggagtcccgcccacagcctaccccgggccggcggcgcagtggctgagccaaatatgggcagagcggaagcggcgggccggcgtcacggcgccgggtgggggccgcgctgcggggcggtgacgggagtcgctgacggcgcctacgtgtcaccgtggaaaccaaacagtaaacagaggactcgcgagctcctggcaccgtctggccctgcgacctgccctggagcaaagggccggaagctgggaagggccaggagaaaccttggcctggccgacgaggacaggggcgcggcaagggtgtagagagggcggtggaggggacgctgagagagcactcccaaacgtccctccctgaggtccctggaagccggctctccctctgcccacgggccagcaggggctggtcaggagcggaaggaggccctcctgtcccttctttttcttttcctttgtttttttttttttttttttttttttttttgagatggagtcacgctctatcgcccaggctggagtgcactggcgcgatctctgctcactgcaacctctgcctcccggttcaagcgattctcccgccccaggctcccaagtagctggaactacaggcgcgcgccaccgtacccggctaattttttacatttttagtagagacaggatttcaccacgttggccaggttggtctccaactcctgacctcaggtgatccgcccgcctcggcctcccaaagtgctgggattaccgcgcccggcctctcctgtcccttctgagggcctccgtgcctgcaaggttgttgcggatactgattttgctttgtttttcctttctaatggctaagagttcaggcattgaagccacactgcctggactctaattccagcgctgccactccagttggatgatcttgagcagacctctgcgccccagactatattattatctacaaaaataaggataatagcaggacctacctttaagagtagatgaggacttttaaaatgagtgtgtgtgtgtgtgtgtgtgtgtgtgtgtgtgtgtgtgtttggaacagtgtcaagcatgttgtgagccccaagttagtgttaagtgtttatttttattcccaggcagcacaagagaaacttacgtagtattagtagtgcatctcctaaatctactactgacgtaatgttttttttctcgagtcttctttagatttaaaataaaagggggccgggcgctgtggcccacgcctgtaatcccagcactttgggaggccaaggcaggaggatcacttgaacctaggagttctagaccagcctgggcaacataaggagaccccgactctacaaaaataaaaaaaaatagctgggcatggtggtgcacacctgtgatcccagctacttgggaggctgaggtgggaagatcttgggccagggcagtcaaggctgcagtgagccttgattgcagtcactgcactccagcctgagtgacagggagaccctctctcaaaaataaataagcaaaaggaattatctattttaaagataatattcaaatctagtaaaaatatttagttattaactaaaatgtgcatttgtcaaataaaaacatggcaaaacactgtatcacactgcttcgcaattttaaattttaaacacgaaaactccaaatggttacatggaacagaagcaactcaaattcagtcttcacagtcattgtgttatctctgttttttaagtaattttttaaaatgaagcgtacatattacattattcaaactcaatagtaatcccagcaactgtttaggacttaaaacaaccaaagattttttcaggaagaagtactttgtcactgacaacattagaattgccagctcatagtgtttatttaaaaggcagactgcccaaagacctgaaaggcccagaggtgttctaggtcccgacgcggctgctggaagccacctttggtgagtgtgcccagtgctggcc

SEQ ID NO: 1885571 - DNA, 4001 bp, Homo sapiens
tgttctctctctcatcccacactatcttcaaagagagccaggccttggagaacggagggaagtccaagttcccctttggcttctgactcccagtgtcccctttctgtgccctttgctcaccctctttccaggatctgcctcctccatgcttctccacccatagcatcactgcctattcctaggaaggatttggataccagtcatgtgtatcttcagcagcctcatggcatgatgttttggaacacacatgcacttgggaacttagtagcttgggttgaaatctgggccctgttccttacatgcaactttgaatatgttaacaaaagtctccatgggcaagtttcctcaatctgtaaattggggctaacagtatatatcatgtgattgtgaggattaaatgagtaatgtatgtaaatactttggacagtgcctggcacttgaggagttttataaaaattaggtattactaccatatgaatacaaatgaatgtgctgtacctcaataaggagatcggtgagtaggagaggcccccttccgtgccatggcaagctcaatcaagggccaccatggggtgaccaggctgtgggaatggccagatccatgcgtgctgccatcagcatggccaggtgaacgttggtgatgaccagaaaaggctgagccaaatgctcaaatcagcacagtgggcttgagactttgggagccactgtggagaagaagagcacagttgagatagggaatggaaggtaggttctgcacaggcaggcgtgatgtcattcctcctgtcactgggctgcagggtgagcatcaagccagccatgcaggagaacagaaagtgcaccctgctgtagaggggtgtgggggtgtgtgcatggccaaatagaagacgtgttgcttccctaggaacctgctagcggactggtaggagggaccgcagtgtgtgaagcactgattgccaataaaaaccatttcgttgtcacctccctccatatcctgtgcccttgttctggtcctcaatgcaattcataggcttttctttcccctcccaggaaaggtccctgggcaaagcctgtgaccacagccacacctgtaggtgtgtgaattaccgtcttctatgtgtcttctttgctttctctaaaagggagggatggaaagcttttctttttaatttttatttttttgacagggactcactctgtctcctagactggagtgcagtggtgtcatcatagctcactgcagtctctgcctcctggctcaaacgatcctcacacctcagcctcctaagtagttggcactgataggtacatgactgccatgcccagctttttttttttttttgtagagatgaggtttctccatgttgcccaggctagttctgacttttatgaaagacacagtatcattacccagcaggatgacagatgttagagatccaggacctcctcctggtgctccctggctcagtggtggggctatcttcccaagggagaagtggcagatggcacacagggttcccccgctcaaggcttttggggcaccgttcatcctggggcatcactcacatctgcagtcccaggagttgcacagggtgcagatttgcccggggaccccagcctcaattgggctcaaagggactctgcctcaggatcccttcctccctgttcttggctgtcttttgtgaagagctgtgggtgggggaaggtgaccgtggggactgagagcaatcaaattgaaatgcagggctaagagaagccattgctttgggcagaaagagaaaattcatggcagagggaagagcaggtcccaagcttccccaccaccccccatgtccccgctctcacctcaagcttcagagggcaggatcctgccttggagatgatgtaccaacacagctacctccccaccagttcattaggaagacaaatgcctgagccaaattccttaggatttgccaagaaccaattccttaggattctttttctggcaacttccatagcattgccaagctaatggagggatcccagggatatatctgatgcctggagcaacaggaaatgcgggagcccacaagacgatcagtcaggtgtgtgcacctagcacagtggcaatgcccagtgtcctgatacagacctttgtagttcccttgggctcaggaggaaccataatgccaaatgacacagtcacatggaagggcagggctgcagccacagtgactcagcaggaaaagagttagttccccagaaggatctagcttgaggaatatctgaggccagagtgtagcggttggtctgtttgcttttacattctgcaacccatttattgataaaactgttgtgtttttcaatgttaagtaaaatgctatgcaaaagtatcctcaagccaagtcccctagctccaggggtgattatcaaaataatgccagaaattaatgtttttatgcaaggatgtcgaggaggtcctggagtccaggggaaggggccttgggtggttcagggtagtgccatttaccagcctggaggaaaagcagtttaatattttcaacaacctatattgatacacatgtgttggctgaatgtcagccctgcctagccctcacctcaaactgaccctcacctcaaactgaagctttattgcataagcattgtggtacttactcttgcctgaatattgaagaaaccccattcctcatctccaaatccctcatatggctgtttctccaatgtgagtttcagaagactctgaagtgtgagaaatctctctgctttgaccagtcttttgggcaaggcctcatgtgtcaataagggtgtgtctccttcctttccagctcagtcccaactattttctttcatataacacgtactgtccagtggaacttcttgctctttcttttcacacacaccctaagcattcatgtctgtaagcctttgctcctgcagtttcctctacccgggtgcctttttctcttctctccttgtgtccaactcatggtcatcctttaaggcctttgcaaatgccaccttttccaggaaagtctccaactattcctctcttcataaatgatctctctctgtcctgtgacatcttaaaacaattttttaaaacttcagtatggcactttagaattttgtcatcatcattactgacatcatcaacatcatcattatttggctggattcattgagaatctactatgcgccatgaaaatattctgtgctctacagtctcatttgcttttctgtcttgtaaaaataattatgtatgtatgtatgcatgttttcttcctttctagcatacagtaataaagcaaatggaatttggaatcagatttgggtttggacccgagttccattatttggttgtaggactttaggcaaattactcaggcttcctaaacttcagctttcttgttggtaaaacactgataataacacttacctcataaagggtaattgtattacatcaaataataataataattgccagcatttgttcagtgcatattatatgctgggcagtgctccaagtaccaattctgtattatttaataatttaaatcctcacagtaaccctatgaaataactaatagtacccttactgtacggagggagaatctaaggcaaagaagccagtcagtggaaagctagaataagaattttgactttagaatcctcacttttttttttttttttaactgagtctcactctattgcccaggctggagtgcagtggcactacctcagctcactgcaacctctgcctcccaggttcaagcaattctcctgcctcagcctcccgagtagctgggactacaggcacccgccaccatgcctggctaatttttgtagagatggggtttcaccatttggccaggctggtctcaaactcctgacctcaagtgatctgcccacctcggcttcccaaagtgctggaattagaggcgtgagccaccacgcctggccagaatcctcccttttaatcattaccaacaaatgcctctgta

SEQ ID NO: 1885572 - DNA, 4001 bp, Homo sapiens
ctcctcctcagcctggtgactggagtaaacaatatcatatttttctagagcaagaagggagaattttgaatgttctccccacaaaaaaaaaaaaaaaaaaaatgcctggacgagcaaatatagatcctaagtaccctgatttgatcattacccaacctatatgtatgaaaatgtacccctaattatggacctttatgttgtgaaaaaaagttaatagaaataaataggtattgctaaaaatcacagggaaccacaaaagcaatgaatatctaaaggaatcctcagaaatacaaagtgaagacccacaatcctcaatatcaaattacactgccaagttgtagttatacagctgatatatgatacttgcataaactatggacaaaaacagggagaacaaaaacatgatcaacacaaatatggacacagtcaactgactttgataaagaacactgcaatgtggaaggcagagaatgagtacctttgagaaaaatgatattcagatgcagaagtgagaaataggaccttattttacacgatgtatgaaaatgaacaccccctcccccaaattgaaggcaaaacaaaagaccataaaccacaaaatgtttttaactaaaacacaggatgagcatatattttgggtcacttgaatctctgctcacctttgcaaagaggaaaataaacaaacaccctagaagaaaaacctcattgacaattaaatgctttgtcactgatatatattttcttatatgggtgacaaaaattacatgcatgaaacgcaaaaataaatatatgggactatgtcaacatgaaaagtttctgcacatcaaagaaaactactttccaaattaaaaagcatcctatagattaggcaaaaatttcaggcaatcatgtaattcacgaggagttgtcatctaacatgtacacaaaaaacactacaaagtagcaaaagcatccaatctaatattttgcaaagaacctgaacagacaattctgcacagccataaaatcgaacaacaaataagagataaggtcctcaaaataaactattcattagaaaactgtaattcaaaaccacacacagataatctcacacttattgaatattcctagattttttatttaaaaaataagaggggctgggaatggtgtctcatgcctgtaatctctgcactttgcgaggccgaggcaggtggatcacctgaggtcaggagtttgagaccagcctgaccaatatcgtgaaaccccatctctactaaaaatacaaaaattagctgggcatggtggcggcgcctgtagtcccagctactccggaggccgagacaggagacttgtttaaaaccaggcagaggctgcagtctgccgagatggcgccactgcactccagcctggaagacagagcaagactccatctcaaaacaaaaacaaaacaaaccccaaaccaaaaataataggaatgcgggtatggttttggagaaagggaaactcatacactgtaggtggaaatgaaaattaggatacacaccatggaaaacagctaaatagctggagactcctcaaagaactgaaactacagatgtcccctgctctagcgaggtctctttttaaaggtgctgaggcatcaaaaataatcctagactccagctcagaggcccctgaggctcggagggacccaggtccggcgtttcaccgccagctctgggccagggcgctcctatatgctggacgcgggtcggacattggcatagccttcccggccggggtgcggacgctgcagtagccaggaccccacaaccgcccccacgcggaggactcgggcccagatgcccacgaagaagtgaaagcacgaaaacagggagaggcagggaaggagccgggagggttcccggtggggtccacgcccccgccacttaccgcggagacctgcctcctactccaccatcacatggaacccaccactgcttctccgaagctcgctctgaccacgccgctgctgctgcaggggcctcgcaggaagtgcagtctcagcttccgtagggacacgcacgctggcagcatccctcgtgccaggttgaagctccaccccctcttaaagggacgcggctcggacttgccagaagcagctttgggtggcaacacaggctgagcctctgcccagccccagggggcgacgaaagacccctggtctctcatcctccccagctttcgggccctagaagtcgcagggacgctccctgtgaccccctccccgagatcggctccctttgcctagggagcacccgggacctgcccctgccctcctctggacctcagtttcaccatccgcaaaggaagcagcctcgctagagctctggggttcctcaagcttggcgtctcaggatccagggtgtgctcccctgcccctctgcagagggggtccagagaaccacagaaagctgggggctggagggacagtccggagggcagcagggcctccccggcctcactgtccgcatctgtcctgtgggagcccgggggcctcgctatggcccagacacccacagcctcaccagggctgcctgggtcaccgggctccccaggaggcaggcaggggccctggggtccagcgctgcccccacctcaactccatcctgcgtcagggcccgcgaggggccctgtggactggacccaggcccgcccattcccagggagaggctattaattattgcctcaatttcagagcctgttatcggtctcttcagagattcagcttcttcctggtttagtcttgggagggtgtatgtgtcaaggaatttatccatttcttccagattttctagtttatttgcgtagaggtgcttatagtattctctgatgatagctggtatttctgtgggatcggtggtgatatcccctttatctatttttattgcatctatttgattcttctctcttttcttctttattagtcttgctagcggtctatcaatattgttgaccttttcaaaaaaccagctcctggattcattgatttttttgaagggttttttgtgtctctatttccttcagttctgctctgatcttacttatttcttgccttctgctagcttttgaatgtgtttgctcttgcttctctagttcttttaattgtgatgttagggtgtcaattttagatctttcctgctttctcttgtgggcatctagtgctataaatttccctctacacactgctttaaatgtgtcccagagattctggtatgttgtgtctttgttctcattggtttcaaagaacatctttatttctgtcttcgtttcgttatgtacccagtagtcattcaggagcaggttgttcggtttccatgtagttgagcggttttgagtgagtttcttaatcctgagttctaatttgattgcactgtggtctgagagacagtttgttataatttctgttcttttccatttgctgaggagtgctttacttccaactatgtggtcagttttggaataggtgtggtgtggtgctgaaaaaaatgtatattctgttgattttggtggagagttctgtagatgtctattaggtctgcttggtgcagagctgagttcaattcctggatatccttgttaactttctgactcattgatctgcctaatgttcacagtgggatgttaaagactcccattattattgtgtgggagtcatattttggttgaagttgagtttctagtcaaagaaaaaaacacatgaagggcattcatgtttccaggaacagaagcatcctgtctggtttttcaaaggtgaagggagcagtctgaaggggccatggcatacgtgtgtctataatcaaagctcagagccaaggccctgggggagggtcaggggtgccccagggggtgcgccccatccaacactgcactgccaggggccttgtctttattaaattctgggccttttcctgggcaatagttacacaaggtgggttcaatgaaccctgtgtcctgtggctgccacccatttcagggtcgca

SEQ ID NO: 1885573 - DNA, 4001 bp, Homo sapiens
cctcctcagcctggtgactggagtaaacaatatcatatttttctagagcaagaagggagaattttgaatgttctccccacaaaaaaaaaaaaaaaaaaaaatgcctggacgagcaaatagagatcctaagtaccctgatttgatcattacccaacctatatgtatgaaaatgtacccctaattatggacctttatgttgtgaaaaaaagttaatagaaataaataggtattgctaaaaatcacagggaaccacaaaagcaatgaatatctaaaggaatcctcagaaatacaaagtgaagacccacaatcctcaatatcaaattacactgccaagttgtagttatacagctgatatatgatacttgcataaactatggacaaaaacagggagaacaaaaacatgatcaacacaaatatggacacagtcaactgactttgataaagaacactgcaatgtggaaggcagagaatgagtacctttgagaaaaatgatattcagatgcagaagtgagaaataggaccttattttacacgatgtatgaaaatgaacaccccctcccccaaattgaaggcaaaacaaaagaccataaaccacaaaatgtttttaactaaaacacaggatgagcatatattttgggtcacttgaatctctgctcacctttgcaaagaggaaaataaacaaacaccctagaagaaaaacctcattgacaattaaatgctttgtcactgatatatattttcttatatgggtgacaaaaattacatgcatgaaacgcaaaaataaatatatgggactatgtcaacatgaaaagtttctgcacatcaaagaaaactactttccaaattaaaaagcatcctatagattaggcaaaaatttcaggcaatcatgtaattcacgaggagttgtcatctaacatgtacacaaaaaacactacaaagtagcaaaagcatccaatctaatattttgcaaagaacctgaacagacaattctgcacagccataaaatcgaacaacaaataagagataaggtcctcaaaataaactattcattagaaaactgtaattcaaaaccacacacagataatctcacacttattgaatattcctagattttttatttaaaaaataagaggggctgggaatggtgtctcatgcctgtaatctctgcactttgcgaggccgaggcaggtggatcacctgaggtcaggagtttgagaccagcctgaccaatatcgtgaaaccccatctctactaaaaatacaaaaattagctgggcatggtggcggcccctgtagtcccagctactccggaggccgagacaggagacttgtttaaaaccaggcagaggctgcagtctgccgagatggcgccactgcactccagcctggaagacagagcaagactccatctcaaaacaaaaacaaaacaaaccccaaaccaaaaataataggaatgcgggtatggttttggagaaagggaaactcatacactgtaggtggaaatgaaaattaggatacacaccatggaaaacagctaaatagctggagactcctcaaagaactgaaactacagatgtcccctgctctagcgaggtctctttttaaaggtgctgaggcatcaaaaataatcctagactccagctcagaggcccctgaggctcggagggacccaggtccggcgtttcaccgccagctctgggccagggcgctcctatacgctggacgcgggtcggacattggcatagccttcccggccggggtgcggacgctgcagtagccaggaccccacaaccgcccccacgcggaggactcgggcccagatgcccacgaagaagtgaaagcacgaaaacagggagaggcagggaaggagccgggagggttcccggtggggtccacgcccccgccacttaccgcggagacctgcctcctactccaccatcacatggaacccaccactgcttctccgaagctcgctctgaccacgccgctgctgctgcaggggcctcgcaggaagtgcagtctcagcttccgtagggacacgcacgctggcagcatccctcgtgccaggttgaagctccaccccctcttaaagggacgcggctcggacttgccagaagcagctttgggtggcaacacaggctgagcctctgcccagccccagggggcgacgaaagacccctggtctctcatcctccccagctttcgggccctagaagtcgcagggacgctccctgtgaccccctccccgagatcggctccctttgcctagggagcacccgggacctgcccctgccctcctctggacctcagttccaccatccgcaaagcaagcagcctcgctagagctctggggttcctcaagcttggcgtctcaggatccagggtgtgctcccctgcccctctgcagagggggtccagagaaccacagaaagctgggggctggagggacagtccggagggcagcagggcctccccggcctcactgtccgcatctgtcctgtgggagcccgggggcctcgctatggcccagacacccacagcctcaccagggctgcctgggtcaccgggctccccaggaggcaggcaggggccctggggtccagcgctgcccccacctcaactccatcctgcgtcagggcccgcgaggggccctgtggactggacccaggcccgcccattcccagggagaggctattaattattgcctcaatttcagagcctgttatcggtctcttcagagattcagcttcttcctggtttagtcttgggagggtgtatgtgtcaaggaatttatccatttcttccagattttctagtttatttgcgtagaggtgcttatagtattctctgatgatagctggtatttctgtgggatcggtggtgatatcccctttatctatttttattgcatctatttgattcttctctcttttcttctttattagtcttgctagcggtctatcaatattgttgaccttttcaaaaaaccagctcctggattcattgatttttttgaagggttttttgtgtctctatttccttcagttctgctctgatcttacttatttcttgccttctgctagcttttgaatgtgtttgctcttgcttctctagttcttttaattgtgatgttagggtgtcaattttagatctttcctgctttctcttgtgggcatctagtgctataaatttccctctccacactgctttaaatgtgtcccagagattctggtatgttgtgtctttgttctcattggtttcaaagaacatctttatttctgtcttcgtttcgttatgtacccagtagtcattgaggagcaggttgttcggtttccatgtagttgagcggttttgagtgagtttcttaatcctgagttctaatttgagtgcactgtggtctgagagacagtttgttataatttctgttcttttacatttgctgaggagtgctttacttccaactatgtggtcagttttggaataggtgtggtgtggtgctgaaaaaaatgtatattctgttgattttggtggagagttctgtagatgtctattaggtctgcttggtgcagagctgagttcaattcctggatatccttgttaactttctgactcattgatctgcctaatgttcacagtgggatgttaaagactcccattattattgtgtgggagtctatattttggttgaagttgagtttctagtcaaagaaaaaaacacatgaagggcattcgtgtttccaggaacagaagcatcctgtctggtttttcaaaggtgaagggagcagtctgaaggggccatggcatacgtgtgtctataatcaaagctcagagccaaggccctgggggagggtcaggggtgccccagggggtgcgccccatccaacactgcactgccaggggccttgtctttattaaattctgggccttttcctgggcaatagttacacaaggtgggttcaatgaaccctgtgtcctgtggctgccacccatttcagggtcgca

SEQ ID NO: 1885574 - DNA, 4001 bp, Homo sapiens
ttgagtgcagtggcgtgatcttggctcattttaacttctgcatcccatattcgagcgattctcctgcctcagcctcctgagtagctgggattacaggtgcatgccaccacactcagctcattttttttgtatttttagtagagacagggtttcaccatgttggccaggctggtctcgaactcctgacctcaagtgatctgaccgccttggcctcccaaagtgctgggattacaggtgtaagccactggatccagccttttcacttcaaggctcagaattctccccttttgaaatttcgttcagtgaggaaattgataccaataatttgcacttttaaaagtatttaaaatgatatctaacatgaatttaaaaatctatcttgtgttatagaaattgaagcattttgcattcaaaaagaggcattattttggggactgggagaatcttcctagctaaaagattatggagggtgtattcgcctatctcacttgtgggcatggtgcccttgcctttttggcgaaggcaggaagggaatatttcagcctgatgctaacaatgacgctatcttacattggcttggcactctctagttatctaaagttgagtttgcatcgatgatctcattagaaccttccatcagtcctagcaggaagtcagggctaatattttagccttgtttggctgcagaggaaatgaggttcagagagagtgtgattggtcgaaagtcgaattgtggaactgggactatgatctttccaaaataagccagccctgccctcttcttccttcctctcttgctccctttctgcactaaacctctaccacgtgccatacagtgtgcaggcaccaggaatttccatgagcttcccttgaaccttgcatataaagcaaagttcctctgaagggacctatagtaaactaaagaggagtaaacacaaaatcaattaagggcaccaaagtgttagagagactgtgttacaaatatttacagaaagtagtgtgagaagacaaggggagtattaatcaattgcatatgggactaagggaagtgggacagtgatgcattaggaaaagcttcatgagacagtaaagttccagcaaagtttaaagtaagaacagccaccagacagacctggaattagcctttttgcaaagtgcatttccatgagaaactgtgcaggggatacatggccaaataatagcatgcactatggtatatcggaaattcctaattctttttggggatttgagtaccccaggaagcccttcaaaaagaaatgtttaacttttgtgatctagccaacatgtgggattatagagctttaaatacaaaattttagagaaaaactaagattttaagtaacgtaatgtattatgtaactctggaaaggactagcttacagcttacgtccacttgcaggcagatcttagcaggctgctgagatttgcctgtggaaagtgcaaaagtgaagtgcagtggagaccaggcccactcagatgggtaataaaccttaaaccagataaactagaacactgacactgttgctgtcttacatataaaacattgagccaacccaagaaagggactcacggtccaaacgtgtccggaattgggttcttggtcttactgacttcaagaataaagccgcggacccttgcgttgttacagttcttaaaggcggcatgtccagagtttgttccttctgatgttgggatgtgttccgagttttttccttctggtgggttcatggtctggctggctcaggagtgaagctgaagaccttggcagtgagtgttacagctcttaaggctgcgtgtctggagttgttccttcttcctggtgggttcgtggtctttgctggcttcaggagtgaagctgcagacctttgtggtgagtgttacagctcataaacacagtgtaaacgcagcgtggacccaaagagtgagcagcagcaagattcattgcaaagagcaaaagaactaaagcttccacactggggaaggatacccgaacaagttgccactgttggctcacgcagcctgcttttattatcttatctggccccacccacatcctgctgattggtccattttacagagagccgattggtctgttttacagagagctgattggtccattttgacagggtgccgattggtgtgttcacaatccctgagctagacacaaaagttatccacatccccactagattagctagatacagagtgtccattggtgtatttacaaaccctgagctaggcacagggtgctgattggtgcatttacaaaccttgagctagatgcagagtgccaattggtgcattcacaaccccttagctagacataaagattctccaagtccccaccagattagctagacacaaagcgctcattgttgcatttacaaaccttgagctagacacagagtgcccattggtgcattcacaatcccttagctagacataaagattctccaagtccccaccagattagctagatacagagtgcccattggtgcatccacaaaccccaaactagacacagggtgctgattggtgtttacaaaccttgagctagacacagagtgctgattggtgcactcacaatcccttagctagacacaaaggttttccaagtccccactagactcaggagcccagctggcctcacccagtggatcttgcacagtgccacaggtggagctgcccgctagtctcccgccgtgcgcccgcactcctcagcccttaggcggtcggcggtgctcctccgggaggctcaggccgcgcaggagcccacggcggggcgggggagactcagttatggcgggctgcaggtcccaagccctgcccagcggggaggcagctaaggccgggcgagaaatcgagcgcagcgccggtgggccagcactgctgggggaccgggcgcaccctccgcagctgctggcctggatgctaagcccctcactgcccggggcggcagggctggccggccgctccgagtgcggggccgccaagcccacgcccacccggaactctagctggcccgcaagcgccacgcgcagccccggttcccgcccgtgcctctccctccacacctccccacaagccgagggagccagctccggcctcggccagcccagagaaggtctcccacggtgcagcggcgggctgaagggctcctcaagtgcggccagaatgggcgccgaggccaagggggcaccgagagcgagccagggctgcgagggccgccatcacgctgtcacctctcacaggagcgatatgggagaggaggagggggaaagccaaaggtaggtcctgatttttagttcttccatctggcagcgtggctaacttggaggaaattctgaagtggaaccccagccctagaatggtgagggagaggttgctggggaaaacgatgtggagggcttaatcaagggcagaggatactcattttgggatgtgaacatccctcttcctgcagtaaggctctcatctcctctcttttgcaaggtgactcaattagacaacagcctggtggctgtccgttctgtctccaaggagaataccaggtgtgttccttaatttcagtatttgtttatctccccctcctcctttttcaaaatccattctgagaggtgtttcttctccatgatatctcagactgaagtctttttgccctgattttatattattttcttccaagatcccttcatattacacggttgttccaccagggtggaaacttttccatcctctgaacctataatggtgtttggtacacagtagggactcagatttattgagtaaaaatttgaatgccagcttttaaaagaaacagactcttaggtgtctcattctcgtttggtaaacacgcagataaaggaggaggagcagctagaaaagggaactaagctttaccatgctaaaccacgtgttattcacttttcccagaatgcctcctttagggtttatggtacgtcccatgaatgggtattatt

SEQ ID NO: 1885575 - DNA, 4001 bp, Homo sapiens
tcaaaacagcttgataacatattcttaatggggtgagataatagcatgtaaagttggctattaaaagtatctaatgtcaactgagttgtccagctgtctaggaacttaatacctcaggttagcatttacagtctgcatgcatttctttatttggttcccacaactatcccataagtatacagggaaaggacggaggcaggatcacttatgtttttacagatgaagaaactgagttcagagaggttaaattattttcccaagccatgcatgtaacaggcaaccagactaggtccccagcctagccttttacagcttcgctgctaccccagccagtgtttgttttatttccaaacaaatcattcgttatttatttattctttcgattaacctagattgagcatttatgattgtaaagggctctctcacacactatgcacacataaagacatgcagacaacaatgtttttctctggaagaacaaagtgcacaaatgactcaccaacctaaatatatctgagctaagagtctaattagcagaaaaacctcaatgttacaaaggtaggtaacctgtcttgtgtaatagtgggatgggcctccaggaaaatgacattgtagctctccctccaaggatggatagaatttcaataagggaaaagaagagaggtgactttctaagaaaagggaataaaatgaaacaaggaaacgacttgttttcgaaatctagtatggagttaattgaaggaagtgtttgaatagaagggaaacattagagataagactaaaattgatgttaaatgactgttgctgttttttgcctttaacatatcaaaatgggttcttttgacccttgcaaaatgctaaagcagttgccatagaaatacagtagtcatatgccatagaggaagctaggcatctcagctggtggcagggccaagacaattcatattaatgcctcaaggttcaaaattttcaaattaagagaggtttatggtccaatttattaatgtttaaagtttgaaattaatatttacagtttgaaatctttaatgtttaaagttgaaatttaatgaattaaatgcttggtaagaaatatctacttatggttgaatatatatttgcacccagagaacgttaatttaactttcatgaaagtagaaagtgagaaaaatatttaaatttgcttgaaaaaaatgtaataacaaggaatatttctatgattatcatttagttagtaagacctcatgtctatacatctaaatagatccacagagatataggggcattgataaataatgagagattaatagtagtgataataattatctgagaaacaacagtgattattgttcagcttcttgagcacctaatacacgccagttaacttatacatattctttctaatgctcacaaagacgctataggctagataatattatcccatttcataggtgaaaaactgaggcttatagggattaagaaattcaccagaatcactccaatggtaaatagagacactgagcttggacccatatttaacccaccacaattcttttttgcctactatgctgcctctggaatactgcgaagcatctaatgggccttggtaaggctttctttcctttgtctggaataatggttcataaatattataacatacagataaagctcaaataatgtaccatttacgggatgaaacttaagagctctaacaaaggaattaaagaaaataataccgctgactttgccatccgcggggccgtcgtgggagcgcagcgggatgtgccccggagctgcagcttgaggccctcaggtctctggaggtgtcgtggaggaacctagctcctgccatcctcttcccccagtttgccacttccagcagccttagcccatgaggacgatgtgaacgggactgagtcaggagctccccggaagcatggagaccgtggtgatagttgccataggtgtgctggccaccatctttctggcttcgtttgcagccttggtgctggtttgcaggcagcgctactaccagccccgagacctgcggcagcgctatgattctaagcccattgtggacctcatcagtgccatggcgacccagtctgagccctcttagaactggatgacgttgttatcaccaacccccacattgaggccattctggagaacaaagactggatcgaagatgcctcgggtctcatgtcccactgcattgccatcttgaagatttgtcacactctgacagagaagcttgttgccatgacaatgggctctggggccaagatgaagacttcagccattgtcagcgacatgattgtggtggccaagtggaacagccccagggtagatgatgttgtgaagtcgatgtaccctccgttggaccccaagctcctggacacagggacgactaccctgctcctgtctgtcagtcgcctggtgctggtgacaaggaatgcctgccatctgacggggggcctggagtggattgaccagtcactatcagctgctgaggagcatttggaagtccttcgagaagtagccctagcttttgagccagataaaggcctcccaggccctgaaggcttcctgcaggagcagtctgcaatttagcgcctacagaccagcagctagtcctgaagacccctgccgccatcactgggtggctcagattagccttccactttttcctgtagaattagttgttctccacggctcaagagttcagctgtgtgtgcatagtaaagcaggagatctctgtcagtttgtgcctctgttgcaattgcaaattgtggcttgtgagtggcagtctaataccacagttaggggagatgccattcactctgcacagaggagcattgaaaactggtggactgtcagcttcatttagcctacctagtgttttcaagaaaattgaaccaccatctaagaaatcaagaggtttcacatcaaaattagaatttctggcctctctcgatcagtcagaacgtatggcaattctcatctgcttttcagaaaaggacaatcaatcgaagctaaataggggttgctccttttggcaagacttgtactctctcacctggcctatttcatttatttgtattatctgcctggtccctgagacgtttgagtctgtcctcccccttacaggtttgggtttgaagatgagaactacaaagctgattatttcttatcattatgcctgcaattttacctagctaccactaggtggatagtaaatttatacttacgtttccaaaaaaaaagaaaaaataaaataataccatgcaatataaagcttgtgcaagcaagcaaacaaagagattttaaaaatcattcttagttgatgggcgatttgatagtcatttatacctggcactggtataaatgagaaaatagatgcccagttttattatgatttaattattttattctactactagcaccactataaaagcaacgtagtttcaatatgaccaaaccaagattaataaattactcaatagtcatcattagtagagggaaaagatcttaactggtataaattattaaatgccaagatagcaagtctgaaaaatttaacaaggggtataactgtttcttcttgaagattcttcacaatagagaatcaagactatgtaattttcagttcattgcaattagctttaggacacctttaaaacctaaaatgaatattttgtgggtagtataattcatttcaataaagcctccttcagtataattcatttccataaagcatccttcatttacatgttatttggataccaattgggcaggaccttcctgggaggcaatgcagcctggttgttaagaagacagatttggccgggcgcggtggctcacgtctgtaatcctagcactttgggaggccgaggcacgtggatcacgaggtcaggagatcaagaccatcccagctaacacagtgaaaccccgtctctactaaaaatacaaaaaattagccgggcgtggtggtgggcgcctgc

SEQ ID NO: 1885576 - DNA, 4001 bp, Homo sapiens
gtgtgagtgtatgtgtgagtgtgtgtgtgagtgtgggcgcgtgtgtgtgagtgtgggtgagtgtgtgtgtgagtgtgggtgagtgtgtgggtgagtgtgggtgagtgtgtgtcagtgtttctcaactgcggggcattttcggagttggggtgcagaaggagattttctttaattaattagatgtttacctccagcatcatccctcagtggtttagacaatcatctgcccacatgttaggaatgagattcaagaaagcctcttggagtgaaattttcctggaaatatcctgattcttggcggcacacaccctctccctctttctgtgatagaaacagccagttctgcattattccaaaccacaaagcaagcgacatgccatcccaacttaggatatgaaggaagtatcagccccctaattgcacaggggccacacagcctgcatctccctccatcgtcccgactgcatgcttttgattgtttcataataaaagtggccggctaaattatgactacttgtgatttatttgccatgtcatttagacttttcatatgtataaatttgccatttgaaaagaaagagaaaattcactgctattccccaaggcctcgtttttggggagctcctctaacatcatgaacagaggctttgtgacttctaaagtgattagctcctatccggaggttttggaacatatctgtgctcagaagcagtctgccggggtgaaattctatctggaatagtgtcctaaccccatcggagagagactctgaatttttaaaacgcctgttaaggacccctgggtatgagccccgcacaaacatgtctgcggcacccacagctgtgcctcaatgaaggcccaatttctccattgcacagatgaaattgcaaaggcccagcaatgttagccaaattccccaagcttaatgccagagcctgcttccactccaggacaaagtggtttcaaagtccatacttgccccaccctggtggcctgccctggggaaggtcactgccaagaaggctcctgggccgtcttgcagctgctgcctcttcttttaattacgaaagaaatgcatcatcatgaaaaatcaacaatacacaagatataaagttaaaaggcaaagtcccccctcatcctctctctcagcccctcaagtatattagaagatctttttagggttgaattttcactctgcaggagggtgttctgtatacaaagaatacgaccctttcttcctctttaatttgcttatagctggtacatttcaaaaaaaaataaaaagtgacccatgcctttgatgttttttttttccccttatttttgtcaacatattgtggagaatgctgagttctttgaattgtttttccctctgacagcaaatcaccaagatgtacttttccagagcctaacatccttgaattcacaaaagttccagtctggagtcataatgtggaacgtaagcagttctagtcagttctgatcttggcaacatgaattctcccctttccccggggagactcagaaacctgcattttcacaagatttcccaagtgacatgtgtgcacaacagggtttgagaaaccctgtgctggactcagctgcttcagagagaagacacagaacaattgccaagctatcaaaaaaagctcagactgacagcagagaactcaatagaaatgccccatccgactgttgaaactcaggcccaaactactgcaagagagtggagaactgtttctcctctgaaaaggcccgatttcgactaaatgaaagcaaaactgtagggaccatttcccacctagtagcttgaagccctacccggtcaccaaattggcctagctggtcctacctgcatttggtaagagccggggattgggacgaggcagagagcaagaccaagctggtttcctctccggtttcctccggggtggctgggtcccaggtcctgcccccgcctcgccctgtgcaagctcggtgcagtgcagcccctccggctctcgccccacaatgccgtgcgcaggctggcagcagttcagctgaggactaaacgcttggctcaagttcaacacggctgccaagatttggcaaccagagagttgcagggaagcagcaggctgctaaaccctttcacatttttaattagatccacacacccatgtctttgagctatcataaatatacagatgacatagagagtattattcggggttaaaaaaaaaaaaaaggaagcaaactctactaaggtacagcttaccttattgaaataatttccctatcactagtttgagggctgaggaggaaaaagagaaggtagtgatatttgcttaagtagaaccacatctgacaagggaatctacccaggatctggaaaacacaggtctcggctgccttgctatcttcctgggcttcgagaatatcaccagaagagggcattcttggcgccggctcagccctgtgcagcccggagctggcaggcagcagtgctggaggagtcatccctcaggccactcccacctcccgttcttggggatagctttaatatcgccacggagcagagaggttctctccttcgccctaaatgcagcaacttttatactccatgttgccttactattcttctcgttttatttccttctctggattgtttttgggtatcttcccctggaaaacaattgcagatgcttctaaatttttctaagtcctgtgccgcaacatgctcagcttcttcccctcagaaccagcctttccccttgcactcagcccctgggcgattctccctccggggaggaaagaagattcaactcttgattcaaatgctccggatttcactctggtttcgctgtgtggctttggacataggatttaaagccttcacgttggttccctcatctgaaagatcccaaagcaattctggcctcacagagtggctctggggtttaaatcctatgtacaaggctcgtaacacagtcagcacccaacactgaatattcgatagaacatgtgccttgtagacagtcagctaacaaacaactccaccaaaacaacagtgctagtccttagtcttcttcttccctgaactgcttctcctcttgtttgtgacaaaggccacccatgtttctcagacaactaaccctagtctgatcaacttgccgtaagatgagagtgagcccatgcattggtgtgcatgcccttaatttaaaagacatgttaaaaaggaaatgaaacacttgaaatgcaggaaagaagtgcctctggttgtcccatctgagagcacaaagtttataaatagaaccatcacaagcatcaaacacgagctgtgctaaggcatcaaacacacatacatacacacacacgcacacacatgtttgtgtccttggcttatggtgaacaatttgtacacctttcagtggcccccgcagaaaaccagagcttgtagtggacacttggcagcatttggtcttttcctcatccttccttcatttattttttcttcacatatgacttgaaaatagagcatgttttactgtggcaaaattccctctatacttgacctgcaaacaggacagtcaggctaactgggatgacctggtccaatgaagtgggctggagacaattctacgcccaataggcacctttcagcagatggaaagggtgaggacaaacaggttggtgggcctcagcacctcatcttttcctgtagtctctcttgctccccaacacctcactatctcccccaatccccaggtacaggggatttcctttcactagaagaagaaaggatacaagcttcttatgcacgtgtgcacacacgcacacccattcatgctcacagacactgaaacaagacccttacaccaggactgttccacttggaatacagagagcagtaatggctcccacagccatgaagacccaggctgagtcccacttgcctctatggtcctgatcaggctctgacagggagcacactgctgctcatgattagttatttatacatg

SEQ ID NO: 1885577 - DNA, 4001 bp, Homo sapiens
cagaagattaagaagaaagggaaaaggtagggaagcgcgccagccaaggttctgaagtcacttttcttggcatcagccaatatgagctacccaaacgtacagctctgcttgtcctgggcaagagcgccctcatgttgctgctccctgcgcagcgcccggcttcaccctctgcggggatcgccgccgcaatgtcccgagagcgcttctcctctcctcctccgccaccgcgcagccagggcggccccaactcagcagctgaagttacttctccacaccggttcaaaacccgagaaaacaacgctgccaggtccctgccacaacgacttcaagtcccgccattatgccacctctccatcttcaccccggagtccctgaggcgccgggaaaagctaattaataggacaccgcgacgagagtcccaaattcgcttcgggccgagccaacctgtgtctggcgcgtgctctcagccactctgggacagagaggctctcgagcgtactaccgacgtctcctaagtgtgcattaagaatcaattatttgcctgagatttccaaagccaggaactgggatattcccagcagggacaaagtcaagcccagaacggtgttcatttccctagtctttcgaagagacagaagagaagactcccacacgcacccagtgcctcacccgacccggagcagcccggctaaatccgaccgggaccctggtgtgacccaggccaaggagctgggggcggagggccagctctggggaaggttggctatgttagtgtgcaaatagagaagggcgatccaaagaagaactttagagagaagcaggttcttggctctggagcaaagagctttaactgaaataaggatagctaataaacctgtctttgagcgttaagaacgtcccggaagttcctgtagcaaccataagactcagaaatcatatttccacgaaatgaattaatttacactttaggacctatttcagtctcccactaccccttctccgtataattttttctcgttttctctccatgttcctttgccgtgtctacatccttttgacctggggattcaccgtgatttctgtcaacgtggaaaaaaattatgcatcctttcagctacgtctgttggtagcgagcctgctaacattttctaagaaaagatgaacacttaaggccaggaccccaaagtcaggcgttaaaactcagtccaaagcagtcagttacacatattccctaccctaccccttcccctctgaaaagcactttcacttacggatcttgctgtaagagccattccagtcctgatatccttttcctcggcatccttcggacaacctcaggcagagccttaggtggtggggaaaaacaaaaacaaaacacagtagaaatcgggagggagacaagaggcacaaaacataacaatacatcatctatttgccagcctggagcccccttggcctacatcctcaggataaggtccctagaactgaccgctagggtggggaatgggtgcctttgggagccaaaatctgaggtgggttattttaactgctagtgattgaggggaaagggccctgaagggagaatagaaaaggggaatgattggtatagagaaaagaaatcttaaaaaaaaaaaaaaaatgcacgcaaaagaaaatctagcatgaagtactaactgggaaagatctctagcaccttttaactcttacaggtaggtagctcttaggaagaatgcagacgtgtgtgcccaaaagagagaatctagatgacctctattctttccatatctccaggatctggacttaagtagaaaaataaagaggggagaattttaattcaagtttcacctaccctgcttgttggaatggctgcgcagattttcatgctggagagttccatctgtctggcagaagctgaagtggtgttgggggcaggttatctggtgaagtaggaatgtacaggaaccccgccctctaggcacagttacacaaccccagcaacccatctcagccagttctaaaacctctaatgatcttcaccttcaccctttgttagtctaattctccaacaggcttttagtctcaaacacaaccaaccactttagctgttcataaaattaatttctcaaaaccaaaattttcccagtgcatgcaaattcctcaacaatgttgtagaaaatacactttttaaaaaactacacttctatagacttctaaatatattgaatttatccacgtatttgggtgaaatatgcaccaacttaaatatatattaaaatcaatacactatgagactaaatttttgcctctctgcctttgattttatgcaagtcacataaactacatgaaggcttccatgaccataaggatatttgtattaaaccttgttagttctagacttcatgttcacttggttcccaattttgtaacaggctgaagaaacatatttgaaataatactttaactcctctagttcaattacatcattttctcagtgttttacatattaatattttttgttaactttacaacagacaaattcaagtaaaatactttaaacctggaaataaactttaatttgggatttcaagttttaagttgtgatcagtttcagttccaaaatttcacaaaggacaaccttcatcttattaaaaacaattataatatgaaagaaaataatcctcaaaagttttgaagtgtatttctgacataaactaattttaacggtcaaagttggagacaacaaataacacaacattacaacccgttcgatgcaaaaatgtattatatgccatgccagactgtcatgtgttttttgagaagataagttgagggatgataagatagatcaagggaaatgagatgttcatattgggcttcaggaagcctttacaaagttctctctccatatatccaccttcgtgtctagtacacctaacaaacttctagtcatatccattatatgtaatttggacatgggtccaagcagaactcccactccaatacttcgtttctatgaattcaaagaaatcagttttactcttgacttcaaagtatgatgtttgccattaaaattctatttatctgtcacccaaataaacacttataaatacaaataagtatacttatttaatgtggccaaaaaaaatactcatgcaggaaaactttcttctatatctatacccctttaccttagcacaagagttcaactttctttttaacgtttggtaagcaaaattctatgtttcccctgtgataatacattcttattccacaaataaaatccatggcaaaagcaaacaataaatcatcacctttttttcagcttggacacatgtctctctttgagctattttggttcaaaatgtgtaatggggatttcctttgcataaaaccattcacttggactttattactatttttaatatcagccataaatttgacttttaacacaataattttttgtgaaatatttttatgcttcattctgaagaacttaaatttcaagaaaatttggacctctggtgaaactgtttttatactaagaaaataaaatcatgtctaattgcttaaaggagataattaaactagctgtcttggcttatttttgtccattccccatttgtgtatatttggttccagctcttttaattttcctggcccttatatatttttcttaggcctttctctctctctatcattcaccttatgtctctctctctcatgcattctttttggtggtaattattttttcaccataaagatcctctctctctctctttccctctctccactccacagtccacccccttctattttccaatattaagtattcagcatttcagtttcaaatctattccagtaagcttgcttctcccttaggctttttttttttttcctccccctgagcaactgtctaagtgtttgctgataacatcttagggccagattatttttcactgggcccattgtaagaagtaaccagcttattccaatactgcaga

SEQ ID NO: 1885578 - DNA, 4001 bp, Homo sapiens
ttatccctcacccctcccaacttctccccacaccgagtccccaaagtccgctatgtcattcttatacctttgcatcctcatagcttaggaagtgatcttgaagatgaaagccatattctaaggatggcaggacgaaaagataaaactttgatgatgctgtatctcccataccagccagactccagccttcttttatatgagagagaaataagcttctatgttgttgaaaacactgttacttcttcattcacccaggacatcacaagcttagtgatcttggaaaggctttgacagaggagtgaaaaactggcgtgttttggtttgtttatttgtttcagttaaataaactgtaagacaaaggtgatttaaaatgacaaaatatagtctctgagctcagtcataaaaaggaatcaagggattatgtaattgtattatgtatttatttggtctaaacaaaaaagagctttattctctcatgtaagtgagtagtccggaggtcacgtgggcttcagataaggcctcatgaacagctggacgagacaatgaagacccagtgtctttctgtctcttcttagtctccatggtgacggctttattcttgggctgtcttgccagatgatcacaagatggctgccagacacaacctgagttatggatgtcctcattcacatttcctcagagaaaggaaacttctttcccagaagcccctggcaaagtcaccttgcattggcctgcattgggtgactatccctaagccaatctctggagctaggatgataggggtcactggttggtttaaacctcccaaggtctacccagagaattgcaatgatgttaatccctgccaacagcatggctaggaagtatgggaccctgttaggaaagagaaaagaagaaaaatgcctgtggggaggccaccctatgccctatatttttcctcgtcatcctcaccaggtagtgttatttaaaggactttaatattttaaaaggcaaattgctcccaaaaggtctattgccctcaaatttcattttcagtagcctgaaacccagtattagacttattgatttggggtaaggcgcgggatttcctgaaaaacctttgcttcattcattcaacttacctcattcattaattcctcggtagacatttcttgggtgctggttatgtgtcatacactctgcaggtcttgcctgagaggataaacacatcataagccattaggatcggtggcactagcacatggggcacttgtactctttatgaaggtcgggaagcaagtaggagggcacgggagacaggacaggtaagttttgatcgtgaggagggaagaggcctaggagttgggcatagggtgatgcccagagagactgcacctgcatgagtccctcagtgaggacccggggtgggctcttagttctttgaaactcagaaagggagactgctgtgagggctgcatttggggacttgaagcagtgcctgttttgccgtcttatgagggcaggctttgtaattggggtttccagtcccccagttaggaagtctctgggggaaagatgactagagtctgtggttcttgatttgggcttggagaggatttgggggtaagatgctaggaaatgagagtgaaatctctgaaacttacaggaagaatcttccccagtccagcttgtctgctgctctcctgacgctggaacagcttctcaggagttttccatttttcatggcacaattctttctcctgcaaggataagagaataagagcttcataacccaaatagttcacagcgtggtattcgcctctatttaaaatcatctcccattgggttcaattaacaatgtacatgtcaaattatgtcacacccattacttgctctaatttggtcaggctgggtcaggcagtccctgaactgatggagctgttaacctcccagcagagagtcacggtggctgtgcctgcactgcccttggccttggctgtgtcagggcagaacactgtactgggaaagtaccaggcagtgctgcaggaaaggtcaagttcgtgacgacagtgaccagtcatcaagccctttaccagagctttgcctctagagatgactatgtgaattgaatcgtggctctgtcatttagcagctgtgtgatcttgggcacgtgaacttttctgagcctcattttccacatctgtaaaatgagactattataacacttcatttatatttatacttttaattatattgatatttatttcactagggttgtagtgaggattaaatgccataatgcatgtaaagtgttttgcataatgcctggcacttaggattaactcaataccagctatttagtagtagtatttaatttttaaaaaatcttgtttggtccctcaaaactgggattccttctgagatcacattcaggaaatatttcatcagccctcaagaaactcggagaagacaggcagtctttcctggaacgggtagaggggaaccaaaggatctgcaatggtacctagacatcaggattattaatatgtgtgccaagagcaaccctgactttaagaacacctctgtgtgggcacagaaagcttctttttctgccttggggtttcacaggtcaatcaatctgtgtggtcaatctttgtgcggtcaatctgcagagccccaagggagaaggtagaagggtgctgggcactctctccattttaagtagaggtaaactggctgggcgtggtggctcacgcctgtaatcccagtactttgggaggccaagatgggcggatcatgaggtcaggagatcgagaccatcctggctaatacggtgaaaccccgtctctactaaaaatacaaaaaaattaggtgggcgtactggtgggtgcctgtagtcccagctactcaggaggctgaggcaggagaatggtgtgaacccgggaggcggagcttgcagtgagccgagatcgcgccactgcactccagcctgggtgacagagcgagactccgtctcaaaataaataaataaataaatagaggtaaactgaggcacagagaagtctccacacacatgtacagtacttttcatcccctctcaaaaaacaagggaaactgtactaattgtagagctagaggcagaatctcttgcccagagagacttgagactgaggccaatattggggaaaattaccttggtttactttacaagcacaaaggctatgcttcttaccctctctccacatccaaaaatctctggggtacatcggcagcctcctttatggtacatccaggagatagatagtgtgttgtggaaaaagccctgggttgtagtcaagaaacttgtcctgtaatcccagtcctgcgaaaccagcgatgtggccttggaaatgtcactgaacatagtactgtacttgagaaactgaatggaagggtttgggctacaccaatggttcccaaacctggctgctcatgagaatctatgtgtgtgcatatgtgcatgtgtgcgtgtgtgtgtgctggggcaggggtagctggagcctaggaatctgtatgttgttttttgtttgttttttgagacagagtctcactctgtcacccaggctggagtgcagtggcacaatcttgactcactgcaacctccgcctcctaggttcaattgattctcccacctcagcgtcccaagtagctgggattacaggtgtgagccaccacgcctggctggaatctgtactttggaaatgtttacatgattatcaagagcagtcactgttggggaccctgggagcagatgctttctagagtgtcttgctaggctctaacattttctgactccaaagcctctttcagcacattccacacaattcagtccaaaggcgatgtcagccctcacagtcagctcccatgagcaaatcagtgtgtgattccgcatgtaccaggctgtctgtgtgctcgggccctgggtcctgtctgtttcttggttaatttggcattgaagcctgcatcttgggctcacctggggc

SEQ ID NO: 1885579 - DNA, 4001 bp, Homo sapiens
gtgcaacatggcggcaaaaccccttctctacaaaaaatacaaaaattagctgggcatggtggtgtgtgcctgtagtcccagctactctggaggctgaggtgggaggatggcttgagcctaggaggtggaggttgcagtaaaccaagatcatgctactgcacgccagcctgggggacagagccagatactgtctcaaaaaaaaaaaaaaaaaaaaaaaagtaagtgtttttctgttctacagagatgcaaatgattcctatctggtcagataaattacctcaaaggttatagttttgctgccctgtagcacattagccagtttagtatctaactttgtgatcttacgtcagcattccttttcgttctctgagtacacaaaatctttattctcgtaatatctttgaaccagtgttgccaccttgcaaagtcccttatgaatgagttacctacctcaccgatacatactcaccatatcttgtcaaggcttcatattcctttccctgtatagtccccacaaatatacactgtcagctttcaatgcacaccaagcgcccattattgattctttgtcccgagtggctcctctggagcatatgcgtaacatcagggggacatagggcttttaattgtcaaaagtatacaaactcagcacgttattccaaataatctctgcccctgctccctcacattttgatcatgccgtatctgtgatctggggctggggactctggccctcaagatgcctccaatgctctcggcccctgctaagagcctctgcccacacacggggtcatgcgcataaccttagaactctgggcacggctagatgaactgtggcacgcacctgatctaggcagcagcccacttcccagttggtcagccagtgaaggaaggctcagccccaccaggccagtgagattctccgtcttggcaaattgcttaaagacttgatagtaaaggagaaagagataaagcaggcacctgaggccccgaagcagcagacacttaaataagcagcaggaagaaggtcctggcagagacagaacacctgagttttccacatggcacacggaccttggaggcacagagggatgggccccgctactgagtggcaagaagacgaaatgtctgtgtcgtagaactgtgtgtgatcttgaaagacctctcggttcgtgaatggcatcttgggttctgtcaggctccacacaggttctactgctcctcttcctccaacaggctgagctgtgtgacttttccagggttgccatccgacctgtcatttggtctgtggcccttagtttcttatccacatgtggctgtaaaagaaactccacaatcctggagggaactcagtgggtccctacttccaatccaaaaacctcgactcactcttttactttttctaataacttaataagttaaataataataaaagaattgttaccgttgttcagccaactctttccgggctcatcaacgattttctaggaaagaaggtttccttggttagacctgcacttcctctctgtctctctccattcatgtttgagcattcattcattctccccacaagcacatcatggattctaaaatgaagaaggcaatattcgtactttgaagatgctcacatcttgcatgtgcagtgttacaagagtggggttggtgcaggagtgaaatgggaggccgtgtcccgagatggggtcaccagaacctggagtgacaaggtggaggtggggagaggagcttttcctcctggctttcccacaaacactgacttccatgcctctggcctggaaccacatgtaaccaaagccatatgttcaacttgcgttaattaaatggtggcctcagcaacatttctggtgctgcttctgttgctttggcattatgatgtcttcaatatttgttactgtgtgtcgtttgtcatgtttaacccagtggctcagattctatttgtttgtaaaacttaaatgttgagagacttctgttcttgattttttagaaaataaaaattatttttggtttattccatgagaacatatcttctataggttgaacctccaaggttcttccttcttgatttttctgggagatgactgtaatttttttttttttttgagacggagtttcgttgctgttgcccaggctgctggagtgcaatggtgcaatctcagctcaccgcaacctccgcctcccgggttcaaggaattctcctgcctcagcctcccaagtagccgggactacaaatgcgtgccaccacgcccagctaatttttgtatttttagtagagatggggtttcaccatgttggttaagctggtcttgatccacctgcctcagcctcccaaagtgctgagattataggcgtaagccactgtgcctggtgtaatcttaactgctttttaggaaatggtgtaagaaaaggctgtgccataaactcaaaatcctactaatccccagttctcagccccaaaccgaagaaagattacatttccagtccagtttctaatcccaagtatccatgcacccaggatggcgggaaaagggaaaaggcggtaccttaaatgagggaaggacatctcagtcttggccagttcttactcttcccaggggccaccctcaagccccaccctgagcaggtaagtgaggcaggcaggcagcctgggagcatgtgtgggagggaatccaacggtgttctccaggctgcaagagctgggcagacacaatcgtgctgcagccctggcctgtgtttttctttcccacaaagaccaacaccggtgctgctgacatcatgacaggtttgatcatttttattttgcggtgagcgtggtgtcatggtgatgaagagtcctgtgagcttgtgcaggtcccctcaactgcaggctgtccaggcttcctcctctacagtaaagacaaggagaatggctgcttcctaaggtgatggcgaggtaggatgaggagtgtaaacggcccaccctgctcccagtggtaactatgggtatgatttccttttgggagaagacagagattgcccttctgatcctcccagctgtaaatttgggctggggcaacttttagacacaaacagggcactcctggctacagggcctcaatgttttccttgaggtggagtatctaggcatttccctgaggtttctgatgcctgggcagggtggggtggggtgtggctggttctgacagctgttccccacccagctttgtgccctggggagggagatctacctgcacatcccgctgcactggatctgcagggagctggggctgcccttggacgcctcaggcacaggccctcatcctctgcctaactgctttttacacccatcccttgagtccagggagattttgccacaatttcaaaaaagaaatgattattcagaaggcattcttctatatatttcctttttttttttttttgagatggagtttcgctctgtcaccaggctggagtgcagtggcatgatcggctcactgcaacctccgcctcatgggttcaagcgattctcctgcctcagcctcccgagtagctgggactacaggtgcatgccaccacgcccagctaatattttaatttttagtagagatggggtttcaccatgttggccaggatggtcttaatctcttgacctcgtgatctgcccgcctcagcctcccaaagtgctgggattacaggcatgagccaccgtgcctggccacatttctgtatatcttgcaagcagacacactgtctgtcttttatttgatcatctttccaaggatgctggtatagcatgtatgcttggaaaatagagatgctgtttctccagagaaagggggagcttgcttgcattcttctatgtagttctaaggcccctgctccactgtacagcaagtggccacacccttagtgtcttccttgcctaacccagacccttacagcactcagcttggaaaagacccttgcagcgctcagttgggtgccatgattatgcctgtaatcccagc

SEQ ID NO: 1885580 - DNA, 4001 bp, Homo sapiens
agatcatgctactgcacgccagcctgggggacagagccagatactgtctcaaaaaaaaaaaaaaaaaaaaaaaagtaagtgtttttctgttctacagagatgcaaatgattcctatctggtcagataaattacctcaaaggttatagttttgctgccctgtagcacattagccagtttagtatctaactttgtgatcttacgtcagcattccttttcgttctctgagtacacaaaatctttattctcgtaatatctttgaaccagtgttgccaccttgcaaagtcccttatgaatgagttacctacctcaccgatacatactcaccatatcttgtcaaggcttcatattcctttccctgtatagtccccacaaatatacactgtcagctttcaatgcacaccaagcgcccattattgattctttgtcccgagtggctcctctggagcatatgcgtaacatcagggggacatagggcttttaattgtcaaaagtatacaaactcagcacgttattccaaataatctctgcccctgctccctcacattttgatcatgccgtatctgtgatctggggctggggactctggccctcaagatgcctccaatgctctcggcccctgctaagagcctctgcccacacacggggtcatgcgcataaccttagaactctgggcacggctagatgaactgtggcacgcacctgatctaggcagcagcccacttcccagttggtcagccagtgaaggaaggctcagccccaccaggccagtgagattctccgtcttggcaaattgcttaaagacttgatagtaaaggagaaagagataaagcaggcacctgaggccccgaagcagcagacacttaaataagcagcaggaagaaggtcctggcagagacagaacacctgagttttccacatggcacacggaccttggaggcacagagggatgggccccgctactgagtggcaagaagacgaaatgtctgtgtcgtagaactgtgtgtgatcttgaaagacctctcggttcgtgaatggcatcttgggttctgtcaggctccacacaggttctactgctcctcttcctccaacaggctgagctgtgtgacttttccagggttgccatccgacctgtcatttggtctgtggcccttagtttcttatccacatgtggctgtaaaagaaactccacaatcctggagggaactcagtgggtccctacttccaatccaaaaacctcgactcactcttttactttttctaataacttaataagttaaataataataaaagaattgttaccgttgttcagccaactctttccgggctcatcaacgattttctaggaaagaaggtttccttggttagacctgcacttcctctctgtctctctccattcatgtttgagcattcattcattctccccacaagcacatcatggattctaaaatgaagaaggcaatattcgtactttgaagatgctcacatcttgcatgtgcagtgttacaagagtggggttggtgcaggagtgaaatgggaggccgtgtcccgagatggggtcaccagaacctggagtgacaaggtggaggtggggagaggagcttttcctcctggctttcccacaaacactgacttccatgcctctggcctggaaccacatgtaaccaaagccatatgttcaacttgcgttaattaaatggtggcctcagcaacatttctggtgctgcttctgttgctttggcattatgatgtcttcaatatttgttactgtgtgtcgtttgtcatgtttaacccagtggctcagattctatttgtttgtaaaacttaaatgttgagagacttctgttcttgattttttagaaaataaaaattatttttggtttattccatgagaacatatcttctataggttgaacctccaaggttcttccttcttgatttttctgggagatgactgtaatttttttttttttttgagacggagtttcgttgctgttgcccaggctgctggagtgcaatggtgcaatctcagctcaccgcaacctccgcctcccgggttcaaggaattctcctgcctcagcctcccaagtagccgggactacaaatgcgtgccaccacgcccagctaatttttgtatttttagtagagatggggtttcaccatgttggttaagctggtcttgatccacctgcctcagcctcccaaagtgctgagattataggcgtaagccactgtgcctggtgtaatcttaactgctttttaggaaatggtgtaagaaaaggctgtgccataaactcaaaatcctactaatccccagttctcagccccaaaccgaagaaagattacatttccagtccagtttctaatcccaagtatccatgcacccaggatggcgggaaaagggaaaaggcggtaccttaaatgagggaaggacatctcagtcttggccagttcttactcttcccaggggccaccctcaagccccaccctgagcaggtaagtgaggcaggcaggcagcctgggagcatgtgtgggagggaatccaacggtgttctccaggctgcaagagctgggcagacacaatcgtgctgcagccctggcctgtgtttttctttcccacaaagaccaacaccggtgctgctgacatcatgacaggtttgatcatttttattttgcggtgagcgtggtgtcatggtgatgaagagtcctgtgagcttgtgcaggtcccctcaactgcaggctgtccaggcttcctcctctacagtaaagacaaggagaatggctgcttcctaaggtgatggcgaggtaggatgaggagtgtaaacggcccaccctgctcccagtggtaactatgggtatgatttccttttgggagaagacagagattgcccttctgatcctcccagctgtaaatttgggctggggcaacttttagacacaaacagggcactcctggctacagggcctcaatgttttccttgaggtggagtatctaggcatttccctgaggtttctgatgcctgggcagggtggggtggggtgtggctggttctgacagctgttccccacccagctttgtgccctggggagggagatctacctgcacatcccgctgcactggatctgcagggagctggggctgcccttggacgcctcaggcacaggccctcatcctctgcctaactgctttttacacccatcccttgagtccagggagattttgccacaatttcaaaaaagaaatgattattcagaaggcattcttctatatatttcctttttttttttttttgagatggagtttcgctctgtcaccaggctggagtgcagtggcatgatcggctcactgcaacctccgcctcatgggttcaagcgattctcctgcctcagcctcccgagtagctgggactacaggtgcatgccaccacgcccagctaatattttaatttttagtagagatggggtttcaccatgttggccaggatggtcttaatctcttgacctcgtgatctgcccgcctcagcctcccaaagtgctgggattacaggcatgagccaccgtgcctggccacatttctgtatatcttgcaagcagacacactgtctgtcttttatttgatcatctttccaaggatgctggtatagcatgtatgcttggaaaatagagatgctgtttctccagagaaagggggagcttgcttgcattcttctatgtagttctaaggcccctgctccactgtacagcaagtggccacacccttagtgtcttccttgcctaacccagacccttacagcactcagcttggaaaagacccttgcagcgctcagttgggtgccatgattatgcctgtaatcccagcacttagggaggccaaggtgggtgggtcacttgagcctgggagtttgagaccagcctgggcaccatggcaaaacgccatctctaaaaaaaaaaaaaaaaaaaaccacaaaaattagccaggcatgaggatgcacctgtagtccca

SEQ ID NO: 1885581 - DNA, 4001 bp, Homo sapiens; identical to SEQ ID NO: 1241174

SEQ ID NO: 1885582 - DNA, 4001 bp, Homo sapiens
tctttgctctctggttggcactgaggcaccttttgagctcctccacgggcccctgagattggaccagcaggagcctgcggacgaggctgcctcaacaccacagctctgtattggttcttttttcttctctttgcctctccactctctcacttctgctccttcagtcacattgctcaggaaagagtttgcaatttaggcctgttttaggctttgctttctggaaaacccagaacacttttcataccaactggtggtgtatttgatcttccttttactgttttcttgcaactgagttttttgagcccaaatgcaagatttgacattgagatttgttacatgccatcaatgcaattttttttttaaattctgattttgccatttaacagtgcgagctgtccttcctagccttgagttatctacaaatttgctcataaaatttattgactgttaaaatctattactggtcaacctctgtaaccccatctcatgcttcaccctccttgctaactaccctccagcagccccacctccaatcaggtgcgcaaatgggccaagctcttcctgcccagggtcttgtacttgttattctttctgcttgaaatcctctttcctcgggctctgcacatggacatctccttgttatactttaaaactcagtctaaatgacacttctcgaagaggatttccatgtctattgtgtttctgtcatagcacataccccaagccatgagtactatgcctcatttattagtttgtttttttgtttgtttgtttgagatggagtcttgctctgtcacccaggctggagggcagtggcgcattctcagctcactgcaacctccgcctcccaggttgaagtgattctcaggcctcagcctcccaagtagctggaattacaggcacacaccaccatgcccagctaatttttgtatttttagtagggatggggtttcgccatgttggccaggctggtcttgaactcctggcctcaagcgatctgcccactttggcctcccaaagtgccgagattataggcatgagtcactgcacccagcctagtttgctttttattgtccatcttcctaattagggtgaaatctacaagaaggcagggctactgtccattttcttcactgctggatctccggcacatagccctggttctgacacctgccaggggcttgataaatatttgcatcacccactccacttgtgcactagatgccacctcccctcacctcctcgaggcatctctccaccggtccctcctctcttgtgcatcatcatttctcccactttcctggatcattcccctctgcagacaaatgtgctgtaatttctcctatcttaaaaaacaaaacagatagacaaaaaatcttctcttggcccacatcctctttcagccaacacgctgcacattttatttattgcctatctcctccactagggaagaagctccatgagggaatggcttgtgtctgttttgcttattgctgtatccctagtacttcaaaagtgcctggtgcataacaatttttgagttgattgaataaatccttttgtggaataaatgaataaaacagtaaagcctttttcaatcaatagagagaaaaatcagtcttatatcttgagcaatgtctaaataacttaaaagatcaagatggaggctgggcacagtggctcacgcctgtaatcccagcactttgggaggccgagacgggaagattgcttgagctcaggagtttgagaccagcctggacaacatagtgaccctgtatctacaaaaaataattaataagaaaagatcaacatggaaccaaaaaacaaatatacataggacagctctataaagatatgtagcaggtacttactgtgtatgtgtattttccattctctgccttctaatatgaaaaggttgacaggatagtttgagggagaaaggaaaatttgccatagattcctcagcatcaggataacctcattgccttagggcaaaaaatgaagcccagaggtagtgacttttcccaaactcagtgtcctcccttctaagggcttagggcataatcttccacaaaacacatccggattgctaactcacagtaaaggaaaagttcttacgtttacatagaacccagatgccaggaattttctagaaaatggacgtgcagtaatagtgccggccaggagatggcgacgcgcctttctgtccaggaggactacactctacgtggcactgaaggactgggagagaaggttggggcctcctggggccagccaggggcctctgggggaggatggcctagaaaacagggctctgcttcagaaggctcattcttgttggcggggcccccatgagtaaaatagttgttgttgaatatgacacattgttaaggcctcagatgcaagagcaattacaagtccagggtggttggcaggtctacagtcaggatatttaactcaaattcagggagtctgaaaatctaggacagctccttggcaaccccggactgacagatcttttgttcgacttttcctaggtttaggcaacagcctctgagagcccactagatttcctccaacatggagactcaacctagccaacattctaccacaagaatcagtacctgggctttggggtccaccaacgcttaaaattgagtaactgagtgcaagggttgcaggtaggcaatgtgccgatagacatttacatttcctagagagaaagtcctttgttccatctctttctccaagggctctgtgattcaaaaaccgggacaggcacagtggctcacgcctgtaatcctagcactttgggtggctgaggtaggagggtcacttaagctcaggagattgagaccagcctgggcaacacggcaaaaacttgtccctgcaaaaaatacaaaaattagctgagcttggtggcacatgcctgtagtctcagctacttgggaggctgaggtgaaaggactgcttgagtctgcagtgagcagggttgacaacactgcactacagcctgggcaacaaagtgagaccctatcccgaaataaatgaatacataagtaaataaataaataaataatttaaaaaaaacgttaagcaactactccagtctttcctcgctagaggcctcactaattctttaccccagcaagtcctctgggatactgtaattctccattttttttttcattgagatgtgtctcactcaggggacagaaaacaccatctgttatttgaacagagaaggtaatgtaagaattactggggccgagcacagtggttcacacctctaattccagcactttgggtgaccgatgagagaggatcactagagtcctggagtttgagaccagcctggaaaacatagtgagatttcatctctacaaataataaaaaattagtagggtgtggtggtgtgtgtctgtagtcccagctactccggaagctgaggcaggagaattgcttgagccccggaagttgatgctgcagtgagccatgattgttccacagcactcagtgtgagtaacagagtgagatcctgtctcaaaaaaaaaaaaaaaaaaaaaaggttgttaactagataactaaaagaggacactaaggtgtcacagtaaaagcaactgcaggttggccgggcgcagtggttcacacctgtaatcccagcactttgggaggccaatgcaggcagatcacctgaggtcaggagttcaagaccagcctggtcaacatggtgaaacctcatcactactaaaaatacaaaaggtagctaggcatggtggcacacgcgtgtagtcccagctacccgggaggctgaggcaggagaatcgcttgaacctgggaggtggaggttgcagtaagccaagaatacgccactgcactccagcctgggcaacagagcgagactctgtctcaaaaaaaaaaagaccaggtatggtggctcacgcctataatcccagaattttgggagaccgaggcaggcagatcatgaggtcaggagtttg

SEQ ID NO: 1885583 - DNA, 4001 bp, Homo sapiens
taggtattttttacccccaccacttacatattcattcaaattctgtgcattcatttatgaatattcattgaaccagacccgcagaaagtgctggatatagaggtgagaggctatcctttaaagggctcagagtatcagtggggagatgggtgaggtcacaaagcctgagagcacaacgtgagaggggcatgtcctacctccccagattctgggtctcttcaggtacagctcagtcaccagccaaaccctctgaactgtgtgctatgtgatatttatatacactttgcaagcaactctgaaaaatcatgatgtagtatatagacaagaaagatggcagattctagggccagctggaaggtgggagagttggatgccatggggaaagtggaatccctgaacctggacctttcttgaggaatttggtgagccctggacctaggggcaacaggacacaatgggcacacactaacgtgggcatcggagccctgtttctgggccctgcggggtcccatcatcaagtggtgactctttggcttgaggatacaattagattttgtcttaggcattgtccagtggcttctgcactgtaaatattttatgactctctcaaaacctgtgtgattaaagagtcatgtatgcaaacccttgatcttggctgaacagcttctccactccctaattctttctgacaatgcttttaaataataatgctttccaattaaaaaatactttccttatctcttttttcacttttgatttgaaaaatatcttaattttaggttcttattgtctatttctattctgttttcatcacagaatagtcagattcacagctcagaagttgggctgtccgcctttttgataggtggccaattgatgttctcatcctaagtcagctctctgggttgccttttccatacttagggaggtaggattgttattagtagcagaagcagtgactgcattcatctattaacttctgaatagcaggaatggtgtccttttcttccagaacacacccctagtgctgactaagaaagggtgaactactgaacatattaatagaagccatttaaatctgcaacgtatattaagcatttacatctttaaaatattgtttccatttatttaatgtgagactgcttatttgttttcctgcctggtgcttagcacttaacaggcaatcactcattcattttgcttaaccacaaacctatgtgctgttgttatctccatgctagggatgagaaaactgagacttagagaaattaaatatttttcctaaggaccttaaaacaaaagtctactctgtagccacttcctcctcagctacccctttgttaccttccagtttggatcctgcccctattgttcttataaaactgctagatgcaggcttccccgtggccttttgttaggaatttggtttacctgcttgtcaaaggagacagaagtttgagaatgcattagcttcctagggcagccataacaaagtaggtcataaactgggtggctcaaaacaacagcaatttcctctcccatagttctagagggtggaagtcagaaggcaaggtcttggcagggccatgctttctctctttacttccagttgttaccagatatcttagtcgtttttctgttgcttgcaacaggatacctgaaactgggtaatttaaaaagaaaaggcatgtatttcttacagtcacggaggctgagaagtccaaggtcagagggccatatctgctcagggccttcttgctgctgggaactctgtagagtctcatggtagcacaggacatcacatgatgaggaagtggagcatgttagcccaggtatctcttcctcctaatataaagccacccgttcccctcctatgataatccattaacccattgatccatcaatggattaatccattcatgagggcagaccaatcacctcttcaaggctctacctctccatactgctaccttggggattacatttcaacatgagttttggaggagacaaatcttcacaccatagcgtcatcaaccgttggtatttcttggcttgccattgcacaaatctaatctgtatctctatcttctaaatgtgttccccttcctgtgtgtgtctgccttcaaattcccttctttctataagaatacagtcatactgaattagggaccactctcataaccccatctcaatgagattgtattggtcaacaccctaatttcttggaaaatgttggtaacttgatgcatgtaaacaaactcttttgtaagagcctctgtcacatgggggcctgcgggcaaattctaccaagcagagaacagttttcactgcaaaaactcaaaggaagacaagcttggtaatgagagctagcatttattgaccgcttactagtgccacgcattatgcgggtacttgtgaaacataatttactcttccctgcaaccctttagatattagcatgtcccccattgaatagatcaggaaactgaggcaccagacacatagaaagaaagaggcagagaaggaagacaaagcaggcagtctggtttcaaaagctcagctcctgatcaataagctctactctcccctggtccttttaaagagggagcttttactacctgtcatgttaatgttggggattcccaacccaatgaaggccttccctgttagcagttaatcattcagtatatgcctatatccctttgctaaggatgtcatacagagtttcacaaactgggtggcgttaaaaaaaccggaaaggccgggcgtggtggctcacacctgtaatcccagcactttgggaggccaaggtgggcgaatcatgaggtcagaagatcgaggccatcctggccaacatggtgaaaccccatctccactaaaaatacaaaaattagctgggtgtggtgttgcaggcctgtaatcccagctactcgggaggctgagacaggagaatcgcttgaacttgggaggcggagattgcagtgagccaaggttgcaccactgcactccagcctgatgacagagtgagactccgtctcaaaatcaccctaatttcacttggggataagtacattgttagtgaagaggtcacctgtgtagaaagagttagcagcgcccacactactcacatgttttgtttggtttttgtttttaagagatggagtctcattctatggctcagactggagtgaagtggcatgatcatagctgaatgcagcctcaaacttctgggcttaagtagtcctcccacctagatctcctgagtagctgggacacaggcatgcaccaccatgaccagctaattattgttgtataatttttgtagagacagaggtcttctttgttgcctaggttgcctaggttggtcttgaactcctggtttcaagcaatcctcccacctcagcctctccacatgctaggattacagacatgagccaccatgcccaagattgcatcactgccacaagactgtcactcctcatgttgatcagcacaccacactcccttatggacacatgagcctgtgtcataatgtcccctgtggtccaaaagattctgcaatgaggctacatgtcctaaactgaatcactgtgagattaaaaagtctaagtttcaaaaagttgttttggatttgtgtaaaatacttgaattatgtctcttaacaacagtaatgctgagattggccctttgtgtttcctcggtgctagggttctgctgctcttgggacccagcctggtagcatgacccccacttccccagctcccgcagtcctcccagcctgtgagtcaccatcgattcttccagagaggagtcactctcatcaaatttgaaacctcgtgacactctatacccagcatctggctcaccaatcatttccggctagtgggaaaggtcctgatggttcaaggttgaaatgtgattttaataaaaataatgctaaaatgagattcgtgaggagtgcattctttagcttatgggagttgagcaaatatttgtggcat

SEQ ID NO: 1885584 - DNA, 4001 bp, Homo sapiens
atcaaattcaggatttttcttttcaattatagattgtaagagggtagtaatatgtacattttaaaaaacatatataggtgcatatgtatgtgtgtgagtatatatatatatatatacttaacaacgagtgaggtccatgaaattgggttatgggttggtagtcacaactccacctgtagcacccctttaccacacaaatgtcaaaacgggatcacagtgtggaaacagaagagtgcaggatatattagaatctgaaatctttctcaaggatatgaggtgcctggtagaactttatttacatgttaggaaattttaacatgagcttttcaagaaatggaattgaaaagtccagaggaagaggtgagtttataactattaagcatactgaaacaaatgaggtttggaattttgcactaagtttgttaagctttactgtgtttttgctatggggggaacttggatttttctttttttttcattttatcctctgtccttaatatttttaatatttggagtggtaattactgaaaattggagagggacatagagtgacttagggagggcaaagggaggttttttttttgtttttgttttttgaaagttctaaaacctgaaaattattctggagtcttccgaaaatgttcagacacatttaagaatttttattgagtaatacaatgttctaattgaggcatacacgttgttctaggagtctgtgaaattctaaagataaaagtttgattatgcttgttttgactttaatgaactattcacataattttaatacacagtgtctaacacgtatgaaagttgtgtaataccttataccttaacaatggagaattactaagcaattttggctactctgatattagcatttcctgaaactcctcaggctgatgtggcaaaggagaaatagcaatcttgagttctgaaaagctaggccgcattttggtcctgaaaaatcacttgctgtgaacttgggccagtttttgattttttaaatggcataacagttcgttgctacaagaggttacatcaggaaaatttcctaaggatttaagattttgttcatctattgagttcttttgggtgatttgtttaggaggaagtatctgctcctttttgagttgcttcaccaaagtacttgagtgagaaggcagaatataatgagaatgatcatgctggcaaggaagacatatatatgagatgggttatcctttacacctacgtcagctaaaaccgtctcctacgaacaaatccagcacttggcactttattcgacggtcctaaaaatagagtcctaaatttagaaggcaaggtgctacttttagctcctcttctcggaggaaaacagcacgcaccgcgccaggccaaggtccacggggatttgatttagcatttgggtaactggccgctaatggaactgaagacagctgggcctaacaagtgcccaggtgactcaggtaagcgaggaaaccagatcgaggttctcttgcgtgggacaggttaaactctgaccaaaccacagctgagccgggacgccttcctgtctaaagtccaaagtccggacgtggttggcagggcgcaccggcgcgtgccccgcaggccatttttctgactggaatgacggcggcggctggcttctcggggctgccggggtctcccggggtacgccgccgtcaggacttctgcagggcgcagacagcaggctccagcgaggctgcggaaggaaagccttgggtgtcggggctgggcctggcgtcggcccctgggtcgggggggtgggggttgcgccgagacgcctctaggagaagtctcgccgccgccgccaccgcggccgcccgaggcgggtgcccttgggacatagccctggtctttggggttgtgcggctcacacgacagcgcggagtatgaggccgaatctcatcctctagtcccaagcctctccactaccagggctgggtggcttcgccaggtagagcgccggcccctttaagagcaaacgacccggacacgtctgcgaagcttgcgcgaagaaggggaagtttgcggctgtccgcgcctccccgccttctcgcggctgcccggccgaaaccaaaccgaggggtggggtggcgaggacagggtacgtcgcaggcttgtgcgggtcgggctcggacctgcgctgcctcgggatgtaaagtataacaagagggtcgggatgggcagcgtaggcctgtgaggcctgcgggtgcccctgtcccccagctccccccgcagccggctccgcagtggtccactccggttgccgggtgcggattcgggttccggaccgaaggctgtgtgttctccgccgtttattgtggccccgacaggccggggttactgtggcgaccacgagagcagctttggcgctatggaggagcccggggttacccctcaaccgtatttggggctgctcctggaggagctacgcagggtgagcccaggcgcgatgagtgttacgtggcccaggggtcgcgggagccgccgggggaaggaagcagtagaccggctttggggtctaagccgccgtggtcagaggtcccgaagccagtcctcgtctgctgcccggctcccgcccgtgttcgaggcagtagttaggctcgtagggcgcttgagtggtttttgtgtgatggaggaggacctggggctctgggaaggtgaagaaagcacttgcttagctggactttgcaaagatgtaaatgtttcccgattcctaaaactaattagcctttccgctatgttgtttattttgagcagagacacgtggttccttcgactgtgagaaacttgaggactgttcctttaaattagttacatttactgatgtaacttctcgttgaaccttgaaagaacacctgaggttgggcggggagttgaaattttgattctgcattttttttttttttggtaaagaatgaatgcccttttgagatgctctaccatgagtgagattgttcttcgcttctgtcttgttaatgtacagtctagagatagtaaactcccagtgttcaaattttgttttttatttttcaggtctagtttataatcaagttgtagagatttttctccttaagtgtttctaggtatctttgttgacatgtgtaggggcatttatgtcgccgtgtttttaaaaactggattaaatctttaaaaagaccacttaattattgaggcagttacgattatgttttcttgttaggtgaattaaaggtagtgttgccatggtgtttatgagttcatagtttgtctaatgcatacgcatatatatgtatttaatatgaaaagagcacctttatggagattctaaatggactaagacttagttttggccactagcatcatgttgtctgttaagagagagaagacaaaaaaaaaaatagtacaaagtagaaactgatgaagtgcttacctaagcatacacacacagtgcagggaactaggagctgtattacttagagtgtaaagtgggcttagggagtgatgggcaatgatgcttgccggagatgtaagtaggttccaagtgctgtaggtgttggagagctcttgaaggcttttccgtggttagacttgtggtttaaaatttaagctcttcttgatagtagcatgtagattagatgttagggaaacaaaacttgaaatagggattaagggagaggtgacagtagtaaggataggaaagagggtactgtgtggagaaatagcctctaagagctaaaatatgtttgactttattgattgcatgtgaagggtgagagagaaggaatctagaaggactcccaggtttctggctgtggtaacttattcatggaggtagggtttttagaaagagaagcatatttccctttcttcactaaaaacaataataatcaagatttagtttttataggactgccagtgtacatggagaaatgcagaaatacatggagaaatgcagccagattttgcagttttctctagtctggtgcgttgtatct

SEQ ID NO: 1885585 - DNA, 4001 bp, Homo sapiens
ctaacttcactgaggctctttttatttgtacatataactatgaatggacaagcttatcccttacaaactatccaagtttcagttctgagtgcctaaaggcccctgaggtcgagttaagggtcagttgctctccttccggaactactttttctctgtttaactctagttgcaagcatgcaactccacattccaggcacttctcaaaaatggggtgcactgggttctacataaaagcattaaagcgaagttaagcaatctctttatgcctaagtttctaggtctaccaaccttatcgggacaacgcgggagttaatatggagggctgtgttttacacccactttgaaagcacggcattgtctgtttctaaagaattgtaaactttcatgtgttacattacagaaatctgaacggagaggattaaccaaataccatttggacttaaaagcagcttgaggccgggcgcggtggctcatgcctgtaatcccagcactttgggaggccgagacgggccgatcacgaggtcaggagatcgagaccatcccggctaacacggtgaaaccccgtctctactaaaaatacaaaaaaattagccggtgtggtggcgggcgcctgtagtcgcagctactcgggaggctgaggcagaagaatggcgtgaacccgggaggcggagcccagatcgcgccactgcactccagcctgggcgacagagcaagactgtctcaaaaaaaacaacaaaaaacagcttgaaacctcttccagccactctcccagagtgacggacatgcagaaatctgtattccagcctcaattcaagacagccttctagctgcagtcccattttcaacatttcatcagtgaaaatcctttcatttaaaaaatacttcagtgccttagtcttctcaccacaacaaaaccacacagctgtggcatggttgaaaaaagaactcgaacatctaggagctccctgctttgagggcaaatttaaattgcaagcagcaagagctaaggaaaggccaggtatttctgcaaagctaagtttctcctaattagtaatcttctgggtgtctaagaaaaactttagatacaagaagggttgccacttttctcaggagactcttctgggagagatgatgatgaaccgaacgccaaggacttagcaggggcgaacgacgtcaacagatgtccctccagactccggcaccagccggccgagcccaaacgagttctcgcccccgaccccacccaccgcgggagcagggttcggtcactcgcagtgtcagagaggcccacatcctcctaaatttccggccctcccaaaacttccgtcttccctaggtccaacggggtggacccaaggcccaggggcgtccccggaagtgacgtaggacgcgccctccattttgtggagcgccagagctgctaagtgcgtcagttgtggagtggcgtagacgagttaagtcctggtctgcgtggaggtcgacgactccgtcgcagactacggacctgtctgggtctcagccgccaaagaccccgtccggtaggtgagtggctcactttgagggcaagccttctcggatcgaggcttcttcatggccgctcagatcgtgagcggccggggctgctctctttgcggaggatggcgtctaatgagcgcagttgattcgaggtgggcgctggggcacgtctcccttttggcatactgtttgaggggtactgaggtgaaagggcggtcactgttcgggtcgtttttacacagcggttgtgcgcccgtccctgccagtcttaatgtcttcatctcctggacacgtagaatagtgggccgggatctccctgactttgctggcgatgcggctgggccttttgtagggcggccgcagtgacccccgagaagggggttgctgggaggagaagggaagagggaatttggcacgcgcagctctgctgcctttgattccaccgccgccattttgtggccgcagagcgcccgcccgctgctgttggcgcaggcgcggtcgaggcgtcgcgagattctggcttccacccgctgtgacgcgcccgcgaggccgccattgggctggctttgcggagggcgcgggcggctccgcccgcacttctcggcctttcctaactgcggcagatgggagggggccggagagcccggagagtgtgcggctgcgcagttggaaaggtggcagtgggcgttgcggttgctgcggtctgggcccagtagcggaccgtgttgggagggagctgggttttcattttgtctgcaggtaacctggcctcattagaggctctgttggcaatctcgttcataacatcactgtgtaaacattttatgccgttgatgtttttgattgtttaatcaggcgtttctctgtgacagtcattgctattatctcgattgaattactttctaataggaagtactagccggacatcatgagtggctgtcgggtattcatcgggagactaaatccagcggccagggagaaggacgtggaaagattcttcaagggatatggacggataagagatattgatctgaaaagaggctttggttttgtggtaagtatttagaactgggtgaattatctgctaagtaggtagagttttgataagcagttgttttcgatcttgagtccgggtggaatatttgccttcagaaaatgttacccagccttatgtctgaattttattgaggctgaaaacaactttaacttgccggctcactggaaccccactcccagtggctccttgattaggtttgactgtatggcagtgtcgttaagatactcttcccattctgtctcctgatttcagtgctcttaatgtgttgtagaatactcttctaaagccaatgttaagagtcttatgcttacattttaggaatttgaggatccaagggatgcagatgatgctgtgtatgagcttgatggaaaagaactctgtagtgaaaggtgagattcctgtgtaactagataaccctgggacatagagcagactgggtctgctggcatatttttctaagtagatttatgtagcttaagtgtgtaacggagatttttcttccctttttgtagggttactattgaacatgctagggctcggtcacgaggtggaagaggtagaggacgatactctgaccgttttagtagtcgcagacctcgaaatgatagacggtatgtgaagggtggatggctgcattgaacaattattgtaggggtagcatttaagattcaggagtcattagcagtgatgattttgggtcctgccgtataatctgttcttctattcccacgttagccagttgttcttgatgaatctatatgagtcatagaacacaaatctattgacggaagtcattagaatggcttgtgatatctgatggcttgaacttgcccacagttgaacacaagtgctgtcattgcatttcttccattgtgaatacgaattttcttcctcagaaatgctccacctgtaagaacagaaaatcgtcttatagttgagaatttatcctcaagagtcagctggcaggtttgttgaaatacagttttgagttattttgatgtggctttttaaaaaagttaatgggtagctaatgttgtattgttttattaaaagtagttttaaattaatggatttaatggaattgtaattttaaacatttaattaaatgtaatttgggggatattttgaactttaatattagtgatcaaatgtaaatgttttgaggatatttttcttgttttttaaaatcaatttttaaccaaatattaaaccctttatttgccagcctgtctgtgtcgttggccttatgacgaggagtgcctgtgggttatcctaatcgttgtcttggtcactcttggttgggcctggttgactttgccagtcagctcctacagtgatcagttggccacctctagatctgtgtttgccggtctagacgttatcggtgcacttccttgaagtgccaggttgcagcgatcccagagcgttg

SEQ ID NO: 1885586 - DNA, 4001 bp, Homo sapiens
cacatctagcttgtaaaaagtattttttatacatcagcaactagcctgtgaagtaaagacctgtttactatcatattccttaatacttagcttactgaacttatagttaacaggattgtattcaggctataaagtgattaggttgattaaagttcaggaggctggactacaccaatattgattcgtgaaaattatcccttagtgatattgaaagttgcaaaagccagaaaatagggtaggattttaggggtagatcacaacagtttttatttattttcagggtcttgctctgtcacccaggctggagtacagtggtgtgattatttttttttttaactgtaattatatgctgggcttgagctaaacaatctgaactagaatgtagaactgaaaagaagtgaggaaaactgagggggaggaaaaaaatattttgactttttttttttttaaccagggagtgagagtcaggaaaaggagactggaacaattggacattgttccaagtagcttttacatcatctaaacctgctgcatatcttaggtatttaccactctgagcactgtataccactagaaggggaatgaaaccttagatctgtagaggaaaactattacagaaactccaaaagttatagaaaattgcacccagcattagatagatggtactctacactaagaatctgctaaatgaggccaggtgtggtggcttatgcctgtaatcccagcactttgggaggccgaggcagatggatcgcttgagccctggagttcgagatgagaccagcctgaacaacatggtgaaaccccatctctacaaagaaatttaaaaattagctgggcttagtggcatgcgcttgtagtcccagctatttgaggatgggggtgctgaggaggatagtttgagcccaggaagttgaggctgcagtgagccttgattgtaccactgcactccagcatgggcaaaagagccagaccctgtctgagaaaaaaaaaaaaaaaagattaaatgaaaacttctacaattgggattggggtgaatccaactaatgtattattaccctaaatgtacagttgtactaaaagccttctagtaactaaagtgaatggaaatagaatacctcaatgaaactggaagaaattactccagtttcataagatccctcttgggcagtactttttagtcactagttttgctttgggattataggctgacattttctgattattagacagtttgccaatataaagattgaaatggaagaggatttttcattatcagaggactagtcaccattcctcaaacaatgcaacctttgaacacttttgctatttacttatcccatctcttgtgccattcttccttgctttaatggattgtgactctgactccagtatactgtttgatgcaggccaacctcatacggaaaattttcaccatccgcatttactgtaggattttaaaaaagatactgtggatcaggttaaaagtcttcttctattcctagtttataggtgtgttctgtcattaatggatattgaactttatcaaattatttcttatcagtgatgacttacctgttaatgtggcgaattacagatatagcagagtttctggtttggaccactcttttgccactctcgtcacaatgactgtgaaaacttaatttgttcaggggatttaattgtccagaaattagtaagcagttttcgctgcaactatgtaacagtgtatggaaaacatatagacataattccatatattagctagacctgattttcaattcactttaaaatgttttcattgtaggaatcactatcttctctgttggtgtggcttgggcacctctggatgacctgaaagatatggcttctaaaccgaaggagtctcatgctttcttcacaagagagttcacaggattagaaccaattgtttctgatgtcatcagaggcatttgtagagatttcttagaatcccagcaataatggtaacattttgacaactgaaagaaaaagtacaaggggatccagtgtgtaaattgtattctcataatactgaaatgctttagcatactagaatcagatacaaaactattaagtatgtcaacagccatttaggcaaataagcactcctttaaagccgctgccttctggttacaatttacagtgtactttgttaaaaacactgctgaggcttcataatcatggctcttagaaactcaggaaagaggagataatgtggattaaaaccttaagagttctaaccatgcctactaaatgtacagatatgcaaattccatagctcaataaaagaatctgatacttagaccaaaagcaacattcgttctctaaccattctgtattgattatataagcaaaatgaaaagagaaacttaaatgaacacagctctttaacatggttcaggtacacatattttgacccaagtggatattttcttaaaaccaatcaataatagctagctattactgcagactataaaatctggatatagaaaggagacctgtatcaaactgcttttgtagtgtgttttcataacaacttatgactaaaaatatcacactgaataagagagcaggattgccaggtatttttctatttctctccttaattttatatgtatatagatatatttggcttatattctaagtcacctaagtacttaaaagttaagttggtaaagtatttactgactgcttataaacatttaaagacaaagacatttcaaataactgcagaaaaaatattgtagtttgaatatttaagcaataaaactgctagtgagttattgtaagctggcttacttttattactgctagtgtctcccctgaggatatggtaaaaattcatgtggaaagaccaatctgaattgttttttaaatcatgtaataataccaagaatattttttctttgattcaattatttattgaggccaagcacagtggctcatgcctgtaatcccagcactttgggaggctgaagcaggaggactgcttgaggccaagaattcaagaccagcctgggcaacatagtgagaaccccctctacaaaaaagaaaaaaaaattagccgggtgggatggtgcatgtctgtagtctgagctacttgggaggctgaggtgggaggactgcttgagccgaggaggtcaaggctacagtgagccatgatcacaccactgcactccagcttgggtgacagagcaagaccctatctccaaaataaaaaaaaaaataaaaagacacaagtttatcgaatacctactgtcctaggcattatacacagccactacctgattaaacagtataagatatttttgagtacttgcttcaccagaaatgttttgtaattgacatcattttttacttaaaaatgcttgtgaagttggttcctatgaaaggagaacatcaggactcccttaatgtgacttagatgattcgcttaccaaggcctctcccaaaagacagaggtgctctatcatcccaccttgtctgtcttttctaaagataggtcctatctcctcctctcatccacctaagccccctgaaatgtgttaactggttagaataatatactccagtaaatcttctgagtcttacaattttataccctgcataagaggaataaaaggactacatgcagggagaaacaaactggaattgactttttcactacataaaaatttgaatttgaaaatagagtttgagaagacaacctccccttttataaaatgcttcaaacatgactgaatcatgtaacagggataattttaattaaacatcataaaaactgggtttagcatagtatgatttttccccagtaagtagaccaaaaactctcagctaggagtacaaccccttggaaaattaagctctaatgaaaacccagctaccactcattagcccttttaagaaagtggttttttctttaattttataaaggaccaagttttgagtcacctgaagtaaccagggaatagcagcaagac

SEQ ID NO: 1885587 - DNA, 4001 bp, Homo sapiens
tacatgccaggcactatcctagatactgggagtacagcagtaaacaaaacagacaataacaggagctcttgctctgatgaggaaatgattaaaaaatgaagtaagaatttaaaatatatgtattatgtcaggtaagtaccatggagaaaaacagagaagaagagttgcaattttaattatggcagagaagaagagtgttgctggcaaggtgacattttagcaaagctttgaacaaagtgaagcaaagagtagtgcatctgtctggtaatgagcattccaggcagagggaatgcaagtgtggtagcactgagacaggaacctgtaagcattcctgggccaggcagggaaaacagaggccagagtgggtagagtggaatgagtgaagggatggtggcaggagatgctggcagaaaagtagcaggactaggagagaggagtggtccaggggaaccagattctagagccagtcaacaaaaccccaatttgagaatttactagataccattctaatttcagaatcctcctatcctgtgttataatccaaatatgtcctactgacagtgaatgaaggaaatgtctataagctctcaacctcttcctctttaaaaagcgagctgccagcgctgtttcataggtgccgtgagtcgaacagaatattttggtcccttagacttatcagttctcactaaacctggcgtttttttaagtgtggtatttgaactaaaggaaataggctcattcttagattgtggtaattaaggttatgacattatgtaaataatcatgaaatgattattttaccatgtgagttttgggaaacttagattcttaaagggaaagcctttgatttgggtctctctgtgttccagtctcctttgacttaagcatctttatgtttcagctgacttctcccttagcatttggattatctgtcatatgcgtcctaagccttttgttttttaaagagaaagcaatatgttaattgaattggatcctaaccaataataggggatacttgtgtaaaaaagaaagaaagctttaaatgtgggacccaaactctatttaccctttgttttctgtatttctactataaattaaacattttaaaaaatggttggctgggcatggtggctgatgcctgtaataccagcactttgggagacaggcaggtggatcgcttgaacccaggcgtttgagaccaacctaagcaacaaggcaaaactgcatctctacaaaaaatacaaaaattagttgggcgtggtgatgcttacctgtagtcctggctacttgggaggctgtggtgggaggatcacttgagtctgggaggtccaggctgcagtgagctgtgatggcaccgctccagcctggatgacagagtgagaccctgtctcaaaaaaataaaaaataagaattacctttttcttgaggaaaaaaatcagtaataattgacattgtattgcaatgtaaaattaaatccacacagcagttgtataaggtatggtactgttatttgacagttagttattactgctgttgctcctgtcagtgttgttaacaggctcaagatcactatcccatctgtaacaggacaggggctagaactcaggattgccagttgcaagttccatctttttcctataccatatgtgtaagcagtttaaggatattttaaagaaatcttgcttaaatacttgtatcttgtcattgtcctgggagcttcccctggataggcctattaatcttggcagtgtgtcataccacggctactacagaaatgctatcctctgaggtggcgtatgtaggtaacactgaaatgcagggtattaaggatcatttaaagcctataatttctttctgagttcacatagttgctctgagctcaagaaaatagaccattacagttggtggttcatttgggttttgccataggtcccagagttagcaagtagaccctcgaactctgttgtttgagtcttttgtgttccttgcagtttctcaactgtatgtggagttccactgttgttccactgggaacaataggatggaattagaatcatcagccagccaaccagagtaatggagtaagggcaagatcaactgtggccccctccccgctttttttttttttttttttttttttttttttttttttttttttttttacagagatgctacttttatagaaagtattatttaagtgtccttgcttgggtactagggagtgttacacaatggttcactggcactaagctcaccatacttatgttggggagcaagacctgatagccagcctttacatgggagtataattctgtcctccatctcataagccccagtacctgagccagaatgattataaccaaccacactgtctctttatcatggatggctttagcagtaggttattttcatcattgccatttgtagctctacagtggtttatagtaatttctcatcttttaagtctctccctcagtgcctgttgttatcaaactcattgctctctcaggcagttgagctctgcatttctcccttatggggagagctgtgttggagagagagaatataacttcaaatgaaaataaagaaaaacagaatttcttgattttgaggtgagaatttgagggcactgcctctgtcagttcctatcacagattctggcacatagtaggttctcagttagtaaattgtggtggagagagagagccagaggaaacagcaggcttgctcagccattaaagaaaacagcaacagtcaatattatgtgctcaactatataagtaagaccttgtgagtgctgtagaggttaaaagacataatagatggtgtctacccttgagggtcttgctctgttgttgggaaagaggattacatctaacaattaacaataatgagataacatgctgagcatcagataagagctttacattgagttaatctcagtttcatttccattaaaatctggttttcttaacaggtagatgttgaaaccaaatataatagttcccttatggcagggaacatgattcttaaggataaaggctctcatagcatttatacttttatgtacacacatttatatattatacttaatatatgaggttttatatatatttgtgtgattattaaatgactgtctgctggcactacactacaataagtaccgtgaaggcagggagaatgtctccttttggttatatttcttccctcagtgcctgcacatagtagggagcatagtgaatatttattaactgaggggaggaatcccccatcaacctggccacattattttgggagatggctcattcctgttgatgcgtttaaggctgacagttcattcggtaacctatgtctatagcatatctgagctgctagagggattgtcgtttaaatgaaatgtaaactatagccctatccacttctcctcattactcattaaggttatattagctagtcagactccaacttgggcaattatctttttaaagtttctacatcttaaattgttgcccatagttgcccaagtctcccttaggctccaggctcagcaattgtaaatgcatttaatttcttataaattatttgcatgctgctgaaaacctccaagggcttttcattgcccatttaggtaaggactggtattccatgttctgtaaataagatacccagcttacctacctgctttttcgcctccttcctgacattaaccttccagttactatacacccttgtattagtccgttttcgtgctgctgataaagacatacctgagactgggcaatttacaaaagaaggaggtttagtggacttacagttccacgtggctggaaggaagcctcacaatcatggcgaaggcaaggaggagcaagtcatgtcttacatggatggcagcaggcaaagagagagagcttgtgcagggaaactcctgtttttaaaaccatcagatcttgcaagacttattcactatcacgagaacagcatgggaaagacctgtccccgtg

SEQ ID NO: 1885588 - DNA, 4001 bp, Homo sapiens
gttggcaggcctagctccctttctaccaggctgccttaggacgtggcagttggcttcccccacagtgagtgttcccagagagtgaaaggcatagagaggacccagtatggaagccgcattttttttttttataacctagtctcagaagtaagatcacatcactggccatattctatttgtcagaactcagtcaatggattcagcttacacttaaggagggaggattatacaagggtatgaatacctggaggcagagatcattggcagggggcgcatcttagaggctgtctaccacatcctccacttggtgccctggtactccagcaactgccaccttacatagagaaaaaagcaatgtatgtgtaagtgtcaggccttcacacatttacactgtctgctaattactcctgggcatgcagaaatactgaatattcatgaaattgtgactgaaaatttggaattgcatatggaacaaaaaaaatattcagctcttgttttagcaaatatggagtatcacatgattgcctttagaagcctggctaacatattctctcattggttgccttaagcagaatgcactaaggaattacttctatttattccaaaattgaaatgggcaatcccttcaccatctccccacaatagcgtgatgtaagaagaatttcagggaactttaattattgagtctaatgatgcagttatttctcaaagcagtattatttttcttgcattgcacattttgtatttataatgtgccattaatgtcttagtaaaaatcagaactagggcgtagcagctgcaacgtggaggatttcatgttgctaggagagcttcgatcttcatacgcctatctttgggtgagtctgtggctttccatgagagattaacacagacctggggatcatttcccaaatgtcattttccatcagtcttacatccacctttctgaacaaagccttcactcaagtttatggtttcctgtgttttcataaaaagatgaagcattgaaaggggggaggttttatctggccaatgtgctaggagaagcagtatttggggaaaaaaggaaaattgttgagccctaactgatgcttttgaaccacctattaaaaggtccctgttttccacgacaagctacaatgaagctaatgtttctgttatgaaagcccttcactgcagtttcgaatgtctttttttttttttttcaccagcaaaggctaaccccgttttttctccagccttatgagatcaggagttcttccttgaagactgctgtttaacgacttggttgctacttatcttaaaggtggctttccgttgtactttttaataaggtgagcacatttattttgagcaatgataaatttcaggattactattgcctgaagctgcccttctcaggcctccaccctaccctcaaagtcacttttgaccggtgatgaaacacagaatgcatcagactctattttctgtgagttgagtgtaaagaggtggaaatcgcgggggaggattagaacagaaaccattctgcagccccagcttgggcgttgaaatagcccccagaagtgtgatacgtggtaaacgtcttgctcacttataacccgtagaaatgacgagggacatcatgcagacttttagagagaacgtggggacagggacccttgttttaaggcccactttaggcattaagaacacatagagcacactgctttctgacatgacccttttagccccaacaccaaacggaaaaactttttctttcccctcccccaccgctttgtttgtgtactggtgtttaccctggaaccccagctttccggggaccctgaaccccaccaccaccttccagaccagcctgagagcaggggactccagcgcggggccccggatcgcacttcggcgcggaaacgacgcggctggagcgaggcttccctcccagggcggggggtgcaggctaggcggccggcagcgcagggctgcccgctaccccgcagccgagggcgcgcagagtggggagacggcgcctggggccaggggcgcgcggagccgggggcgcgggcggggcggctggctgcagggccctgcgcgccaccgcgcgagccgctgggtcacagcccgggccgcacagcccgggccgcaccgcccgctccgcgaggaagtgacgactgcgccgtcccgagagcaacaaagttagagtctgcgggccgcactcgcctgcgccccgcacccctccgagcagcccggggatccagcacgcaggtaagccgcgggctcggcgccccctcccgccaccgggcgccggcgtggggctcggaatcgttccggggctcgggctgggccgcgcgggcgcggatgtggcgggccgggttgggccgggcgctggggtgccggggtgctgcagggagggagctcggcggccggggtcggggcgccgggctgcgccggtgttgtcgccgctttgccgcgggacttcaaacagcaagggctgcagcggggccagctccaggcgccgttggcctgaggtagggtggggggaaggggctttccggggcctacgtctgcagccagccctccgcccagcgcctccatccctgcaggctgggcgcagctctcggcccctgcccggtgcttccctgggaaatgacctcttcctcttcgcagcccttgtcgagggcgcaggaaggaagttaaaggaactttccccggacttttatttgcttggccttcctgggacgaagagcagagtagctcggaagtttgggaaaacaaccctacgcattttcagaaaaccaaaccggaattgtccccaagcccccttgaaatgaatcgctcctgactccccctttacccttcccaaccatgtcccaaacctgacagtgatcgctaaggcctaacactttgcaatttagccataaaaactgtcagcacacccacgtacatatgtgagtgttttctatataaaactcagaaacccgcttccagcggactctgtggcatctcgttcttttctgtttcctaaaactgcaagggctgcaggaatgtgctgcaggaactttgacggtggttcccgtcgccctcggtagcctcgtggcgcagggttttttaaagaacagctgagaagtttgggacattcctgcagagtaactaggggctggcggcccgggccagtggcgagactgcaactgtagcggcggcggcggggacacgttggtgtgtgcaggaaagtgcgtccgagccgtggagactcgagatggggtgtcctagaggttgaatggtgcagttcctagcagcagcttcctgccggcctgtaattacagcgtgattgcacagtcaggcattgttggcgtggatgtttatacacaggctattgtgcaagacctcggtagtggcgaagaaaacgcagctttgcactgcaaatgcccaggatagatctgggtctgagctgcagtctccaaattctttttgccctttaaccctagctaggtgatttatttcattacctccctctcacttttgacgacttgtccaaagcctgagatgtggggtggactcgggaggccactgcactcctatcttaggcagcctgaaaactatcccaggaactctacccttatttgtctccggagaaaatgtgggatgacgtcagtaggaaaaggagatgggagatggctatcaacctctctaaacgggaaagctgtttgaattagcaaaattgcacgggtggctgggttggggctgagttgcaaagaggactcgtcagaccatgtgtgactgagctggcgtgctagactttaagcctggaagtgtcagctgcagaaacttagtaggtggtaggtcctaattcctttattgtgctgggcaaagaggaaacgtgcaagtggtagcacttttgtctgtgctggtggtctgggtctgggaggggcagaggagtgactcctccttctccataggaaccctaggcccactttcttagcagggactgtggcacagaccagagcagg

SEQ ID NO: 1885589 - DNA, 4001 bp, Homo sapiens
tttctttaactagacttccctggctgagaccaagacaaaaccagattcccctgagctgtgcacctgccgggactggagcagcccaaatgcccatgggagggctgttgactggggctgtcagaccaggctctccgaggaggactcccacacccacagccaactccactttacaaaaccagctccagccagaagtatgctcgggggggcaggagaacagaaactgcagtagtgtgggtggattttaaatctgcaaatgcaactggctgcccaatgtttgggagataaaataggtcactatcctccccttggttcggcgtcactcccaggccctaaaggggagggaagaattttgtgatctttgctgtcacaggctatggacaaatttggttatgttcagctttacaagagctgcccgcccacctgactcttgttcacaagacccctaaaaatcagaaaaagatcagtccaggctgttcagagttggatggggaatcttcctgaggacagtttttaaagagtccattttgacaccagccaagacaaaagccaggacccagagtctagacagctcccaagcctgccgttttcaacttggccttaggatggagtcttctgttctctggcaatgaatgacaggcttttaaaggagtgacaaagagcaagccctggagagagccccatgaggccttggggtaagggcttccaggactgttcatgagaagctgtgcatgtctccctccagcttccccagatgagacaccaagattgagaagtgaagagtcatctccaatttggcagacatcctgaccctccacactcaccattctgatatttagtcattaccatcctggcatagttaaccacttctccttctgactgagaagctgaaagtgatattcagcctgggtgtgatgtggggattttctgggacagggcggagatgatgagatgctggagttgcatgagctggtcattacagtcaagacttgtgaaccagttgtgaaacccttggtaacctgaaatctgctatggtgggagtatttacactacagaaattggccaatgctgcaaatcagggtttctttcttttttcagtgagacactgcaccagcacacactgcattactcacgcaggaggagctctgggagggcgggagaaaaccatgggtgagcagagttgaggatgtttggtgcttcccctgatggcttcatcatgtcatctttcttggctcttcatggtcagtgttttctccgtggaaacaccaagagattctacctctgctccgtcagcaaacaaggaagtcattgattttcatggcccctgtgctagagaactccaagagcccaacttcttcaagcagcaggcccattttctggtggagaagagagaaggcaaagccagggaagggcatttaatagtgacaactcagcgaaaagtagaggcagcccaatgatcaaaggtgtcttccttcaaagcccctgagtgaaaacagcaatccatgcttaccgatgaaggccacaggtgatgtttcttatgtgagtgcatccatctgcttcaggtcatattttcagaggtcatacaaggctgaaaggaagcaaatcattttcatgagaaggataataaatgagaccaggattggtatcgagaaaagtttttagacatttctgagctggccagcctggggaagaaagtgcttctagatacacagatttccaggactctccctgagagggttagattctgggggtctgcagatggggccaagaacccgtgttttaaacagccccttcctcaccccgtgatcccgctgatggcagcctgcggaccgcacttggaggaactggtctagtgagggtcctcggagggcgttttgcagtgggtggaactgaactctgagtgggatcttccttcagtacctaggccctgccctgccatggctatggatcttcagcactcatccttggggactggtgctgggtgttacgggaacagcataaaaacacaaaacaaaaaaattccatttctcaccaccggcggtgagaaatgggggtggagcctggaactgtggtcacagggctccaagaggagcagccaggatgccattgcacaaccagccacctctaagagaagcaggaccaggcccagggctaagccttcacaagccctgccgccagctgccagccacccttcctccctgggagagccagaaagggaagcatagtgaagccctacatggtggcctccatcaacagggaggcccctctcctccctctgccgcagccatcctactttcggccagaatgtcccagggccaaactgaggacagggcggcctctccagaatcctgcccttaggggccctgccagagactggtttttcttgttggaggcacctctgcacagtttgcatttataaggcctgaagaactcatcccaagaacccaagcccacttgcaaagatgggatagagaaggggcatggcattccacagatgggctcactctggagaggagctactgacccagcagcagttccccctccctcacccctgctcaccaccccaggaagacatccgaatccccatcaaatggtccctgccaagagcatcgtggtaacatggggaaagagaggatgctaagttgcccctctgcccactggactccgtctcatctgaggagaattccacagcagccccttctgggctgtgctctttatgtctctaagccacttcctgtttccttttctaggtcataagccaggcttatagttggtgtgagtcacttacctaggaagcccagagcacacggctgcctctcagggagggagcaaaggatacagcttagaagtgcaaggcactggtttgctcctaaaacacatagattgtcctagacttttagcagtgctgtgtaccatggcccccaagcaacgcacgcctgggagatccgtgatttgcccaatttgcgttcctctgctgatgccaggctttcagttcccaggaggcaccggacaagcgtagttttgcaaatgaaacattgctttgccaaggggctaggcctatcagacaatcatcaggcaacagccagcaggccctgtgaaagtcatggccaagaagccattcaaaagcattgtcttctagtaactaaatttcaaatccagggggaaaccacagctcagacatcggccagtgttcagcaatctggattcacagggaaacggacaggaatagattctgcacaagtctattgtgcattgttttcccttcatgacatctaggcagtttattcctcctgacttccactactcactgcatgaggattattctgtggaaaccagagtactaaggacgaggcgctggatgatttggtcaaagtcaaatgtgccaagtcagcatcgagcagctatttttgccttccaattccattccctgaactttttttctgtgaaagtgtcttgtaagctggaacacacctgaggtggcagaggaaaagcagagttcgaatctcttccccaggcctctgagtgagttttgcattcagggatgatactggggcaaggggcttgaaaggtcctgatgttgctgacacccacataaaacactttctgcagcagggaagggaaggggagaggaaagaacaggcagagaaagacccagaaactcagatcagcctaggatgagggtagctgtcctgaaaacaatcagaaatccagagtcctgactctccagcaggtatggtcttgatcctagtgagattatcttcaaagagaaaacaaactctagtcatgcagagaagcagcattgttccatgcagatctataaaaaacaacagaaagagcatcatccccttaattattgagggaataggaaaataggaatccgcataccctgctgttgagaatataaactggaaaaactgaggtggggaatcagttgaggccaggagttcaagaccagcttgcctaacgtggcgaaaccccatctctactaaaaatacaaaaattag

SEQ ID NO: 1885590 - DNA, 4001 bp, Homo sapiens
agctgaggcttcaggccttagggtcataggagctgactggggatgggacagaagtgcagagttccctccacaacccatgaagtccacattctcttgcttccagcagatctgcaccctcaccaccatgctgccatctggctggcccatacctggaacagtcttgtctagcacatttgctcaggagggagaggagaggggatggaccagagtgatgggagcccagggctgcagggcagctccccctggtggaccctagaggtggcccctcccactcctgggagaagagaagccacactgtgcatttcgcagccaatcaaaacacaaccctccaatagagggcggaatggggttaccagaagctgggaaaagcaggggaggagaatgaagagcaggtggatggtacaaaaatatggtgaggactaagttctagtatttgatagtacagtagggagactatagttaacaatttattgtatatttcaaaatagctagaagaattggaatgttcccagcacaaggaaaagataaatgcttgaggtgataaatgtccttaaatatcctgactggtcattacactttgtacgcatgtatcaaaataccatatgcagccccaaaatatgtacaactatcacatgtcaattttaaaaaggaaaaacaaaacaaccagaacattcctctagttagtagctacaacagggcaggaactggagagaaaaacaaaacaaaaaaagcagcagcctcctgactggccatttcccttcttggtctccagttaaaagctgcctctgagctcccccagccccaggcccccaccaccagcctctgccttccaagataacctgtcttgcctgatcctggaaaggcttgtgagaaacttggggtggtaagaaataaaccaaaggagattctcaaattctatctctgggatttctgtttcctcaggtgtaaaggtagaatctgaacaccacctaaactgccaccacacagtgccactgtctttgctagctgacgtggaagtactgtgcaaacttaacagaagtgctgtggagatgctaactgactgaggcaactaggaggaaccctccctgccaggaagaggttcttggggatatacctcaaagcttagggctttcaaatacttcctagccaatgggcccaactgtccagcctggctggggtaacgatctactcccaactcctaccaataattctctggaattcttagcacctttttcttgccaaagcccaaacaaagcaatttcagatctgaaaattcttcacaagtagaagtgattattaactttaatttctatttcaccaaggaatgtgaactgaaatacagagaggttaagtaacttacctacagtcaccagctgaacaggccaagaggacaaatgatgtttctaattcctagctgagttttctttcttttcttttcttttctttttttttttttgagatggagtttcactcttgttgtccaggctggagtgcaatggcatgatctcggctcaccacaacctccgcttcccaggttcaagcaattctcctgcctcagcctccaagtagctgggattacaggcatgcgccatcacgcccggctaattttgtatttttagtagagacgggatttcttcatgttggtcaggctggtctggaactctcgacctcaggtgatccacccgcctcagcctcccaaagtgctgggattacaggtgtgagccaccgcacccggccgctaagttttctttttactaaatcaattgaggggatcgcaacccaggtagtgcaatggaagcaaccaagtggctttaaatcaatcagattctcagagactgattcagaggcctggtgtgggttctgggaacctgttcaggtaagacagaaaaccagatctggtttcagggctcccagtgggcatgtgggcttggctggtcttactacatagggaggttggaagacaaaagcaccaacagaggtaggcctaggaaggaagagacatttttccagcgacagatggcccactgctcagccctggctccagaatgcaaaagagatcagaaatagatgctcagcaagaggcatgtgccacccgcatcatgtctcatgcagctgccatagctttaatcaggaaaacacacatcttatcccactttgcacagaccctcctgaagtgcagaagatactaggaggaggcatggggggagcagatggaggaagaatgaaaagcagtccaaagaatcattctctcacttgggaaggacagaagaaagctgtaccccagcagtgtcaaggcaggaggcttcactcaagccctgttcctcccaggcctcacagcagtgggaatttacctcagctaatagagggagatcttacaacacatttctcaatctagattcatgtcttgagaccccaccccaagatcaaaagctccttagtctcttcctctgcccacctcattcttcaggccctctctcaaggacctaatcccttcaggatcctaataaaatgaacaacattggggggaaaaaaggtaaacctttatttggaaaaagagtttaaataacaatttaaaaccccatttcactttcaaaacagaaacaagaaagcaaggaaaagataatctatcaagcatctgccctctgctgtggttagccattttaaagctgcatttcccagcagaagagaacagtgatgggccctagtcctaggaacccacagggcactgtcttgagacccttttaggcagtgtccagggaacagacagacagaatgaatggtggggtgtagacagacctggggctcagacaggcacatgcccagtacccaggaaacaaagtttgaaaatatatacacatagaaaaataaattccctagaacctaggcatggaaagcttctaaccatgaatgcagcagcacaatgcaaactgggtctttggctttcaaaaaaaggaaagaaccttaacccctggcttactgtcccgaactcaagtctcttgaccactgtcttcagtcccactttggaggtcgagtgaggcaagagcaagtcaaatctaccagggccagcagccactctgacttagggagatgtgtggaggggctggcccaggatctcccaaggccacaccccagcaatgaaagattaaggcatgcaggtgacacagtgtggactaaggagtcccctgaataagccagggtacccttctgttaggggagggaaagcagacgcaacaagcagctgaggccttgctggacagagccaatccgcaagtactgccacttcaaattcttggaccagttttgtccaaggccacctttctgctgaggcagtttggcctgagctaaataccagggttttctagaaaggaaatggaagggaagcgggagatgggagatagcagaaagtaaaaagtggtggaaggagaggaacagaaaattgcttcttaggagtggagaggaaagagaatcagcttaggtcttcagtcccagctgaggcagctgaagagtctacctgctccttcccctactggaactcctacccttgccccagttctgcaggctgcagagtccagtgaaacaagagtttcctgaagactctttctcctcctaatccttaaatagttttaaacctcataccactaccctagcccaatgaaccccacataagggttcaaacttccgcctccctcagggaagcctggggaaagggatggcccttgtgaaattacaccaggtctgtggggagctctgggttggaggcacagggccagctgggacaggtagcgcatcccccaaaatttgccactccaggatgtgggccccatttgttcccagagcccagacgccgggcctgccctggttggcaggatgaatgcctaatgaaacacagaggctaaaaggagagatggggccatgccctgctgctgcctgctcatacataggtacttgggtagactctgaacctgccccaggcctacagccccaacatgaaaagtggactg

SEQ ID NO: 1885591 - DNA, 4001 bp, Homo sapiens
aaaattctgtctcaaaaaaaaaaataaaatggaatgcaatgcaatgaaatgaaataaaataaaaataaaaataattccaattggcttttatttcaggaaacctgcattttagtgattaaaaaaaaaaagaaaaaaaaggtaggcacaaagatatactctctgtctttgtacctttgcttgcgttgttccctttgcctgaaatccctccttttagacccataaaactatcacatattgtccactctcccagaggccaggactcattctatcacactcttgtcccccaagcaagacccatggctcctttttacttctctgtgtaattcttgacatgttcaataaatgtttctcgaatggaaacgtgaaagaaagtaagagacattattttcaattcttgcagtttgcgaatgcaacactgtagttcatagtggactaatgtcctccctctcagagaatgaagggattggcagagtgacttgaggagatggtgccagtctcaacagtaggagggaaaaacacaaagaataacaaacagcccagtctttcactaaaaggggctccatcctccaacaccatgttttcctggattggggagaagtagtagcatagggtgacccagagggggactgtggactcagggcaacctctgtatgattccaattctgttatccaatggctgtttaaccctagaaccaaacatctctgagcctgttttcttgcctgtaaaatgagagtaataccggccccaaagtgtaactttgatgatgaaatgagataatagtgcaatgcctggcacttagggaatgcttaattaatgtttttttaaatgaatgaagagggcttttaaagaaagtgctattgttgagggagactgctatccttgaaagcacagaattgcttgatgctatgcactgtttgtcgcagatcagtgattgattctccaatcttcacggggccacctcctcagactctcagtccagagttgaaccacaaccaataagtctgggaggcaggatttggaaccctccttcccaaatccttctcctctccagctggcacagaaacactccacatttgcagcttccacagcaattacgagaacctacacccttttattgtttgactttccctagcgatggagcaatcacatgattttcacaggaaaaacaactctgggatcggagacagtctggattgagccatgaactttctggtccctgtgtctgagttcccagagagaaaagacatttgatgctggcaggacgagggctgagctggacaaaaaacacagccagcacatgctcatagcaggctggccaactgagcaggttgcatttcaggattaaaaacagtaacgatcctaacaaaatagaagctcatatatactgagtgctaagtaccaggtacagacatcgtcaagctgaatcatcaccacaatccaagatgaagattttgttatcttcattacatcaagggggagaagtcaagggcttagatggcatttcaccccttttgcactccccagagcctacgtgtttatcctctagctccacgtctacctgtagcagcagcgtttccaagctctttgcacacaaatctcctggagatcttggaatgcagattctgagattctgcatttctaacgagcttccagggaatgctgctggtccagggcctttagttgcaagggttggaccggtggtctcaaccttggttgcacattggactcacctgaaagctttccacatactgatgccttggccgcatcctggagagtctgattttgttggtctggggtgcagctctggcacagcatttctaaagccctcccgttgaaggaatatgcagccagggctgagaccacggttctggagggaggtaatatctgcaggttcttgaggatactccattaccctgagctcccctttcccaaccacagggacatccatggctgggcttcaaggacgcccttgaagaggcctctcccagaaaactccaagcccatgaaaaggccagagccaccacctgtttccttgaaatagttagcagctgtgctgggtgacctcatcgctctggctctgcctcaggccaagctgcgatctgaaaagccctcctcccaagtcggggctctccttgtgttgggggcagagcgggaagagccgcagctcaggaggagctgcaggttgatggcagagcccgtctggggctagtgggaagaatgagagtgcagggagggggcaccccaagggacttcacaatgggcagtccctggggtgtgacgccatggctgtgagcgcagctgactgcctcacccctggcttcctccattgctcaccctccccaaacacttgggaactgatgaaatcacgagggggttcttgtccccctcctgtaagtgatgcataaacaaacaaacattgaagtatgcaagtaaaaatgcaaagcccatttcttttttcccgtttccaagaggtaatcacctatagcagctgggcttatgtccttccaaatcttttctatacatcagtgtgtgtatttctacacacaaacatacatatgcaatcctgttttataaacaaaaatgcatcatagaatataagtccaaacactatcttgcatattttttccatgcagttatatatacttaccaattgttttagtgtctggaaacttgtctggaaatcagaatctctcaggggtgctttttaaacattgagattgacaggtctcacttcaaacctgctgaatgagaatttctcagggaggcacctggggaagtctttgtgtgtgtgtgtggagagagagagagagacagagagagagagagagagagagaaacagggtcttgttctgttcccaaggctggagttcaagggcacaatcgtagctcactgcagcctcaatctcccgggctcaagtgattctcccacctcagcttcccatgtagctgaaactacaggcatgtgccaccacacctggctgtttttaatttttttgtagagacagggtcttgctatgttgcccaggctggtttcagactcctggctttaagtgatcctctgagcttggcctcccaaagtgctgggattacaagcatgagccaccatacctggcctatattgatatttttaataagtgtctcaggtgattcttacgggaaatatcttgcctttttaatgcctgtacatgtcccatggatgtactatcatttattaaccagttcctttctgttgaacatttagtttgttttcagcctttttcttcatgctacaaacaatactacaaacatacacgcatcgtgcagatccccatgtgtgtttctgtaggataattccctaggattggatggctaagtgcaaggcttgcctggaacttcttttcccctctaagactgctcgtatttgaatcatggaacctcatagcaggacagaaccttaaaatctgtgtaaagaccaatactgtcctcctatagaaatataatgtacgttatacatataatttgaaactttcagtagctacattaattttaataatatatttttacttaacctaatatatcaaatctattatgatctgaacatataatcaaacaaaaagtattaatgaaagtacttgctatggtctgaatgtttgtttctcctcaaaatttatatgttgaaatcctaacctccaaagtgatggtgttagaaagtggggcctttgggaggtgattaggtcatgagggtggggccctcagaatggggttagagcccttataggaaaggcctgtaatcctagcactcaggaggctaaggcaggaggatcacttgaggccagcagttggagatcagccggggcaacatagcaaaactacatctctatgaaaataaataaatacataaataattttttttaaaaagaggcctgaggccaggtgtggtggctcacacctgtaatagcagcactttgggaggccgaggtgggcggatcacctgaggtcaggagtttgagaccagcctggc

SEQ ID NO: 1885592 - DNA, 4001 bp, Homo sapiens
ggtctttggactttgcctctgagctggcttaagggcaatccaccttgttcactggtctggagtggggaggcagagtatgggtcggctggaggagtggggctctgtgctctcttttgagagtttactaaacgtcactctgcatggtgaggggtgtgtcctctccgctggggaggcctggcttgaatttcagattgcctccctgggacaccagaccctgtgctgtgctccctcagaaggacagccttgactgtctccactccagcagtcagttctctccactcccactgggagaaggagcaaaggctggtgtcttcaggaggctcctctccaggctggggccagggaagagtgtgcatgtcactgtcaggatgtgtcccagtggtgtggctgggttctcagggtgaagctcgtccatttctgggatggcagcggaagcaggcactacacacgcagcttcagggggctctccccatgcttcctagctgcctggcactttctggtgtttctggctaactttctggccatgccaggagttggtggaaggagatctcaggctgcagctttgctttcctgctgaggagacagaggtaggctggggctgtaggacaggggaggccagcagccccaccttccttctggagagacgctgcctgtctgtcattgcccctctcctgcacctggccgctggctggctgctcttccctcccaatcaccagcaagccagctcctgttccctgcagcccagcccgcaggatgtgtcctgggacccatagccctctctccccagagacagcaccgccctgcagctcgggttcctggccctgtgctaaccctggtggggctttccttactggtctgctctgcagccatgacattgtggccaccgctctccttgggacccccacctggctttcctcccagcacatgctgtttcctacccacctggatggtgtcctgtgtgctggattccccatgctgtgtccccagcatcctgaccatgtctgtcccgcctgcctagatcttgcaccgtggccacggggctccctcctgatagccctgaacgctccgctccatgtcctacagagagggatgtcccaagtagatgtcagctccctccagcatctgagcaggcaggacagagacccacggtgctgctcacatcagcagcctggaaccccgagacagctccttttgctcacctcccccaacactgatgttgcacctgtctccaagccactctgggaccatctgtttctctccatctgggaagcccccttcgcacctcatgctcttcctggctggggcgtctgggtcactcactggactctcctctccttagacctgtgcacaagcacacacgggaaggcatcctgacaggtggtgggaagagaaggcagctgcctcactgcggaaagagcacggccgctcctggactccagccctgttggggctggcggggtcagcaggcgctgggttccagcctcaggtggggtctttggaggtggcctctgggcacaggcacctcctctgcggccttctcaccaggtcacggttcagggaggctttgccggctacggagcctgcccacaccaaggcgcgcacgaccacctgtccagagatgccacgcgggctgggcggcgaaggccaaggacacgccctgcctggtgtcgggggcaaaggttaggcctggaagggaggtgtggggtggggaccccgaggccagggctgggccgctgagcttcagggcccttggggggctcagggaggaatgccggaggaccccagcatcaggaggaacccctggagagctacggcaggactcacctgtggggcacagggagggatcaccagggaaatggcccttgtggaggatctcccctctacccccagggcaccaggggaggatctaccagggggttctggtggaagggcccacccgggaagcggcgcgcggggaggactcgggggcgccgagaggaactgtccgggaaggggcgcgcgggccgcgggcggcgcggggtcggtaacggcccgtgcggtgggcggcggcgcccgaggcccctccccgccgcccgcggccgctcctcctcttcctctcccgcccgcgccgcggccctcccgtccctgcgcggcctcggcggcctcggcggcggcggcggcggcggcggcggcagcagcgcggcccctttaaacgcctgcggcgccccccgcccccgccatcgcgcctccattttcccggccgcccgcgccgagcgccgcgcccgccccgggcccctccgccgccgccggcccggacatggccgccaacatgtacagggtcggaggtaaggccgcaccgcctttatgcccggccccgacccgcccgcagcccccacccgccgccgctgccgcctcccccgcccctctgccccgcaggccccgcgccccccgcccgccctcgcggcccccggctccttcccgaaccgccccccgccgtgctcaccccaacccaaaatggccccgcgggtcggccccatcgggggcgggcggggctcggcggcccgggggtggggggcggcccacctgttggggccgagggggcggccgcgggggtggcgggggggcgcggggcctgcgggacatccgggggtccggggccgggagcccccagcgggagcacgtggccttgggaggcgccggctgccggtctgggagcaggagttttggggctgtggggtctcccccggcccgcggccctgtgctgggactccggtgcatcccctctggggatggggagccccggtgaggggccacgttcctccctagagccctcctgcagcctggccccggggcttcccccagcagggatccctcagggggtcttcagcagggagcgagcatcccgagcacgcctctaagtccccccaaacttttccctgcctctcgctcacctcagcccattcgggaggcgctttgcaagggttggggagaggccggagggcctcctgggcaggggcttcctccgtgggcccagcctcctgttgctcgggccccccgggcctgcagctttgagccttgccctccttcgtgtgcctgggactccgtggggtctttcacaggaaggtggggggtcgtgtgcattccatcattccatcagcgcctccctccccaggactctgagacccctccctgcctgtgaccctctcgggcaggtgctcattacctttcccacctgcagcctgcgctgctggagggagctggggtcactcccgctctggcttgatccccatgcccctgaccccgagtgcccagaacactctgtgtctctcgagcgtggcttctgctgccttggacgccgtgtggtctggccggccagtcctgtgaccttggggacggtgggagccccctacatcccgtctgtgagatgggcggtcagtccgcatcagcagctctgggcctcccctgtcctctcagaggggcggtgggcctgtaccccatccagcggcagcccctcccacagcctcatacagctttgccaggtccctgtgtggacccaggtgcgctgagcccaccccacgctcagggagcagcctgggtgcggggtccctcgagggaggggcctgttccttcctgttctttctccccacctggagaccccccttccagcctgacatgagggcccagtttctcaccctggcagagaggatgcctgctgcctgggctccagccgggcccactgcgcatggttttgggattggtcccaagaagagctctccctgcccccacccatgttgggggtggggagtggtggcagctttgggctctagggctggggacaccccgaccccaactcatgccttcctagtggctgcattgctcggccttcaggcctgcctgcctgtgatcttggcgccagcctggctgccccccctccaaccttcccatgcctcggtttccccatggtgtgggtgaggacctcgtctctcagccgtccttttgtgccctgtggcagctgtgctgtg

SEQ ID NO: 1885593 - DNA, 4001 bp, Homo sapiens
gagccaagccttgtccatgaagcatcactaggcatgtgtaaaagtagggctttgtgcttgcttcggcggcacatatcctaaaattagaacaatacggagaaagttagcgtggcttctgcataaggaggcagcacagatctttgaagcattccatattttgtgcagtcactggaaggtcatttgactatttgctgactagctctaaggaaacagtgtgaatcaaagcgaaatgggtgccacccaaatattgaaattgtgatttgcgctgcaaaaatagtcatgtaagatggtctatgagatgacttagagctgaataacatgtttggtgcaaaatatattgttagtatgtatgtcgaaaatgacagaatgtcagcttgctacttcttcatggaaactaaaaaaaataaaagtagacttttggtctcccatgtcagccggaattgaacatcaatataaagcatcattgtaaccaacatctgcgggctcagagtttgagtctgtagagaaggctcattggtccaaaccaggtcttaacatccattggtttttctgcccttggtgtgattgatcaactccgtaatagtggacaatcacattatctactttaatgagatatttaggaatacatttagttacaaactatgacatagttgagatgccctgaaatataagccataaagagtaggacaactaagaggcaaaattaggacttaataacattttctgaaaactacaacatttgcatattagaacctatgaacaaaatacgcattgggttttatttgtgattccaagataattttagtcataaagtttaggaagagattattccattgctttactatttctctcagcatttaaaaaatgtgatctcattaaatttttatcggaacctagggaaataaggcagcaaagtcctcactttgttgaagaagacattgagcctaagagaagcaagttgtccaagaacaaatagctgttcattatggagctaggacttatgcagagttgggacactttctattatgtcaggttaatgcaacctaatttactgggtcacatgccctcgatttatgagtatttcaccctacatttttttcttctttaattagaagcttaaagagaagtttgcagaatgtactcataagtggatgggataatactgttaagttctgatattctgatattgtttgaaatactgttaagaatttcacatttggtaagtattttttatatcagtattaaaatagtaatttggtttattacaattttatacatagaatttgccagttactttctgactacaaagaaaaacagatactaaaagtctcttctgaaaacagcaatccaggtaagacttataacagtgaattactttaggttagttttccccaacctttttggcaccagggaccggttttgtggaagacaatctttccatgggctggggaaaggtggggatggtttcagaattattcaatcatgttacatttattgtgctattttatattattattacattgtaatatataatgaaataattatacaacttaccataatgtagaatcagtggaagctctgagcttatttttctgcaactagatggtcttatctgggggcaaagtgagacaatgatagatcatctggcattagattctcatacgaagcacacaacctagatccttcggataggcagttcacaacagggttcgtgctccaatgagtttctaatgttatcactgatctgagtggaggcagagttcaggctgtaatatgagccatggcgtgtggctgtaagtacaggtgaagcttccttggcttgcctagtgctcacctcctcctgtgtggtgtggttcataatagtccgtggactggtatgagtctgtggcctgggagttgaggacccctgctctgggtggttctaccatagataaaaaactaaaagtaaggaatttttgatcacaaaagaacactgaagcacaggtcatgttacacatgcttgtcccaataaggtctcactattactgacttcattcctcctcatttgaagttggaaagagatatattgacttttttggaacaagatgtgttcttctacctgctggttaattgtcatgataacagtaattttgttagaacaagatgctctgctaccatttgccaaaagagtgtcataataaatatgcaaattgcccaactctaggctcagcagattatcataaaagtagaaaaatgtttcacactaacaaaaatgctagtatgctacctgattgtagacacctaatacattgtatagtccaaactgtatgaggacacctttaatttagccatctatttatcaaagagcttctgtaagttaggttttataagttgcaggagacaaaaatggaatagatgtagttttcatctttaaggtgctcataatagagctgtctccatttcatttctgtgctttttcaacagaatttacaaagaaaacatttctattttcacttgtccacttaacagataactatcaaatgtcttttagatactagccattttttctaatgctacagagcacaaacaattaaaagtagagacaggagcttgttattatcattgtcattttcattattttactactttattcagtgcttactgtgtgctagatgcccactggaagcttataattatgatttattatatattgattatgtgccagacatatgtgatgaggaatgaaaattttggaaaaaagtaggtatgatttaaggtaagcatgcagagagagaagaatttttctaggtaaagaagcagaagaataatgtttggcagaaggaacatgcaacgaggttgtgtgtttgccagaaggaacatctaatgagattgcctgtttggcagaaagagcagcaagtgcaaaagacaagatgcttgagtgaactttgcagggattctgagcaattcacttttgctaataccaaaagtgtgagatacgagaggttgggaatgaggtgaatacttagctaaggcaagttcatgatagactttttaatactacagaaatgagtaggttttaccccatgggccatgggaagtttaccaggtagaatgctttggactgcaaatactagatgagcggtggctaaaacagtaggaaccagagttgttttgtttgttcattgatatcctaggatcccacttgtccctctttcagctgtgctgttggcagtgttttattcacgtaactgggagaaaacttagaagcatgcaagggcttcctgtaatatttcattggctaggtcagagtacctgctcattcccaaaccaggcactgggaaggaaaatacatgattagcttagaataaacatttctctttctgaggctgaggagggggattgggataataaatatcccaatagacttgtgtttcttctgcaagaaagaataaggaatggctattgatagggagccaacaatgtgtgctgcaggggctcattggagaaatttgagcaggggagtcacaagattaaatttgagtattaaggcttctggttatggtgtaaaacgggttagaaagctttttctgtaaaggactaggtgggaaatattttagactatgtggtctctgtcatgtcttcttaaccctgctgttgtctgctgttgtagtgtgaaagccaccagaattatatgtaagcaaacaggcatgactgagctcctataaaactttactcacaatgccataatgcagattggatttagtctgtagcctatagtttgctgggattgatggaaggttctttactatgtaaagaaaccaggagacaaaggaagcttttgcagtagtcagctatggtttccttgtcatacatccttggagtagcatcaatgtattacaaggttttcacctgtccatagtgaaataaataaagttaggaatctcaattactcgttttaatatgttggcctttgtttttgtttttttttttttttggtgttatgcttttttcatttgtttagc

SEQ ID NO: 1885594 - DNA, 4001 bp, Homo sapiens
caggctggagtgcagtggcacgatctcggctcactgcaagctctgcctcctgggtcattctcctgcctcagcctcctgagtagctgggactacaggcgcctgccaccacacccggctaattttttttgtattttttttagtagagacggggtttcactgtgttagccaagatggtcttgatcacctgacctcgtgatccgcctgcttcggcctcccaaagtgctggggtttttttttgtttttttttttgagacggagtcttgctgttgcccaggctggagtacaacggcatgatctaggctcactgcagcctccacctcccacctcctaggttcaagtgattctcctgcctcagcctcctgagtagctggtattacaggcgcacgccaccacgtctggctaaattttgtatttttagtagagatgggtttctccgtgttggtcagggtagtctcgaactcccgacctcaggtgatccgcccgcctcgccctcccaaagtgctgggattacgggcgtgagccactgtgcccagcctggccttcatggtgcattttttaaatgctttggtttttccgactttcctttcctcctccccctgccccgacattattttgctcttgttgcccaggctggagtgcagtggcgtgatcttggctcactgcaacctccgcctgccgggttcaagcagttctcctgcttcagcctcccgagtagctggccgagtagctgggattacaggcgcctgctaccacgtttaggagagacggggagttttcatgttggccaggctggtctcgaactcctgacctcaggagatccacccgcctccgctttccaaagtgctgggattacaggcgtgagccaccgcgcccggccggttttccggctttcattcttttggggcacttgcattgcacccagggttccccagaacttatcctaccccacacccttttcgtatttcctatggctctgtccccaacgagctatggtgatctcagtcgcatggcctcagttcttttcttctagcgacctccatccaactttctattacacagcgccccctagacgttcaattcagcatgaccaaacccaaaccctgatttcccaaaccctctttccgcatttcttgctcactgcatggacagaatcctaggcatcaccccctactttgctttctcaggactccttgccagtcggtccctaagttctgccagcggcgcctgcgtggggtctcttgtaccgtgttctcctctccatccttgctgccgagccctcaacaccagtgggccccctgccttctggagttcccatttacctccctatgtctttccttgcttccttcctttccatctctagcagctaatgacatgagaaaatgtagattctctctggcctccatgccagccaatttcatgactgctgcccactgtaattaatgaattccttttctctatcttgaggtgtgtgtgtgtgtttaggcgtttatttacaccttttgtgtttgaaacacaaaacactacttcctagaatcactaggaagtagtagctgagttagcagtttattttaatatgtaacatagtaaggtgacaaagctcattttaatagcaccagccattaacccagttttctcagtgttcatatggacgtaaataatgacacaagaaaaacacttttgagggtagttacgggaaaagctgacattacatggctgcataacccaaccgactcaggatctgataatgaaagcgtgaagataataaagaagcatcaagctgcgaaaggaaaggaaaattacaaaatgctcacgcagcgaagctgcgaggaaccccaccgagccagccaggagtcgaacctggaatcttctgatccgtagtcagacgcgttatccattgcgccactggccctgagatggcactgtttctctccgtgatggtacttcaaggttatactgcagggtttcatgggcggtgtagtctctcaacggcgttcttcagatagactaagcattctgggagattgaagttcgtcaggaaccagaccctgagattggtggatccatgccgtacgccactgtgcagcccgcggattggcaggaaaagccactccccatccctcctgttcgggagctgtggcagacgctctggttgttaaggcgactcgtcccgccttctggggcactagtttgactttgtgattggctactagtatcaaggaatcccggcgtggacagcgcgaggagaaagatggcggcgatggcggtcgggggtgctggtgggagccgcgtgtccagcgggagggacctgaattgcgtccccgaaatagctgacacactaggggctgtggccaagcaggggtgagggccggacctccacgagcggaatgcggggtccgaactcggggacggagaagggcagactagtcatcccggagaagcaggggtgagggggtcggctaggatgaggaggggagagactattactctttggaggggaggagcctcggacccagtaacgtgaggaaaataacttgtgggaggcctgtggtcactgagtcccaaagttgggagagttgttgggtaaactctaaagggccctggaggtcgcgattattgtctgggagtgggaggaggtgttagggggcaagggagagaagaggctaattttgacgggggaggcatgggcagaactggggcaaatctggatgtgatggtcttggaaacatactgacacctgaggagaaaaaaattctacttgtggatatccatcattttctccttactcatatgtcccatggctgtgttttagggagaaattgaggcacagtacagcagagttgatatcccccaaggtggtctgaactcagcagcctagtaggctgaactgatggcagctgaaagggctgtgcaaaatcaagatagcctaaatccagttgcttggctctctggcactgctgctgtctttacatgattctgggtctgtcgcggttgtaggtttgatttcctctgcatgcctgtcttccatccgcgtttcaagagggagttcattcaggaacctgctaagaatcggcccggtccccagacacgatcagacctactgctgtcaggaaggggtagggaccatcccatatgccccttaattattagaggcaataacaacttctgctttatcggggccctcattctcctccttttctgacttggatatatttgttagtccctgggatatagataacttgttttctccttgcttctctattctgcatcaggctatcccatgtctatgtagaaaaaacctttgtctctcatttctactcttgattcccaaaactaaaaattgaacaagtaaagtgctgaaccttattcagtatttgtctttcttgggtgggggagtgcagactggaatacgctaattgtgggaaagctttctccatggattcgtccagactcaaaagtggagaagattcgcaggaactccgaggcggtaagactgtttgacttctctgctggatttttctaaccaagctgggtggggagagtggtcccctcccatccccaataacttggtaaattaactgatagaatgaaattaaagctattaggctgggtgctgtggtgcacacctataatcctagcactttgggaggctgaggctgtaggatcactggagctcgggatttcgagaccagcctgggcagcgtagtgaaaccccatctctataaaatatacaaaaattagccaggcatggtggtgcatgcctgtggtcccagctactcaggaggctgaggagggaggatcagttgagcttgggaaggtcaaggctgcagtgagtggagactgtgccactgcactccagcctgggtgacagagtgagactttgtctcaaaaaaaaaaaaaaaaaagctgtttgcttgttagctcaaacttttcctcttcatctccgttccaggccatgttacaggagctgaattttggtgcatatttgggtcttccagctttcc

SEQ ID NO: 1885595 - DNA, 4001 bp, Homo sapiens
taacttttcagtcagaattgtgtaaactgacccaactgagatgtctatggtgttggctattgtttctgctgttgtcagttctcttcaattagggcacaaacaagatgaatttttttcctcacaaagtgatgtggatagtctgccactatctgtatcttcaacatcatctcctcccctttttgttgagacaggttctcactctgttacccaggctgcagcacggtggtgcaatcatagctcactgcaaccttgaactgctgggctcaagcaatcctcctgcctcagcctcccaagacgctggaactacaggtgtgcaccaccacacttggctaatttttaaatttttagtgagatgaggtctcgctatgttgcccaggctggtctcaaactcctgggcttgagagaggctcgtgcataatcctcccaaagtgctgggattacaggcatgagccaccatgcttgtccatctcctcgtttcttaaaatgagttatgcatttgtagactgatgatttatttggggcattgtcctcataaacttttcataaggcatcaatttcatcattcttcaccagaaactccatgtttgttcttgcttcaattttagcagaattcaggttgctttgataggggctcttttcaaactgtctagccttcttagtgcgtcagatcctgttcagacatgttatataacaagttagtacaagtttattttggtgtaaaaaaaatttggggccgggcgcggtggctcacgcctgtaatcccagcactttgggaggccgaggcgggcggatcacgaggtcaggagatcgagaccatcccggctaaaacggtgaaaccccgtctctactaaaaatacaaaaaattagccggacgtagtggcaggcgcctgtagtcccagctacttgggaggctgaggcaggagaatggcgtgaacccgggaggcggagcttgcagtgagccgagatcccgccactgcactccagcctgggcgacagagcgagactccgtctcaaaaaaaaaaaaaaaaaaaaaaaaaaaaaaaaaaaaaattggaaacctatgtattttttagcataatacacattttccatgaacttttcaaagacccctcttagataaatctgggagagattcagtatttaaaatcaacagggtttcagacgtccaagaagagatgtgtagtgaaaagtttttataggggttaggagctcagaggagagatccgagttgcataggagatttgggatgtcttctgttaaagcctggtaactgaattcaaggcatagatgcctagggtaaagtgcagattggaaagagaaggtcctaggatccagctctgaggaataccaatattttaagaacttagcagaggtggagcaagcatcagagactgaaaaaaggtacgagaaagccgagaagagaatgtctttcactgaagccaaacattttcaaagggaggaaggaatcagcaggtgcccattgatactgagaggtcaagaaaactaactgaaaactagggattagatttggtgacacatgggaaacttatgttcttggagagtgaggaaatgaatgataaaggcacaaaccctataggagtgaagtaagaagtagaaaatggaaaccacacttgtgggaagtttggctatgaaggcaaaaaaaaaaaagaatattagctggaggaaaaacaggtctggagaaggcttattttaatatagggggatctttggaatgtttaaatgttgatagaaaggctccagcggaaagagagagaagaaaaaactggccgagtggaaagaaatccagattaccggtggaagggttctcttgcattactgacccgccaacttaatagacatccaaaattctgaggtctgggtagcttcgggttttaggtgaagggttttgttggtttgggtttggtttggttggttttctacactaaagccttccctcctccgccctttccgggtccatcggtctaatccctcccacctcgcttgctattgaaacacccagcctatatttacaagtttttccgggtcgccgagaagggtcacgcacaggattgcgacctcgattggaacgcgcttcccgaaaggggcatgcgcagagaggtcgtagtcgcgtctgaggtgaggtaaactctaaactttacgcaggcgcgttaggtcctagtcgctatgcgtgtgcttgtgggtgagggagggcagaaagggagagtgctgggcgggcttagtcggagattgaggactgggaatccgcttccgggagggcactgtctagtgcacaggcaacctggccttggcctcctagcccgagaagccgaatctccctaatccctgtgacctgtgtcacctctgcatcgcgaggagggggataagtggggagaagcctggtgtcagatgggatggcgccggaagagggtgccacagcggggacggaaggcgcccccaccccaactccacgggaatataaacaatttgtattttccgatcaggtggcgggacaggcttcattgggacagccctaacccagctgctgaatgccagaggccacgaagtgacgttggtctcccgaaagcccgggcccggccggatcacgtgggtaagtccatcctctggaagcgggtgggagggcagagttgggcggcgcagggcggggcaggggcactgtgtgctttctccgacaggatgagctcgctgcatcggggctgccgagctgcgatgccgccgtcaacctggccggagagaacatcctcaaccctctccgaaggtcagcccgggccctaaagctgatacccactagagcacagggaggacagtgccccactgatgagaacctgtgagctatgggtaatggagctcccagattccgaactaaaccgatatcccagactactcattctgctccactcctccacccccacctgctcctccacccagtcagccaattggcttaagtcctcacgtataactcaggatgcccaggaaatgaatgccctttccctctacaggagacgttgactgtttctcttaagccgaaattcagggctttacaagaaattggtatgaaatagctcccaggaaaagacagagagagggatatgtgcacttatgtatttagtggctttttatttcccatgtttctcctgcagatggaatgaaaccttccaaaaagaggtaatcggcagccgcctagagaccacccaattgctggctaaagccatcaccaaagccccacaaccccccaaggcctgggtcttagtcacaggtgtaggtacgccccccaaatcaccagccccttatattcgccaggggaacggggtaactcagacctctgtagctatgcacacaccagagcactggtcttttccaggcaaaatgacttcctaggcccttgatccatgcatgtttctcctaacctttgtgtactttcactaagaaattgagaccctgaaaaaacagtggggagtggcatcactcaatgccagggaaaagtccacctatcccaaagtcccttacttctcacaccatagttctttaggaacagagttcctggtcacctttgggaccaagtaattgcaaacaattatacacaccagccactatttgaagtgttttatgcttattatcatttattccttacaacaaccctatgaggtaggtactattattcccattttaaagatgtgaaaattctatacagagaggttaagtaacttgcatcaagtcagagagttaataaatgagggagctgattaaaattcaggcgcctggtacccaagttcctgttcttaaccactacactctagcagcctctaagtttagccctgcaaccagagttcctccagggaaggaacgcttcaggtcatggagaagttcaaggggaaaatatccaaatggctctgtctccaaatggggagatcctaagggccagagaaggtgaggccaaggggagcctccactacagagagccaggcaggaccaaggacacccag

SEQ ID NO: 1885596 - DNA, 4001 bp, Homo sapiens
ttgactatattcattataattcttcatgtactttcaggttttcttctgattgccaagtgttctttttacccccaacaggcatcctgactcaagctgtatacatttgcaatatctgatttttaaccacacactcttcatcctattgacccagagtgaaaattgatactcttagctgaaggactgttcccttgagtatatttaaaccagaccaatctctgtgtttaatctgggttcatcaggaaccattagccttgattggtttgtttttctccccctccatctcaggacttgattctattgagttaacaactattctccccagagaacagctaccgcaagcctgtttcaagtaattccaatatctggctcttagaaattgaactgatcttttttttctttagttttatgtgaagaactgcagtaatgaattctgaatttgttcaaatcattgaagatgtgtgaagacaaaacattcactcaaatctctatcatgttagcatgttatttatcattgctctgttcttcattgttgaataatgcaattgagttaaaaagaataaacattatttaccgaagactcatatgttgatatccagtaaatcctcattaatcacaatttgacaagcttgcaatttctggtatttcaggaaggaactaggtatatgtttatctgtgcaaaatatcaaaaaatgcattagtaagccttttagtaatgtaaataagactgcggaagaattattagagcaaactatattttgtttaaactattccggcataacacataactcagaaaataagacaatctatcgaagccttacaaattacaatctgtgaggcctgtcataactttcataagaatgcttaattacattgtgctgctgatataaagaacccatctctaaatacagttaaaacattatccagattttcaaacataatttcaagggggataataagtagaaaaactacggggttatttttcagatcatatatttctagctctacttttgaatatctgtgactcatgacttcaagtaaatattttacctcttctgaatctaattgcttatcatttaaataaaaatacgtcattgtgcacatttcatggagttgctagtgaacataaggagcttgagactgaaagctaccttaaaaattataaatcaacaaaattctgaatactcattactatgttctggattactcttattataaatttgcaaaataattttgtcttcagtttttgaattctgtatggcaaggagcacaatggcttgtgttagcttgtctataaaattgtaattggtatgaaacagctttgataattacctcagctacaatattctgaataattttcagtttagcttaaaatattagaacaagtggctattcatgaataaatattactgatatcttgaaagaaataacaagattccttctttaagctcttaaactctttccatgctgtaaattaaacacatcagtaatagctaagagagaattctgatacaccatcgtttaccactattatagcacaaattttggatgtgacaaattttaaattagtagatgttattttcccaaataaacaaaaggagaatctaacatgaagcaaattcaaactacatctttataagacgttttatagccatgtaacataaaggctaatactaagctgtcattagttaaatgattaagtttggaaaaattattattgatgactagtattgcaaagtgttaaagtattaaacattacatctccttgtgtcactaggtactttccttcctcattccaggcagcaacacaagaaagcattcattattttaagggaggacagtctcaggaaaacagcagaacaaaggcatagacctaaaattcttaccttttagattcgaagtggttctcaggtataagacaacaagatttgagaaaaacaagcaaacaaacatgatcacacacaaggagttctttcccaaactatactagaccagagactagagaaagatcattaaatctgaaggaaggagtttagcaatccagaggctggtatgtgtttcttgccctctcctctcttacttgagttaattctaaactgatggggacaaagtggaatcccttaataatttgagggatctgcaattagataaaatctgtgctgccaacattctatgttccttcttggcagtagaggatacaatgaaacggctaaatcagttctccatgcaccaacaagacttacagtacagacagatagtttttctggataaggttggcatagctttgccagtcaaattggaggagagttgcagtagcatacatggcatgaatcatatgataagagaccacatgagaactgtatacctcaattgatatcatcatgaaggtattaattccagaaagcagatggaggatatattttagtggatgtcacgataggcaggtagtgatgaaggatgagatgccacctttcacctcatgtcacatttcacctcagtgaccttggcgtttatacacaataccaagaagaaagggaacaggaagaggaatcctctagactgctttgaagtggcaaattatgtttctgttctcctgagcagaatggagttagggttaaattagactgagttatagaaaataaaaactacaatttttcataattaagtttgaaattattgtagcagatacactggtcttcctatcatgatgattgtgttctcttcctaacatggcattcaccttagtaactcactgttaatatgtaaaacacaaaacagaaagataaggaaactggtaaattccatcagcctaacaagtttcctccatgttttcctttgacttatgctgaagttaactgcaggggatgtcctggttctttctagcttctctagttttaatgtcaagagcaatttattttctttctgtcttcttatccacttgaagtggtagaaagaaactttattcataaataaaatctccctaggtaataaatttttggtttaaaatacctttaactattggcaactcctaaatttctctcaacaaggagcttaggggcagtaatccggctggaagtggtgatggtggctgcatttgtaggcggcacactggcacattatgcattatttggagatagataatgggaaagttaacaaggtttactaatcatccccgcaacagcacccacagatctgatctcggtgatacaatctttactgacgagccctccttgtatgctgccttctgcttattgcttgcatattttattttattgcttgtccatttgctttaaatgtggtcaaaaattagacagagatgatgattctcagtggttttatgttgagtaataggctaacaaaaaaaaattcatacaaaattattggatgtgttagaactgagtttatatctagaagccacaatagcagaaataagaatttaaacctttttgatctttcatttttactgtcaagctgtcttaaattatgtcccaagaggaattttggatctacctttcgctgctcttcagtgccttgtgcattcctgaatccagttcacatccctcattcttcacttgaatgaaacgcaagcatatcaatgcatttaatcttaacatggcaagacagcattcccctatttctgtgcttgtcttctgtaattccaaatcttaggcaaggatatatagtaaggtttggaaaccacgtaacttagtgaaatggatttaactctttaaatgaaaatactgaggattatggtccaagtagtagaaagttcaccaacctatacaaccacaaatattcatataataaatatctattaaacacatgctatcaaaagaacactgttctagacgtaaagatgggatagtaaaaaacaccaactctctctcaagatgttcagattctagtagatgaacagaccgcagataataagctaaaaaatagccacaaatcatattgatcattaagactgatggtcaatgaatgtccttctgagaggtcagcat

SEQ ID NO: 1885597 - DNA, 4001 bp, Homo sapiens
gcataaaattattttccatttctgaccatttatttaactgagtgtcttatctaaatctcaggttctgaagagatacagtctgcatcttgagatataattgttgcatctgtcttcttatcaattaaaaacgccaaattagtttaacaactatcagaatcctgaaacaacattcatgaaggataagctttaaaatgcctatgagaatatagagaggacttgcaaaataccttattagggtggcagttgtccatagaataatacagtagatgatagagagaaatggagatgggcaatctagttgttttcaaaactggaaaataagtatattctgcttgaaatattttctggaaaatactgcagggaaattaataaaaggaatacttagattaaagaatacatgagtcctaataatctaggtacctaagaagcaaacaataacagtctgtattcacttataaatcctcactgcctactgaaaactctcagaataactacgtgagcaaaatggagaaaaaaaaaatatctggatatctggatatcagtgcaattactatttgaaaaaatgcccagatgagttgttattaaactgatccacaccaataggaaaactatcaagccatatatgttaagagtgtctggccttgtgtcacccctaataaacattttggccatcaatttgaatataggttaagaagtaataatggcaataataatggcatttattaactctcagctatgtgctacagcattttgcaaagtattttttctgtattatctctgtgttactgataaccactctatgaaatacatactattatccttatttcttacagataaggaatttatgctcagagaggtttagtaacaaatcccaaatcttaacaattagtaatgctattgttgggcttggaatccaggttcatcttacaataatgtcacttgagtaatagtctatactctctctctctctctctctctctctctctctctctctctctctctctctatatatatatatatatatatatatatatatatatatatgcttaattaaacttgcagatgtcaaatccggcaggtgaatgaatacctcgatagcttggtatggaagatggtgttggacctcaccaagaatcaataattgccctatcctacctacatctatgctccaaacttcaactacatgactcaagaaaaggacagaggtgatttagtggcaagggctcagtctgtgtgtatgaatgtgtatgttaaaatatgtgtacacgtgcttgtgtgctggacagaattacttgctttggaagaacatgagtctcctctttctgaaaggattcaaatctaggctggatgaaagtcaggaactgtggctagaatttaagcaccagatggatgtatcgactgaacatttaagtgtatttccaaccctaatgtactgctgtcatgctgcatgcaactgttcaaataaaaacaattcaatgtggttaggagaagagatatagggaagtatatatttctagtatctttaacttgtagtgaatagttggaaaatccatcagaagtgcaaaatcatatcttgactgacaagcctcacccagtgcacaccccaggcaatgttttcgtgtcactgagaaacaaactggcccacccagaagacagccttactaatcttgatgcctagaagcttgaagcctcactggagaagtgagcagtcaaagggagcttgtcgccactgattagctgaaaacaaagaaaaaaagataaataaaggaagattttttttgccaagatagataagatccattggctgagctctacagctggagggtaaaggtaagttaccataatcggcaatagtcacttctagctggagttggaaacagtctgtagtataaaagcaggcaaaggggagcacctttctcttccctgaagggatttctggctaaaggaatactgtcagccgccttctggggtccctcccccgaacatatgtggactctgattgtaggcagccaacctgggcttctctccagtcaggggcatatggtgaggtcacaatggctgaaggggatgagacagaagacgattgatttcagagccagagagagtaatcctatcaaatgcaggtgcacagaaattaggagatcagaacagctccttgcatttcttgctacatttccagtattttcccattcccttgctcagtgccttgtcagcacacctagaattgagggtgtgataagagaggagcagaaaagtaagactgaaatattgtccaatacgactaagaattttgcagaatgcaataattgttttaaacacaacagcagtttatggttatcaaggcaccaaggaatagcactgccaagaatttactgagcagtagggcttctctgacaggaactgcgcagcaatgttctcccagcagcttgacgtcattctgcattggttggagtgagattggacagagcgtggctgaagctgacaggaaagagattatgcaggtatgtgaaagtaagggtacataatttgcacacagttcctcatgaagtcaggaattatggttcagatcaaagttgcagctttcttgtggcacagaattcagcatataaaatacattttataccaggaagtaatatgttgcaactttgatccaattcatcacccacctaaatccattaggaaacaaatgaaacagtctaaataaagagactagactaattgaggttaggatttccagaacagaaagagttgagactctaattaaagaagcttcctaaccccacacgtggagcaaaggagctgaaacagaaaggacatgaattccttctgttgtgcacgacaatagcaccatctgacaagtcaaacatctgtccaaatgaccaaacatatgcacatcccagtttaaaatgacaagacatgcacacttaatttagaggtatctgaagtattatgtgagcctaagggaaatccagagagactgggatagagggaaactagtgccaaagctttggcattcaccttaaataacaaacaaaaatatcttggatttttgcattcctgaagtaaaaaaataaatatcaatattagaaaaacaacaaacatgaaactcgtcccctgatacttatcaggagagtttgcctcaatattattcctctccatgatctagtgttcaaaaaagaagtactggttgtttttatatttgtttactttgcaacgcaatgcatttgttcaaatccaagcagaatctacattttctcttttgtttcagtggctaaccagccaggtaaactaattgttctctgctattaaatcaaaattagagttaggaataaaagccaaagtagcatagttaacaaaaacccaccgacgtttacagtcattacatggcacagaagaacctatggtttattaggaaatgtcacctgccagaagctaacatttagaccaagtcttatatcactgtcctggccaaactataacaaagcgaagaaattgcttaagcaaaaacaaggacaataaaacaaaggttttctaaattactgttgcccgtgtcattaaatttcatattgtgcatggaatataaatacatcactttgttctgcatgacaagcagaagtgagcattcatacattactcagccacttaattaagtgcctgggatatttgcagttagcagaaactaataagggaatcacatttaaattcaaatcactcctcagggtagctgtctgcaacataagcaaggcttactgggtagatgttccactaaatgctcagctgaaagcttagattcactgtatttgtgaataaagaataattctacttgtgattaaaggtgagagtaaaataaacaattctgttagggatatttgagtgacgttttatttcccctgttttaaataaccatttcgtctattactttgtctcccagaacaagggtatgatttagggctttgctagcttagagcaggaggttccataaaaaaacaaatgacgaggct

SEQ ID NO: 1885598 - DNA, 4001 bp, Homo sapiens
agcctgagcaacacagtgaaaccccgtctctactaaaaatacaaaaatttgccaggtatggtggcacacgcctgtaatcccagctactcaggagctgaggccagtgaattgcttgaacccgggaggcggaggctgcagtgagccaagatcacaccactgcactccagcctgggtgacagagcgagactccgtctcaaaaaaaaaaaaaaaaaagagagagagaatttaaggctgggtacagtgggtcacacctgtaatcccagcactttgggaggctgaggcgggtggatcgcttgggcccaggagttcgagaccagcctgggcaaaatggtgaaaccctgtctctacaaaaacaaaaacaaacaaacaaaattagccaggcacagtggcacacccattgtccctgctacttgagtggctgaggtgggagaatcacctgagcctaggaggttgagcctgcagtgagctgtgatcagactactgcactccagcctgggtgacagagtgagaccttgtcttcttgtctcaaaaaaaaaaaaattacacacacacacacacacacacaacacagaagctagaatgaatatgagaccttgtcttcttgtcttaaaaaaaaattgaacacacacacacacacacacacacacacacacacacatatcacagaagatagaatgaatggggcccctacccaccaaacttgggataattgagcatcaaaataaataatgatagagacagaatattggctggtgtggtggtgtgcatgcctgcagtctcagctacttacctgggaggctgaggcagaaggatcacatgagcccagaagttcaaggctgtagtgtgcaccatgattgcattatcgacctgtgaatagccactgcactccggcctgggcaacaaaggaggccctgtctcaagaaaaaaaaaaaaaaaaagagagagagaaaagagagaaagaaacggattataagtcatttaacaaaatagaaacctctggatccatactaattaatataaatacattaactgaagatttgatgagaaacaagatatttacaaatatcttgaaaggagagtttcagagtctccctcacaaaatacttattaatttacaaaggggggaaaaaagtaaccacactggacaagcctaacagacatcaccttattaaagtaaacatctgtaatgagagaagttaaaatcgtgccacctgatagggtgccatgagaagaaagcagcaacacttctagagtcctgtcatacctagctaaatgtaatcatgagtaaatatcagacagacccaaaatgaaggccattctacaaaaataactggccaggaatctttaacagcgtcaagaatatgaaaggcaaggcaagactgagagttccagtttgaagagtaggaaagatacatgataagtaaatacaatgcctgattctgaacggaatcttttaccataaacaatattattgggacaattggtaaaacgccgagttatgtaaatgttttgattttgatggttatattgtgattatgtagaaggtgcttagggacaatgtggcatggtgtcagcaatttaaatctcaattcagggaaaaaaagttctttgtactatacttgcaacctttttgtaagctggagatagattcaaaatgaaacttgaaaaatgacatttaaaacgctgagtgtagtgggaaaacgcacatgactcaaggtaagaggctattagtctcagttctgccattgacttagtatgtgaccttgagcaagtcactttacctcagtcctcacagtcaaggctctctagggtcccttccacgtctaacatctacccccacagcactggccccgcctgaatttctccaggccctttaggtgtcccagagctgcacccaaagactctggcttacgataaaaacagacaaaaatagttgtggccggaatctccggactgaaaaaccgctgtcctaatcctaacttgggccgcagtctccatcgctctttcgacggtgaagcagtcacgcctgccagagtgggcgctcgatggctcggcggccagctggcggggccttggaccagcggcccggcgcagggcgcgctcccaatcgctagctcccgcggtgctcgccgctgagagctttccggccacgccccacgcgcgccccgcccacctcaatgcctcgctgtcgccgccgccggcaattccagactctgctagggttagcagagcagccggtaacgttgctggaccgggacgcacgctcagctgaggaggacccccaaaggcaggcagtcggggatccagggagcggggacacctccgggcgcgagggggctgtgtctgggctgcctgttggctgggaaggagaacgcaccagggccgctgtatgagttgagcgctcggggatcccgagggtggtcgcggcagcaatgtgatcgcgaaagaagccggtgggagaaccggtcgaggggctaggtgtcttgaccctaagggctggagtccgccgagaaggggctgactggggcacagggtcggctgataaacagcgtggtccgttcttcctcctggactacgggaaagtctggcttcacctgtgcacaacaggtaggcgtggactctgcccgccagcgggagccggggttgccgggcgtgtggggaaggtcagcaagtcggagcccgcctcgccaactcgccgctcccgggacccgccctgcggcgtccgctgcgccagtggtcagccaggagccgggccccggcccggccttcgggcgagcttcctcagaggcccgttcgttttctgcaggaaccctcaaagagagttcccagaagggagcagtggagagtgtggatatttgctttctaactgttgcagttctctccaggaaagaaagcttttcctttggtggcatttgcttagtgtgaggaaacattttctttcaccctactctcggccaacgcggcgttatttcaagtgattataaagtctttagaaactttataaagcgttttatagtgtttatttatcacagtaatggatacctctggcaagttgggataattttcttgactgtcaagtcagataataataaaatggcttgagctcctacattaaaggtcatagttatccattgtttttatgtgcattcatttattgaacaaatatgcagcacttttttggggctaggcgcccttaaggaatttacagcctgaaagatattagaagtttaaggaggaaaaaaaggggcccacaagtacacttaagaacttccagagaaaatactcccagtgaaattacttaagctgtagggaaagcagaagtgtggttagaattgagcattagttggatggggagaggagaattttgtttaattttccaaacattttagaaagtatgtctttgagaaagtaattttagataaagtatcgaagccgagatttgtgttacattttaatgccattgactttttttttttcttcactgataagcaggcaggatttataatataagaatagtgacagttggagaatactgtagtatggatttgttgtgccttggaatgcagttgttttacctagatgactatagaataggagaataagaaaagactcctcacctgaaagtcaggagacctgaattctagcttaagttccctccactatttatggatgttagattaggtcacttttttagtattattcattattgtatctgactttagtcacagaaaatacatgactccaaagtacctttttaattcttaaattattaattaaaattaactacattaaactaatgaatatattatctacagaaaaaaattatttttttacttgtctttaaccaatacacttacctttcttcttgctttgtttcaaaaaggttgaggtagtttataatagtctttcttaactatgaataacataagggttaaattctgaattttttaaattctaaaattattctgaattaagcgtttaatgacatctgcattttttta

SEQ ID NO: 1885599 - DNA, 4001 bp, Homo sapiens
agttaaaaacaaattagaaggaaaaggtcaggttagcatgttttagaactattggtaaactataattcatgggacattatataatcaaaagattaatattttaagcactaagttataaagggtttacacccatgaataaaaagattaccatcacttactatgaaccaccattccatgaatccatgtagctgaacactcctaatgaaaagtttaattatccttcaacctgtagttgaagaactcagttcatgttcattgacagatttccattacagacccactatattgatgttactttctttgacactatattttatatagatatattaaaattgaaaacttaatgctgtttagaaggctattaatataactattaatttctgaaagctttgagtttctgaaaaggcttttaagatcaaaatttctgaaacactccacacattcttcctcacccacatttaattataaatcaatgttatactgataaaaggttctatacacacatttagagatatatgtgtgtgtgtgtgtgtctgtgtgtgtgtatatatatatacttttttccccccaagatggagtctcactctgtcgcccaggctggagtgcagtggtgcaatcttggctcactgcaacctccacctccctggttcaagtgattctcctgcctcagcctcccgagcagctgggattacagacgtgcaccaccacgcctggctaatttttgtatttttgtagagacggggtttcactacgttggccaggctggtctcaaactcctgacctcaagtaatctgcccacttcagcctcccaaagtgctgggattacaggtgtgagcaccgtacctggccatatttaggaatattttcaaaattagcttcacaatatatacatttgtaaggtttacaaataaccaagtaggtagaggagtggccaaccagattcaagtaaactgtccagtcttcactgttgctacttctaaatgatgaatgacgggtaatttcattaggctatcattgcaccttatacaatatctaattgctcctgatggattaaatctatacctgtcccactatcccccaatcccctccaaaccacttttctataggattaacgctgaaccgataacataaccaggatgccacatggatattcactaggtattaacattaataaatctattctataagtagtgttttaatattatgttcaaagctagttatttgagtcctgaaaaagaatacaagattaagtaagtggcttgcattaaaaaatggaagcctatcttaatatctggtgttataaatacagattcttacataaaacagttattctcaatgaaagaaaattcaaagtgcttccatcttgctccttttattatatggtgaagcatccttagtgtgaaattaatggttagatatataaatgcatggcataacatgagaaaatctaggagaaaatatcctcattttaatctaagactatggaattatcaattccaattagacttaatcagcaacttacctttttcaaaaaaagcaaatgcacaaataggcttgataatttaactcttcttaactattaaggctctaggatgtccttaacttttttaaaagatcattttaaaaccaaagcactaatttctatacacagtaaaaacagtacaaatatctgaatttcagatctggcttttgctagatagatcctaaaaatgaagaaaacattttccctttccagatactttaataatttaaaatataaataattgtattaagtcccactgaataaagaatgtgaaagtttttgtattaaaaaaaaaaaacttaagagtttgaagcttgatagtcatttcattttatggtgggacagagactggattttgcttgctttccataattacttcactgtctccctccatttcaaaattgacattcacaaatgagctggatatcactgtctctggttgatctgtctgaacaatggaatcagtctgcaatttattctgttgatattgtttttctgcttcttcagacatcctgttttcttcttcttcttcttcttcctaaaaaaaaggagcaatatcaagaatagttgaaatacgaaagtccaaaaggtatatagtgctgttttccccactgtcagcttatgtttaaaaaaaaaaaaaaaaaaaagtgtcatgttcaaatcagtttggtctaattaagacatactttcccttctcctgctctctaattgaaataaccactgtaaaacattttaaggaaagtagttttttcttgttgtttgttttttttgagaaagagtattgctctgtcacccaggctggagtgcagtggctcactgcaacctccatctcccaggctcaagcaattctcctgcctcagcctcctgagtagctgggactacaagcacctgccaccacgcccagctaatttttgtatttttagtaaagacagggtttcaccatgttggccaggctggtctcgaactcctgaccacaagtgatccacccacctcggcctcccaaagtgttgggattacaggcatgagccaccgcgctcagcccaaaagaggttactttttaaaacagggtccagcactacatcacgtagatgagacctgaattaactttgacaaggactttatttttttcagattaagtctaagctaaataaataaaaagttagcttcaactgtatcacttcaattgtagggtgtcagtctattcggttgaataggttggttcatttactacatgatatatagcatagttagttttcccataagcatcaaatacatagataaggcagcacctaccctcaagaagtttacaacttagtagggaagttaagacatgtaaaaacagtattatgacagatgtacagattttgaaagggtaaataatttctagttgcagaactactaaattcattgagtaggtggcatttgtattggaccctgcagaacgggtagtcagtacacagtgagtaaccccagaagattactctggggcttgcttgagaatagagaccatttaggaggctagtataatagcccagatgaggtaatgaggctctaagcaaggcttacagtgttaagaaatacttatttgttcataaaacaggtttgaaaccatatgacaaatattaagtcagctgacctttccaggctcatgtccagtcactcccacattgtaccttatgctccagtgacaataaactattatatttttgccatttccccaaccataacaatgtaccttcatgcctctacattctagctttacctgaattgctgccctctatttgcttgaagaatagcagatgccaatatttgttgtgctcactaggtgctgttctaaacattttatatattaatgtatttaatctgtagagcagcccccgagcatggatgctgcaattctcctcattacaaagatgaggagattgaggcttatagaggggttaagtgttctgtccaaggttacaaagttttaagtggtagaacggattttgaattcaagccctttggttcttgagcccatgctcttaagcactaaaggcttttattttttaagacaaaattcacttcactctcaccttaagacctcactacttttaaactgccctcaaatttttgtgcattaacacctggcacatacacatttcttgtacttaaatttttatctgtgccaaacccactccacttttcctatatccagtccatgtgctctaagtatcttgtttcttcatcttagaattagaatgataatccaaagagaggcatgtgaagattaaataatgtatataaggcatctcacatagcactaagacaatgaaatctagcttagttttgcacacagatcataggaaaattccagtttaaaggaattccaaaatgtatgttactttgataaaagaaattaatgattctagaatgaaatgcctagcataagagagctacatgttgggcagttagaaaatacataggctcattatgcaac

SEQ ID NO: 1885600 - DNA, 4001 bp, Homo sapiens
aaattaccaaatctcaggtgttttgttatagcagcacaaatgaactaagacactcctttaacctcaaatttaatttgatcctggggagaaaacagccttttactctatctcttgtagctgagggggaggaagttagtaagaagccatctgtaactagataatttctttatatgctgaggatgtaattagattatttatcctcaaatgagcaatcagttccattgtttatccactgttttctcaataagatcttctgcaaggtatcaggaggaatattgcttaaaaatgaaaaggtgagctgcttcggcaggaacctcaaaaagggtgtggaatggaacaggagctttgggagcaaattagctgcgtaggcaagttagccatagtagaatcagaaacttgctatttatacaagttggatggattttcattacttgttttatctttgagttttattttatttattatctatttatttttgagacggagctttgctctgtcgcccaggctgaagtgcagtggcatgatcttggctcactgcaacctccgcctcccggattcaagcaattctcctgcctcagcctcctaagtagctgagattacaggtaagtgccaccacgcccggctaatttttgtatttttagtagagtcggggtttcaccatgttggccaggctggtctcaaactcctgacctcaggtgagccacctgcctcggcctcccaaagtgctgggattacacatgtaagccagcgtgcccggcctatctttgaattttataaacactcatttcgcaatatgaatataaaataatatgtaaatcagtaatacaaaagaagtttgaagaagaaaataaaggtcatccataacttctccaccatcatttcttccatccataatttacacaattatgattacataatccagtgattggctcacactggtaaagactttttggaaagtctagcatggctctacagtactgaagagaaccaagaaccaaggagttagggcttggaaggaagaagtgtatactcctggaggccagcatagtggtgatagagataattaacatgacaaaactccaagaggaaagtaagactcaggaaaacagctgtggccacctgttcaggcatttcttttcacccggacacttgctttcaaaaacatttgtcttcttaaaccttcaataactcattcttttattttacaaaggatatcattcctttacaatcctctacctacatcttaatcatagtatcccgggtgctgaagtttggaagcaagaccaggatggaataaattgtccccaaatagatacaaccaaatagactttctgttttcctgttaacctaatacagagttgtaacaaagaaagattaaaatacactcaacgtaattagctttaagggcagggtggacaaaatctgagagagtttttgaagaggagagaagcagatacagtaagtatctccgcatacccaacatatgagaattttagggcagtggaaagggattgggaaggagaaaaaacacaagagagctgacctgagctcaagttaagaagagaccaggttaaggcttggagaaaatggcccaccagctaggaaaatcctttcccaagcaggctaggtttgatttgggggctgcaaactagaacaaggtaatatcagacatattttctctgcagcattcatttaatatatacttattgagtatctaccatttgctacttgaattagatatgctttcagccctggaagagtatacatgcctacagcgggagaaaaatgagtaaaacaatgatgacagtataaaacgaaatactatggcagggtaggtacctggggctttgagagtacacaggagggacaactctgaaaacaaccgctgtgaggtttttgaaccaggcctttcacagtagctgcccaccactcccggaggagatctgtaaaggaaaaagattacagattcttcagcttgtgatttcaaagacaattatacagtactatttcctctacctctacaattacagagtactatttcaaagacaattatatagtactgagaggtgacaacgtgctagcagtcctcgctctctctccgcgcctcctcggcctcggcgtccactctggccgcgctcaagcagtggccgcgctcaaggaccccttcagccgtccgctgcgctggaggggtcccactatgggactggccgaggccgcagccggctccctctcctcgcagggaggtgtggagagaaaggcgcgggcgggagccggtgctgcacgcggtgctcacgggccggcgccggttccgggtgggcgctgggctaggcgggcccgcactcggagcggccggccgcgccaccggccaccagcagtaaggggcttagcaccggggccagcagctgcggagggtgccccggctcccccagcacggcaggcccgcccgcgccgcgatcgaattctcgccgcgcctcacccgcctccccgcagggcaaggctcgggacctgcagcccaccatgcttgagccccctcaccgttggctcccgcgcggctggagcctccccgacgggcgccgccccctgctccacgacggccggacccatggaccgcggaagggctgagaagtgcgggcgtggggcgtgtgtccggctggcagctccgccagcggacctacaccagacccactagggaagccagctgggttcctgagtggggtgggcacttggagaacttttatgtctagctaaaggtttgtaaatgcaccaatcagcactttgtgtctatctcaaggtttgtaaacgcaccaatcagcaccctgtgtctagctcaaagtttgtaaacgcaccaatcagtgctctgtgtctagctaatctagtggggacttggagaacttccttgtctagctaaaggattataaatgcaccaatcagtactctgtgtctcgctcaaggtttgtaaacgcaccaatcagcaccctgtcaaaatgggccaatcagctctctgtaaaatgggccaatcagctctctgtaaaatgggccaatcagctctctgtaaaatagaccaatcagcaggatgtgggtggggtcagataagggaataaaagcaggcagctggtttttgtcctcttccaggctgtggaaattttgtttttttgcagtttgcagtaatcttcctgttgctcgctttttgggtccgtgctgcctttatgggctctaacacttaccatgaaggtttgcagcttcagtcctgaaaccagcaacaccaggaacccaccaactccggacacagtactatttcttctacccccaaagcctaactgccattatttctactagaatgctataagccttacatttaaagataaaaaattttcaaacaccttcaaattttaagaaaatatgtcacagctaaagtaatccacacaaattaacctcaatttttttctctttctgataatagggaatatgtgagagggtcacttgggataagccttctttactagtagtagtagtagtggtagtagtagtagtggtagtagtattttgagacagagtctggctctgtggcccaggctggagtgcagtggtgcaatctcggttcactgcaacctccgcctcccgcgctcaagcaattttcgggctcaagccttccgagtagctgggactgcaggggctcgccaccatgcctggctaatttttttgtgttttagtagagatggggtttcaccatgttggccaggttggtctcgaaacgctagcctccagttgatccacccgcctcggcgttaaaaagtgctgggattatacaggcgtgagcccttgcgccccgccgggccttctttaagcacttggtaaatgtccgctggaattctgaaggaaaaggactgattcccagctcctgcagtattcttcaaaaacactaggtggtagaagctccacggcatagaatgtaaaggacctggagagaaaacaatacctgaacttttttggccttaaaagta

SEQ ID NO: 1885601 - DNA, 4001 bp, Homo sapiens
ccaccacgtccagctaattttttgtatttttttttagtagagacaggatttcaccatgttagccaggatggtctcgatctcctgacctcgtgatctgcccgccttggcctcccaaaatgcggggattacaggcgtgagccaccgcgcccggccttagtacttctttttttttttttttttttttttttttttttttttaacagaggataatgttaacggaaattgtgtagtcaagagttaaaatctggccaaaataatctgaccagatagttatatagttaggctacattctatcaagaaacataaaggaatagagatattttaaatgttgtgatattccttatttataatccccttcatagtacttttcatactgtactataatataatgtatctgtttacttgtctgtatccccctctaggctgtaagttccttgaagaaagaaagaactctctcccattctctcttatagtagaagttagcatagaggtgcctggcatataggtggccagacacctattcaaaccctgtagaatgaatgcttttacagctagtaaacagaccaaagcccatacccaatatcatatgctgcatattgtcaatagaaatactggaggagcaactgggaagcaggcactcagaaattttttttgagtggtaaagagggtcctgatcttagatgctttcagtcagagctgcagtatacagttggataggttgttcactgcacaaggttaaccagctaagggcactaattggggcagaaaatccagcctgtattctacttgacaagccatcaactccaacaccgctctgtatctgcccacaggaagcaatgccttttttcaaattcctacaaaggccctgtacaaacttcagatagtcttgatttaaataatgacagagtaataatgtctgacaggttacatctcaggagcaagaaaaattgccctaccaatctgattccaccagagagtaaaagaaatagtgaagactgtctattcttaaaatgaaaacactgaggttggagatggtttttctctggattctcaacatagggtgatgtgcttacaaaataattttttttaaataaaaaagacccacataagggagcctctgtattcaacttgatcccagaatatgagttacagaatcagagatgcataaaaatctggaagaaaccttaaagttcatagaattccattgctagaaggaactttagatatcatctggtccaagaatcttaattttacagatgaggaaaccaaaaagatcaggaagattatgtgatttgcctgtggatggttagcaaagctaaatctagaacctggttgttttctacctctcaatcgaacactctttaccacagctggttggacttgacatcattataatcaactaagactgattgcgcacccactgtgtgggagaggctgacatggacttggtttccatcaagggcctagcaatgaggttgagaaaacaggaaatccaagcatcaaaagataagtaataatatgagatggcatatgaagcaaggtttagattccagtttcccagtgggagtggtgacaccaaggtgagtgatgggtgtggggtggagtgccctcgtatccacccacctatgcgtcctggttctgtctggaggcaccagggccaggtgacaaaacgtccaggcgaggccgcagtagggcctaaggtcaaaaagagcaatgctgaatcctacatcctggggccctcctaacacgtagcttaaggctctgggctcatgacccacattgtaaggatgagtggggtaaagcctatccacatctgggctgtgaattccagaagcgggggaccgaggcagctgtgcatgaagaccgcaaggaaggaggaagggagccgaggaggcccaagagcggcgggcgacctgacaccaccctgccctcccagccagaggggcaggggggaaccccgcgcgcggcgccggtgcagcccgggcttccggggcggcgcacgcggccggggggcggggcgggggccgaagcaccgcctacgtcgggctgcgtgacaatggggccggcggcagaacgcagctgcggcggctgcgggtctcgtgggggcggagcggtcgccgctgccgccgcagctcgggtcgggatttgaaagattagaaacttcgggtggagagggcggcggcgttgaatgtgtggcggaagcgctgggggtcacggctccgcgcgccgccggacagccggcggcgtctccacagcatgaattacccgggccgcgggtccccacggagccccgagcataacggccgaggcggcggcggcggcgcctgggagctgggctcagacgcgaggccagcgttcggcggcggcgtctgctgcttcgagcacctgcccggcggggacccggacgacggcgacgtgcccctggccctgctgcgcggggaacccgggctgcatttggcgccgggcaccgacgaccacaaccaccacctcgcgctggacccctgcctcagtgacgagaactatgacttcagctccgccgagtcgggctcctcgctgcgctactacagcgagggtgagagcggcggcggcggcagctccttgtcgctgcacccgccgcagcagcctccgctggtcccgacgaactcggggggcggcggcgcgacaggagggtcccccggggaaaggaaacgtacccggcttggcggcccggcggcccggcaccgctatgaggtagtgacggagctgggcccggaggaggtacgctggttctacaaggaggacaagaagacctggaagcccttcatcggctacgactcgctccgcatcgagctcgccttccggaccctgctgcagaccacgggtgcccggccccagggcggggaccgggacggcgaccatgtgtgctcccccacgggcccagcctccagttccggagaagatgacgatgaggaccgcgcctgcggcttctgccagagtacgacggggcacgagccggagatggtggagcttgtgaacatcgagcctgtgtgcgtgcggggcggcctctacgaggtggatgtgacccaaggagagtgctacccggtgtactggaaccgtgagtagcgggccggggttagggcaggacgggctgcccctgcatgggccgatgcgcaccggtgtgggtttgggactggtcgccgcgaagagggaggcgcgtgaggcctggcgtttggctggggcaggatggagattgagcagggagcgtcggcagctgaagggtaaacgagcagatggcaaaacccaagctgcctggggtcaggaggactggataccttcgggggtagcgcctcctgggtgagccgggtgctgctgccatcccctggaagtgatccaggaccggatccgcagcccgaggtttaatttcgtgatcctaccagctttgtccacctggggatctggttctgtctcatttaccctaaacagcctatgatttaaatagcggcacgtcttctggagtaggaaggtttgagaggatctgctcgagaatcaacagcttagttatgggttcaggaaaagtaaaagaatccctggagggaaaggagataggttgttcccactgggtgtgttcggagaggtggaaagcactgcgtgaagcagctctggcaagtggctccgctccctcggtggaatactggattctgtctcttaggtcctcatttacatatttttgtgtttgcatcttaaccttgaaaaattaccatttctatgcctcgtcttcctcatttgtaaaaggggagaaattgtacctacctcacgggattgttgtgaaagtaaattagaaaatatacttcaagggcttggaactatggttggtacttacgtgtgatatgagtgttaacagtatttattagacaacaacacagacgggtttatagttagaataggaggaaggtgaccgtaaatatctgccagtgcatgcagcaaatattacgtatgtaatatataggagatattcaatagtc

SEQ ID NO: 1885602 - DNA, 4001 bp, Homo sapiens
cattccctgcccccatgttccctagcaaactctcctgcgaccgttaaattacagcctaaaaacatccgcttctcttttcccctgggggctgccagttccctggggtagagttcagtctgttgtgtccaaagcctagccagtagatgctcccatgtttgttgaatgaacagaagttgggacgggaaaccaacagacgctcaggactggggtttgtttttgttcctgtaaaactggattggttctgcagaggcacaaacaagcccgttgatttagatctatcgaggaattggggtaggggcaggggtggcagttttgctaagaagaaaagcaggtgaaagtgggagattccaaaagagaccagagagaaggcagtgtgtcctgcccaatctgccgctagggtcagagaccagctccctagtcacactcggccaaggcaggctgccgggctgactccaactctaaacaaagccaggcagccgcccaggtgggtgaaggctgcagattgcgctcaggcgtgacgccggggtgcaggtgggagcgacgcccgggtgcgtgggtgcagcgctcgcccgcccgcggttaggcgcaccgcgggaaccggtcaggtgcgccgtgtggggcggggcggaggcagggcgtgcgcccccaggctggtgcctggggcagaggattcgcctgcttgacgcgctgatgccttgatttggtctgacaagtggaggctgctttgagaagcggcctgtatttttgacattcaggaagctagaaataaccagctgggctcctggcgctctggccgcaaatgtcttgcgctttccaggcaactgccagattgaaggggcttttccccaatgtagacctgtgctctgtgtgctaggaggccgaggttccagtccaggctcggcttctgactccctactttaggaggaatcactgaattgactgcagctcggcttctgctctgtaaaatggggctgttgctagctgagcctcttctgcctctggtagaaaatgattccaagtggctgccctgtccaccctaatcccatggcccgaacttgatgtctgctgcttctagaagcctagtgctccaaatatctgctctgggagggacttgcagatgatcctgattggaaatgaggctgattaaccttttgtgtatcattgactctaggacaatctgttgaaacctaggggctcttaccctagacaaattaacacaccagccagatacagcttacaagggcagagagttgctggtttgaaccacagacccctggtttaacatctgtaatctagtcaacccctcctctttcttgaaggctgaaccaaacacgaagggttttccccaccttccaatcctcatacatgcagacacccccttttcctgctttctccttcagtcatcttcctcaccatcccccatgcttgggcactctcaggagggaaattgtcctataaatatctgtaaaaggcatggtatgtcctgtagcagagaaagcaaaaaataaaaatataattcctccacccctggcatggcacgtgcagagctctgcctgatccttctctcccacaagcctcgggggtgggtaaacaaaagtgagaggtgaagctgctgcagcgaagtaccccttcaaaatcttcagtacccttcagagccagcgctgtcatcactatcacataaactgtacaactccaacgtcaaccagcagccgcctggctggcagcaggaagagccaatgcaattttgcacagtggcttgcttgcccaaggtattgcctggcaaatgggcttcttgtgcaatggggaaccacagggaggggcctcttaaatgtacctcaaagaaacagctctaacaatggatgattcaacaggctagtaattggcgctcactcttaccacattgttttgataaaacgacatagcccaactggggatatgaaggcagtaagtagaaaagctaacctcttgctactcaaattgtggctgagaaccagcgacatcccatcaccagaagctttatagaaaagccaggctctgtcccagacctattgaaaggagatctgcattttaacatgattgcgagaggatccacatcttaaagtttcagaggcctaatccaaagtcttctgataatgatcattagagtcccagccacccccgacttccccctgggaaaaccacaacaaatagaacaaattcctccaagctctgctcataagaagaacccacaacccacagacaccccctcactcaactagagacctcacccacctgtttgcagagtcacccaccttgggctacttcttttctactatttaatcttctgggaaaacagaggtcttctatttggagataaaaatgacaaaggagaacctcctgaacagcatccagtttgcttttagctttagccatctctctgacctcagtgctgctggactcagttccaagatctaactgtcaaatgctttaggggaaacgggaagagaagtccctggagtaacccatgtgcgcagcctggcactgttttcacttgcctttggaaatgaaggtgcagaaaccatgggaggtaaggagggcacagactagtgacttccagtgtgggacagaggggaaaagatggaagagaagtgcagaaaaccactcgggaaaagacaggctggagtgatgcctgctgagacagggccctgatctcccaggacttccctttctgcctgttctgtagaaatgtctcgggttttgtggtttaggaaaagagatgcttagcaagcttgtagaaaatgtaatgtgggcactttgttgctgtcctggcttttaaaggactctgaagcagatcagcttcaaggtattggctattctgtttgcagccttagaaagacatccttgatgttttattgttctgcctttgctaagagctggaaactctccctggggaaatggctcaccttgaaagagatgctatcgtagctgaaaatgttttagcttcacttccaatctctggttccttgtgggaagtaactgctgctgtggtatatatgccctgtgccttttatttttaccatctttacctcggtggacacagctggttgaaactcagtaaaacttatgcttccatggagattgattcagacaacaggaaaaataagtgtagaaaaaaactgcacagtacaagggctagattcaggttgtagaacaaagtgattattacttagaatcctggattagcaagagaataagaaagatgctgagattacctagtgttatcaccatccacgtgaaacgtagaataaaactttttccccaccacatagatattgggcagtttattatagatgctacaaagggatttattatatttttcccaaaatggttaattagaggcatcccaaattacaactcctttagcataactcccagctccatgcagcctacttactaaggacccagctactgacagctcagctctttgccaatccaactttttttccccatatgctcaaacttttcttctccaagaagacttcctgaatgatcccaattcatagggatctcatccttaatgcaggggaaattcactgttctggagtagtctaccataccatcacgctcttctttttgtgtaatcctggatttcttctccagttgttttattcttgcctgtctacacagatagatcagtagccttcaatagtctgcatctcctgttatcttgcagcctcctactataaacagtaggtgctttacttatgccagttgggttgacctagacagtagtctctaagtagcagtccttggctcatccttctgaaaccaacgagctcttaggcaggctgagaaagggttaggactgttcactctgggacatccttggctctgtatgagtgttgtttttaaaagcagggattttgtctccagtgcattgaagagataaaaccccattgtcagcatatttcttcaggatctttctgtgttagatctcactgccaagccagagtccccacaca

SEQ ID NO: 1885603 - DNA, 4001 bp, Homo sapiens
taaacaaagccaggcagccgcccaggtgggtgaaggctgcagattgcgctcaggcgtgacgccggggtgcaggtgggagcgacgcccgggtgcgtgggtgcagcgctcgcccgcccgcggttaggcgcaccgcgggaaccggtcaggtgcgccgtgtggggcggggcggaggcagggcgtgcgcccccaggctggtgcctggggcagaggattcgcctgcttgacgcgctgatgccttgatttggtctgacaagtggaggctgctttgagaagcggcctgtatttttgacattcaggaagctagaaataaccagctgggctcctggcgctctggccgcaaatgtcttgcgctttccaggcaactgccagattgaaggggcttttccccaatgtagacctgtgctctgtgtgctaggaggccgaggttccagtccaggctcggcttctgactccctactttaggaggaatcactgaattgactgcagctcggcttctgctctgtaaaatggggctgttgctagctgagcctcttctgcctctggtagaaaatgattccaagtggctgccctgtccaccctaatcccatggcccgaacttgatgtctgctgcttctagaagcctagtgctccaaatatctgctctgggagggacttgcagatgatcctgattggaaatgaggctgattaaccttttgtgtatcattgactctaggacaatctgttgaaacctaggggctcttaccctagacaaattaacacaccagccagatacagcttacaagggcagagagttgctggtttgaaccacagacccctggtttaacatctgtaatctagtcaacccctcctctttcttgaaggctgaaccaaacacgaagggttttccccaccttccaatcctcatacatgcagacacccccttttcctgctttctccttcagtcatcttcctcaccatcccccatgcttgggcactctcaggagggaaattgtcctataaatatctgtaaaaggcatggtatgtcctgtagcagagaaagcaaaaaataaaaatataattcctccacccctggcatggcacgtgcagagctctgcctgatccttctctcccacaagcctcgggggtgggtaaacaaaagtgagaggtgaagctgctgcagcgaagtaccccttcaaaatcttcagtacccttcagagccagcgctgtcatcactatcacataaactgtacaactccaacgtcaaccagcagccgcctggctggcagcaggaagagccaatgcaattttgcacagtggcttgcttgcccaaggtattgcctggcaaatgggcttcttgtgcaatggggaaccacagggaggggcctcttaaatgtacctcaaagaaacagctctaacaatggatgattcaacaggctagtaattggcgctcactcttaccacattgttttgataaaacgacatagcccaactggggatatgaaggcagtaagtagaaaagctaacctcttgctactcaaattgtggctgagaaccagcgacatcccatcaccagaagctttatagaaaagccaggctctgtcccagacctattgaaaggagatctgcattttaacatgattgcgagaggatccacatcttaaagtttcagaggcctaatccaaagtcttctgataatgatcattagagtcccagccacccccgacttccccctgggaaaaccacaacaaatagaacaaattcctccaagctctgctcataagaagaacccacaacccacagacaccccctcactcaactagagacctcacccacctgtttgcagagtcacccaccttgggctacttcttttctactatttaatcttctgggaaaacagaggtcttctatttggagataaaaatgacaaaggagaacctcctgaacagcatccagtttgcttttagctttagccatctctctgacctcagtgctgctggactcagttccaagatctaactgtcaaatgctttaggggaaacgggaagagaagtccctggagtaacccatgtgcgcagcctggcactgttttcacttgcctttggaaatgaaggtgcagaaaccatgggaggtaaggagggcacagactagtgacttccagtgtgggacagaggggaaaagatggaagagaagtgcagaaaaccactcgggaaaagacaggctggagtgatgcctgctgagacagggccctgatctcccaggacttccctttctgcctgttctgtagaaatgtctcgggttttgtggtttaggaaaagagatgcttagcaagcttgtagaaaatgtaatgtgggcactttgttgctgtcctggcttttaaaggactctgaagcagatcagcttcaaggtattggctattctgtttgcagccttagaaagacatccttgatgttttattgttctgcctttgctaagagctggaaactctccctggggaaatggctcaccttgaaagagatgctatcgtagctgaaaatgttttagcttcacttccaatctctggttccttgtgggaagtaactgctgctgtggtatatatgccctgtgccttttatttttaccatctttacctcggtggacacagctggttgaaactcagtaaaacttatgcttccatggagattgattcagacaacaggaaaaataagtgtagaaaaaaactgcacagtacaagggctagattcaggttgtagaacaaagtgattattacttagaatcctggattagcaagagaataagaaagatgctgagattacctagtgttatcaccatccacgtgaaacgtagaataaaactttttccccaccacatagatattgggcagtttattatagatgctacaaagggatttattatatttttcccaaaatggttaattagaggcatcccaaattacaactcctttagcataactcccagctccatgcagcctacttactaaggacccagctactgacagctcagctctttgccaatccaactttttttccccatatgctcaaacttttcttctccaagaagacttcctgaatgatcccaattcatagggatctcatccttaatgcaggggaaattcactgttctggagtagtctaccataccatcacgctcttctttttgtgtaatcctggatttcttctccagttgttttattcttgcctgtctacacagatagatcagtagccttcaatagtctgcatctcctgttatcttgcagcctcctactataaacagtaggtgctttacttatgccagttgggttgacctagacagtagtctctaagtagcagtccttggctcatccttctgaaaccaacgagctcttaggcaggctgagaaagggttaggactgttcactctgggacatccttggctctgtatgagtgttgtttttaaaagcagggattttgtctccagtgcattgaagagataaaaccccattgtcagcatatttcttcaggatctttctgtgttagatctcactgccaagccagagtccccacacacagactctcacttttcccccatcaataggctgaagtgaggcaagtagtagaatgtgctcaaatcatggcctattcttaataaaagaaacaaggacagcttggggctggctcgtctcttctcaaattctcctagtgttctgaaccaaatgtatgaaacgaatagatttgttttattcgcaggtattaatgcttctccgaaagcagttgtttgggtggctggaatatcagtagtcattgaccaataaggcttgcaggtgtgaatcagagcagtattctggacttccagagtagagctgccatctactactctacatcaccttcatccttacagaatcactgagaccattcattcattcacaagcagttgtgtctgctacatgccaggcacttgtagtaggcattagagatacaatggcaagtgaaacagacactgcatgtaatctactgagagagactggg

SEQ ID NO: 1885604 - DNA, 4001 bp, Homo sapiens
ggattattatatgttaagtgcttaacccaatgcctggcacaatgtaaatactatatgtaagtgatatctattatttttatctcagtgttatttataatagcaaaatctttctgactatagaagaatgcttaagtacactatggtacacttacagtggaatttttttttttttttttttttttgagatagagtctcccgctgcggcccatgctagagtgcaatggcacgctcttggctcactgcaacctctgcctcccgggttcaagcgtttctcctgctcagcctcccaagtagctgggattacaggcagccaccaccatgcccagctggtttttgtatttttagtacagatggggtttcaccatgttagccaggctggtcttgaacttctagtctcaggtaatccacccacctccgcctcccaaagtgctgagattacaggcgtgagccactgcacccggccacttacaatggaatattgtacagaatattaaaaattaggctttaaaagaatatttaattacatataatgtaaagtaaaaagcacaggaagcaagcctggggaacattgcaagaccctgtctctacaaaaaaaataattaaccaggggtagtggtgtgcacctatagttgcaacttctcaggaggctaaagtaagaggtgagaggatcccttgagcccaggagtttgaggctgcagtgagcaattatcatgccactgcactgcagcctgggtgacagagaaagaccctgactcaaaaataaaaaagaaaagaaaacaacaacaacaacaacaaacagtaaatgaattgtgtatattgttccataccacttatgttggctaaaagagcactttttacaaatatagatgcctaggaaacaactggtaggaattacatcaaaatattaacaaagaatacaactgggtgtagactggggggttctttatactttactgtattttccaaagtctctacagcagtgtttctcacactttaataggtaaacaaatcacccagtatgctcgttaaaatgcagcttctgggttagtaggtgtgggattttcagattctgcatttctgataggttctcctgtgatgctgatgatattggcccaaggtctacattttgagtaggaaggttttaaagcagcatatctgaaccaatatactggttaactgagacccaccctcagagtttctgatttcttaagtctggagtaggatcctaggatttgcatttctaactgtttcccaggtgatgctgacactgcaggtctggggccagcactctgacaaccggtgctctagaatctttctttttcttaacattaaggaagggagggcactaaaaaatatgtcaggcttctccattgactccaaaatcaaatccaaactcttcatccaaaagcccccataatccaaccccgtcatttcccactacttctcattaggctataaaatcaaaccactatgccctaaacacacctgagatttcaaacatcaggacttccgctggatttcctcactccggctatgccacttccttctacttcttcatgccaaatcctacccagccttcaaggtcctcaaatgctatttcctccataaagcctcctgatctaccactactcaaaaagctacctctccctccccccctcagggctgcacagcacttttcgttcctccccaatgacaggcaccatctgtacctggtccagcgactctaccggtgggtggtgtatcttcgcctgtagactgggagtttcttgaggtcaggggagtgacttgcctatctttgcctcttagccttagcagatccccagtagacagctgacactcagaaccgaccaaaagaaggaaggaatgggacctcctgaggaagggcacagaactgtcctgtaaatggaaactagaccggacgcacgccaagccgatgacccacagtaacaggtgttctccatctctgatgtctgtgattcatcctgcacagctgcgcgcacacagcacacgcatacacaggctcccagaatacggcgccccacacgctgtaccgcccgtcgcgttctggacgccccggcgaccacacacaccgagacacacctcagcgacaacctggatccacaaaaaggaggccctgcccccttaaaaaatactaacaccttactgcaaagaactagcagctacggcttgcgcctgcgccccttgttccctgccgcaccttttcttgtagttaagaaatctatttctgcacgcatttcgtcgccgccgccccccatccctacacgcacgcacacacacacacacacacgcacacacacacactccccttcccctacacctacccccctccccccacctcctttcagactaggcgcgcctcgcagagcgggattgaatgggaaagagcggggccgtctttgtcattaatcctcccctccttcgggcaagccaagcttcttccgggtcagcgaccatccccgccaccccactcggggccacggtccccccgcagcgctagtcccgggcccgcgagcaccggcccccgccacccgcaggttgcggagggaggagggcgggagcgggcggcgcggagccgggaggcgggggaggggccggcgtccgaggcggcggcggcggcggctggagcagcctctggcagcagcggggagaatgggagtgcggggcgccagaccgccgcggggtgtcacggccgccacgaagcctgcgaggcgcggggccggcgcccgcggcttttaaacccgggaaggcgcggcggcggcggcggcggcgggcagatcgcggcgcgcaccaggcgccggggcggcggccgaatggagagaaagggctcggcggccggggccaaggggaacccgagcccgcccgcggccggagaggggcagcggccaccgccgccgctgtgcgtcccgggcggcggcggaggagccccagcgaggggccaggtcggggcggcggccgagccggccgagctcatccgacgagcgcacgagttcaaaagccaaggggcgcagtgctacaaggacaagaaattccgtgaagccataggcaaataccaccgggcgttgctggagctgaaggggctgctgccgccccccggggaacgggagcgggactcgcgcccggcctccccggctggggccctgaagcccggccgcctctcggaggagcagagcaagacggtggaagccatcgagatcgactgttacaacagcctggcaggtgagccgcgccgcgccccccgcgccgcggtccccgttcttcggcccggtccctccgcggaccactgcggcgctcccgcggtgcagattctcctgctgtgactgtgttgctctggggagaacccgggagggaggcgctttggaaaaagtgtgactttcaggattatgcctttcaaaggccataatcatctcttgtcccttcgctagcatacatcgtaaatctcacctagaaatgactggaaggggacccagctggcctggctatggctgctgctgctactgctcaccagtggacctgggtccaaaatgcggaagcagcgcccggggtgggcccccgcagccaccgctagcccagctttttcctgcgggtgggtcccaagggaggccacgcacctgtctgctctccttaggtagcatgagcaccaggattggtcctcgccttttccccaactaaccgcatccctgtaggtaagatcttccccaagttttttggccccagtagcaaaggggagtttgacaccatgccttcagcatcttgagcaaaatggattccagaatgccactttcttctctctgagctctgctggggctcccggttgccaggtgaagatctctatctcaaaagaagcttggttcatggttgggcttgaactatgctgcattctccctctcctccctgcccgtttctcactatgtgtagcatcagtcctcacgccagctggctgctaggggtgaaggaaaagggggccctactcttgggcaaag

SEQ ID NO: 1885605 - DNA, 4001 bp, Homo sapiens
ataccaccatatatatggcaaataagtacatgtaaagatgctcaacattggttgtcattaggtatataaaaattaaaataataatgagataacattgtacatgtattaagagggctaaaaaccaaaatatgctaatactaaatactggttaggatgaggagcaacaagaactctcattcatcaccggagaaaatgcagaatggtacaaccactctgatggataacttagcagtttctaacaaagctaaacatatttttaccttgtaatccagcagctgggttcttagatatttacctagatgatttgagaaattttaactacagaaaactttcacatgaatgtttatagaattttataaaattatcaccaaaaactgaaagctatcaagatgttcttcaacacagaaatgaataaactctggtatatccatacaatgaaatactattcagagataggaaagaatgagctatcaagctgtacaaggacatagatgattcttaaatgtgtattgctaaatgaaagaagccagcatgaaaggactgctgcatactgcatgattatattacattctggaaaaagcaaacttatagagagggtaaagatatcatttgaaagcagcctgggcaagatggcaagaccctggctctacaaaaaaaattaaaaattagctgggcatggtggtgcacacctgtagtcccagctacttgggaggctgaggcaggaggatcctttgagcccaggaagtaaaggtggcagtgagccatatatatggtgccactgcactccagactgggaaacgaagcaagaccctgtctctaaaaatgaaaaaataaagaaaataaagatatcagtggtttctagaggttcacagacacagatttgagtaggtgaagcacaagagattgcctagagtggtgaaactattctgtatgatactgcaatggtggatagatgatattatgcatttatcaaaacccataaaagtctagagcacaaaaacttaaccgtaatgtatgaaaatttttaaaaaattatttaggaggttaggagatcccagatacaaggtaaactgtgactatacaaccatccaatcttcaacaaggccaacaaaaacaagcaacaaggaaaggacactctattcaataaatggtgctgggataactggttagtatgcagaagattgaaactggatccctacctttcaccagatacaaaaattaactgaggatgaattaaagactcaaatgtacgctctcaaactataaaaatcctaggaaatatccttctcaacactggccttggcaaagaaaatttggctaagtccccaaaaacaattgcagcaaaaacaaaaattgacaagtgggacctaattaaagagctgctgcacagcaaaagaaactaccaatagagtaaacagaaaacctacagaatgtgagaaaatatttgcaaactatgcatccaacaaatgcctaatatccagaatctgtaaggaacttacaacaagcaaaaaacagaatacattaaaaaatgggcaaaggacatgtacagacacttcttaaaagaagacatacaagcggccaacgaacatgaaagaatgcttgtcatcactaatcatcagggaaatgcaaatcaaaaccacaatgctatatcatcttaaaccagttacaatggctattactctacagtcaaaaaacaacatatgctggcgagtctagagaaaaaggaacatttatacactgttggtgagaatgaaaattagttcagccactataaaaagcagtttggagacttttcagagaacttaaaacagaggtaccattcaactcagcagtcccactgagacgagaagtcttcttctgatggaaggtttttctcaatggaagcgttcgtgtctcacgggcttcaaggaatgaagctgtggaccacagcagcgagtgttacaacttgattagagaaacgggcggacccaaagagtgtgcggctgcaagatttgttaaagtgaaagcaaaagtaaagtgaaagcgaaagtaaagcttctgcgtggtggaaggggacccagaagggttgctgtttctggcttgggtgtcttatgcttatatcgccttatgacccctccccttttcctttttctgtcctatacaattagcttattttcaacccacttgtgggttgatgggcctgattggttaaaaacatcaggctgtagctagaccttaaactccctatatgattggttgaagtttcaatcccttagcttgcagctgtgactcattttggcttaggggaaagtcccctttgattggttgaagtttaaatcccttagcttgcagctgtgacttatttgggtttaggggatagtccccttagggaagtccctattgacccaggaagtccagccaacttagccacttagtccctcaccattactgggtatataacgaaaggaatttaggtcatcatactggaaaaaacacatgctattgtatgtacattgccacactactcacaatagcaaagacatatgtgatggttaatactgagtgtcaatttgactggattgaaggatacaaagtattgatcctgggtgtgtctgtgagggtgttcccaaaggagattaacatttgagttagtgggctgggaaaggcagacccacccttaatctgggtggcacaatctaatcagctgccaggtggctagaatataagcaggcagaaaaatggaaaagagagactggcctagtctcccagcctacatctttctcttgtgctggatgcttcctgccctggaacatccgactccaagttcttcagttttggaactcagactggctcttcttactcttcagcctgcagacagcctattgtggaaccttgtgattgtgtgagttaatacttaataaactcccctttatgtatatatgtgtgttccattagttctttccctctagagaaccctgatacagatgttggtaccagaagtggtcttctagaggaacagaatattaaggatgtagttctttcattggttttggaatttctggtgttggctgcttaatattagacgccaaaaatgctaagaactctacttctaatagcatggagaacactgataatccttggcatgaactgttcgagaaatatgcaaaataaatgcatttgacactcctgattcatcgctcctgagaggcaaggattttagtgactctacatgtaatacctttgaccatatgtggagaaccaaggaacataatgaagctggttggttgctcctaagttcagtggaaaaagtgatgaaagaaaataatgaactcagggattctatctcccggcctcagaagcagatactgagcctcaaatctgctaagactgccctgagtgagagtcttatcttcctgtagagaaagagctgaaattgtggaaaaacagacacaaacccttatcatgtaggctgacctgtaatgaaagatgcatgcacagcctcaccaggtgtccactgttaaagtgagcgctttgattagaaaagaatggggccctgcaacttggaatggggacgtgtgggaggaccctaatgaagctggggacactgagtttgtaaactctgatgaaacttttcggccagaggaaacagcttccccatccccagtagagacaatatcccctccctgacccacactgccatcagcctttccacctttgtctgaggagataaaccctgtgctgcctgaggcaacagtgatggcctcccttgaggcagtttccaggcaaggtaaagttgattatcttcaggagccacctccaacacccctgtttccttctagacctataactagactaaagtccaggcgagcctctagaggtgaggttgagagtgtgacccatgagatgttctacacccaaaaagaattgcttgagtttaaacagaaatctggagaacaggcatgggaatggatattaagggtgtgggataatggttgaaggaacatagagttggatcaggctga

SEQ ID NO: 1885606 - DNA, 4001 bp, Homo sapiens
ttttgcaatgtttatttcagagttctacgtggggaaaagaaagagagatcagactgttactgtgtctatgtagaaagaagtagacataagagactccattttgttctgtactaagagaaattcttctgccttgagatgctgttaatctgtaaccctagccccaaccctgtgtttgcagagacatgtgctgtgttgactcaaggtttaatggatttagggctgtgcagaatgtgctttgttaaacaagtgcttgaaggcagtatgcttggtaaaagtcatcgccattctctaatcttgagtacccagggacacgatacactgcggaaggctgcagggacctctgcccaggaaagccaggtattgtccaaggtttctccccatgtgatagcctgagatatggccttgtgggaagggaaagacctgaccgtcccccagccagacacccgtaaagggtctgtgctgaggaggattagtgaaagaggaaggcctctttgcagttgagataagaggaaggcatctgtctcctgcttatccctgggaatgaaatgtctcaatgtcaaacccgattatacgttctatttactgagataggaggaaaccgccttatggctggaggtgagatatgctggcggcaatactgctctttaatgcaccgagatgtttgtgtacatgcacatcaaggcacagcacctttccttaaacttatttatgacacagagacctttgctcacatgttttcctgctgaccctctccccactgttaccctattgtcctgccacatccccctctccgagatggtagagatagtgatcaattaatactgaggaaactcaagagaccagggctggcgcccgtcctccgtatgctgagtgccggtcccctgggcccactgttctttctccatactttatctctgtgtcttatttcttttctcagtctcttgtcccacctgacgaaaaacacccacaggtgtggaggggctggtccccttcagttctaaagcccacttggctcattccacatgtggcagtatttttttaccatgtgaacaccaaaatgaattcgtggcaaatgcacctcccgtttattgcaggcttgcatgaaggaaatgatttcctatgattctgcttactgcttaaaaaaattaatcaagttttctgcctgacaagtaagtaactgtgtttattttctgttcatgactaggcaaaagcacataacatccctatgtgtccagtgagttatgaaagttctttaaaagcagtgcattagccatggatcttcctgctatctctcccctgcagtttgctgagaatgttttccataatagaaccaggcttatcacaatttattcctgccttactgactactaggtcattgcctagagttctgaaccccgggttggaagctgttaaaatttaataaaaactactttagagaaaatggtcactctcccttcatcctctctcacctccctctggctccttgacccccatccctccctgaagatgctggtcgctaaggctcttttaatagacttccttattgtcccaggtttctgggaattcatcagtgatagctgccatgggtatgttgagaggatactatatgctgagaactccacatctgatattttacttaatttccccacaatattatgaagtagatgttattttccccattgtacaataagagatggaaagctagagaggctaaaagcagaacaagaatttgaacccaaatgcctgtgactgtaaccaccatacatatagcctacctgtttccatgttgttctagcaggatccttgttttcttccttcttacagtaaaatctgactgatcactgttgagtaacggatcttaattaggtcgagatgcggaaggagtttgctcctgtaatttcaggaggtctttgcatatacctattattgcaaatagatttcgctttattggaaaaaggctatcagtattccctggggactctatttttacagctgagactgctgctctctatcagtcactatgaagtagaaattctgattatgatatcacataagattcaaggccactagtgataaatgttcaagaggaggtgtgttcagctttgtgatacactattgtgataaaaatatggcacaggattttaaaaatatgaaaatgtaaaaggaatacaaatatgataaatgattataagtctatgtatggaatttaatctatttttcctaaatgctgactgtaagcggtttagcccagtgatataaactgtgcctgagaaaggtcccagtcaatttcatgctgttcatgtgccatttatttttactttttaagtacattgggaaaatacataagaaaaaatgtacattcatctttttaatgatactataaaagatggtgaacaagttaatcggaagaaaagaaaaacaattcatctagacattcttgcaatgaatttttgccaaatgcttaatttttactagatgctaggagaattgggaagccttaagtctgacacaggatccagagacaaaaattacaaagtagtgagtgctatggtaagagttaagtaagaaggttggataagatgtccactactagctcaatcttgaaagcgtccaggacacttgcctctgagacctaaacgactgagtgggcattgatcaagagtgggaggttgtttcagggtcagcacatgcaaaggacaggctccattttaggaaaatgaaagtagttcagtgttattgaagctgatggtgagggaggaagtggcagaagataaaggctggaaagaaacaagtcaataagaagccacaaaaaagttgtaagtagatgaatgacatgatccaatttgtgctttaggaagattacttttgtctcagtgtccaatataggtggagggaggcaaaatgagaagcagagagttatttgatggtggaaagagagagctgttcaaacaaacaggcaagattcagtggagacctgaactaggcaggtggcatcttgggttgcaagaaatggacaggtacaaaagatatttagaaggacaagaaggtattttagttggatgacgtacatttcaaaggaacaaggaagaagaatggtctgggaatagtattggtgagccaggagtcttcatttgagtgggctgcagggaaagttgtgtcctcagaagatgccacatttcagttatggtacaatgggagggaacattcactgtggcagtggaatcaccagagggccacaagtggatcagattgggaagtgggataatattccagcctgaattagattgtacaatcccagggagcaggaatgaggaaggaaagggagtagaatagagaaaaagggggagtaatatgaggatgcattataggtctaactgcttccaggtatgactgattgctcaatcccataggaccatcttctaagaagttgtaataatttaatcacagagaaaagtgaagaatttagccactggctgcagcctccaattggtcaaaggtttgtctcacagagcatgaacctccctgcacctccatataacacatatttgagtgcaacagggttcttatataagtatcatcagggtggccccagggaaggaggtgagaagttgcaataatgtcaggttgcgcttgcatgcaagtgatcagaatataccctaagagcaagttatctcagtggcagcttgaatgaaatcggtgagccaaagcatataaattagcacataaaaggtgcataatacagtccaccttctgcactattcagggccactttcccccatcattatatccaaattgcatactacaatataggcccccatttttgtgagaataagttgtccttatctattctacaagagaggaagcactcgtccaatctgtcacaaggtccccttcaagggaatggtccaccagagtctgattgaggataagtaagacaaacttctgttccatagctgaacctggatctgaagtcataagttatatttatctccaacctcttc

SEQ ID NO: 1885607 - DNA, 4001 bp, Homo sapiens
cagtttaattccactaaaaatctctgacactttgtatgtgtctccacttagagcaaaatcatcttgggcataatcaaaagtagatcagttttgtggaaagaatgagaaagtgtttactcagggagaagggaaagacttggagcagtattggcagctacgtagagaaacagggtctcctgtatcactctatcagtcagaatgtcttttgaaggtggcttctgctttcatgtttgtggttaatatcctggggctgccataaagatttggcttaaaatgtgaatgaggcacaatgtgaaacaactcaatatttgaagagaagcagacattgaaaagatggcttctttcgcgcgtgtgtgtgtgtgtgtgtgtgtgcgtgtgcatgtgtgtatgtaaaaccttttttggttttgttttaaaccagatcccagaggctctggggtatgtccgccaagctcttcagcttcaaggtgacgatgccaactccctgcacctccttgccctcctgctgtcagcacagaagcattaccatgacgctctgaacatcatcgacatggccctgagtgaatacccagaaaatttcatgtaagtgatcctgggctttggttttcccttactcagaagttattaaatttacttcttcccctgccttctttccaatctgtctaagtccctcatggacaccctggcagtcaataatataaaatcccctttactgttattttttcctgatattaaaaacaaacttagggctgggcgccgtggctcacatctataatcccagcactttgggaggccgaggtgggtggatcacctgaggtcaggagtttgagaccagcctggacaatatggtgaagccctgtttctactgaaaatataaaatgtagctgggtgtggtggcgggcgcctgtaatcccagctcctcgggaggctgagggaggagaattgcttgaacctgggaggcagaggttgcagtcagtggagattgtacccctgcactgcattccagcctgggcgacagagcgagattccgtctcaaaaaacaaacaaacaaacaaacaaacaaaaaacttaggctgttaggtcatcctaacataaggtcatccttatttttttaaaatactttatccactctttcccaatgtgtaccattggagcacatgagacaattttagatggactgtggatgaacatttttaatagttatacattcctttttttttttgagacggaatatcactctgttgcccagtctgtagtgcagtggcatggtctcggctcactgcaacctccacttcccgggttcaagcgattttcctgtctcagcttccctagtagctgggactacaggcgcctgccaccacacccagctaattttttgtatttttagtagagacggggtttcaccatgttggtcaggctggccttgaactcctgacctcacgatctgccctccttggtctcccaaagtgctgggattacaggcatgagccactgtgcccagcctagttacacattcttaaatgtacattagaatgtagtgatttgatgaaaattattgctcagggggctattaagaattttccaagtcaatttaaagaaaaatattaagtaaatattaagtaacttctgccagatatacttggatatggcagaagtgatgttgaactccagtgggtgaaatctgggaaacagggctttatagcttgtttgtcctgagttactgagggcttccactagctctcggtgattctcctattttaggcaattttgatcaagatagcttccctctctgtgtcttagttttattctctaggaaatggaagttcttaaacaatcaatattatacgtaacctaagaactatcactgtaaactgtcatatgctagaatcatctacctaccttcttatctttcctctgaatcactataatccattgcctgttggttaggctttgttgagaaggactttgtcttttgggctactgggttaccatttcatcctcagtggcagtagcttagtaaccagtacacaatggccagaaatagtaaacattcctgcacgctggaaggttctgattgtctacagagttgcagggtcagtaatggggcagggactgcttggggttggggagaagggaaagaatgtagaaggtggcccagggttgctctcttcactttcagaaggaagtgcagccacaaactttaagtgggtcagctctggctttatttcactgcctcatcacctcgctgtgtttttaatcagtgcttttcagcagctctccttggaaaattggttcacacatttccattacaaacatttctttgtcttcaagtgaaaagggcacttcttcccatcgagagaattcttgttataatccaggaaacctctgactagagatttcttttgtaggctcagctatttatgcagagtgaattaaagagctttgctgcagtgttttacttcttgcagatctcaaacttgctcttttgtacaccaactatatttctggattttaccccaagctgtttatcccatggaaccttaaaatggttaaagcactttaaaaaatattcgatcctttaaccatcggtaaagtacaacctgatgcaattgaattcagtgtctctcatcaatatttataaagcttcattccgtgtctcaccctccaacacacacacacacacacacacacacacgcacacacacacaagctctttcattaggcattggactccagggtatggttccttcttccatagcctagggtgtcatccaagaggaggcttattaaactaatagccataccacatggtaagcagtaaacagtggtggctaatatggtaatgcctccaagtgacagcagctgacagccttttcaagtagtggaagtaaggaacagcagtggagatatttgaggaatgcaaggctgttattttaatgttaagccgtaagctcaaaaaagcaaagcatatggcagcaggtctgagagcagtccgtgacttgtttgctttttaaatatttgtatttctttgcgatgggaaacttcttcccaagaatactttattaaaagttggggccagatgtaatcagtggatcccatggtttcttcccaacctggctaaaacatttcaacaccaaccgaaacaagattaagtgggcacttgttgcaactgccatgtagtattatctgtttgtttgtgacaagcttgtctgcagcagaactgtagactccctgaagcctgggagtggaggacatagctgatgggtagtcaggccttgatggaggtgaaaccttccctccgtgagggtcagctctgtccacctgttgggcagttagtagaggagacagctgaaggcccttggaggagcagctggtccctccagcgttacattcctgtcaccatgaaatgataaaacttgctgtttaagtactttgaataagcttaacagggtccaaaaagttctaagctgagaggtaccatctcagccactttgtcactccaagcagggctgagacaacagtagaatcaacaattgagaagatgtttctaaccgtagggatttgtgagaatcaggaattctttcttcagggaacccccaaaataggctcactactctggagaagcaggcatttttggaagtgttatagggttagtccagtatggaaggaaaggaacgaggaaggctttttttgtagtggttgagagtgcagtcttacaatgggacaagttgagtttaggactccagatccttcacttttaagttgtgtgaccttgagcaagtcactaaatctctctgagtctcatttcctcatctacaaaatgtgaataataaaatatccatctcagacagttgtggtcagaattgatttagctggtgcatttgaggcattgtacctggtaatcacgtaataattggtagaaactcatattactatgactattactaccaatactactgaagtatgttcaaatatggtattttagaatcctttagaattgt

SEQ ID NO: 1885608 - DNA, 4001 bp, Homo sapiens
aacccaggcgcaggtgggaggggagtggtagagggagcaggcccatccagcaggtgatggatctcacaataggtatttgccgcgtattggtgactgtcttcagaactgcgcctccgcctacactgcttgatgtacattagtgtgctggttaactttaacctgcaccctggggatgggtgcttgaagtaacataattaggaagcagctccacagggcagcgagcctcggatctggtcaatcatggctttgctaaatcggcaccggaggctgcggctaatctgcataggagatgttgccagtgccttttcattggtgaaatgagctgtacaaaaaaaaaaaaaatgtggttggctcccgagattgtgcagtaccctcctctcttggtgaaccaagctcaagaatccacccccggctccatctgggccagcggccgcccactgaatggaaggcactgagttcactggaaaactcaggacctgacttcaccggggatcctgccctctccaggtcctgccttcgctagcgatgctgccttcagtaaacagttgcacttgcctgggagtgacactggcctgtagggactggtcagatgcccccaaggatagcacgtggtccctgctgcgtgcctactctgtgccagaaaagttctccacatcacgtgtatattacttcattgaaaaatcactgctatctgggcgtggtgactcatgcctgcaatcccagcactttgggaggccaaggcaagaagattgcttaaggacaggagttcgagaccagcctagccaacatggcgaaaccccgttgccactaaaaatacaaacaattagccaggtgtggtagcacatgcctgtgatcccagctactcaggaggctgagtcatgagaatcacttgaactcgggaggtggaggttgcagtgagctgagatcataccactgcactccagcctgagtgacagagtgaaactctgtctaaaaataaataaataaaaaataaaagtcactgccacctccattttacaagaggtaccgagtggatatgttacttccccagggcctcacagggaggaagtggtggagctgggatttgaacccgggctgttgtttttgtaaaggatcgaataaatgctgtgaatgtactgatctatgataagctagctgcatgagatggagactcagacacagatgaagccaaagctgagatgcagaatttactgagaaatcgcattgtatctcacaagagcaaattgctaagcccaccacgtatccaggctgtgccgtccgattgaagagcctgtgctctgaactccatacagcctccttcctgcagctgaggagctggaggcctacgggaaaatgggctctagatggctgagtttcaacgggagcctaccagtgtccctccccagcctcgcacctgccgtggctccataaccaagaacccactctccctctggatccggccctccacccttccctcccagctcatatgcttggcccaggctacactgagctcctggaccacaccaggcagtttcacacacagcagctttgctcaccgggctcccttcacttcccttgaccattgcccaccaggaaaacatccacttatctttcttggcttcattaggcctcatcacctctaccaagagaacaacactggacaccagatgccctttgggacacaccagtgtgaggccaccctcaccctgctgtgtgaccttggacaagtgactcaacttctctcaacatcagtttccccatctacaaagtaggaaaatgttgtttacctcatggtttgttgtacaagttagaaaaaatgcacatcaagcctctgacatggcttctactaaaaacatggtacttatttttagaacgttttcctgccatctgccccagaagaattgaactctgtatacctgtatacacctcagactctctggacatacttgtgtctttttttgctagcacttctcacaagctggcatcttgtgtattttcctctgtttatgttctgtctccttcattgcgggacttattaaggtgcagctccttgggggcaggaatcttgtctgtcatgttcatcaccggattccagggctcagaatgctgcctggcacttgctaggtcctccattaaagttggctggtgaaatgaatgaacaaataaaggaataaaaaaaggaacaaatgaacccatacccacctcctgcattaatcttatccatcaatctgtccccagctcccagcccagtaactgacatgtgtgttcagcggggattatagaacaaatcttatcaattctgtgtttatgcatttataaaacacaatttaacgacgcactaaatcagatcagcatgaatgaagctttccagatgggcactgaaccaggattctctttcttcgtgtcttgctttctcaaaactggtccacattatcctccccagcagcataagaactgcccaaattgccagccttagaatcatgagctaattaatgagactgctttgagtcactgtgctttgcttgtaggtatgatcgccccacagccaagactaactgatgcaacagaggaagggctccccgaggaggggagggctgagctggatctgaataaccagaagaagactaagagaaagcagtaaattcccggtggaggaatttcgaaggtgtgtgtaggaaagtcatttggaaggagataggacagcactttttttttttttaacaccttattgaacatccagccagaaaatgtacaattggcaaactaccccctagagaataacacgcttgtacgaccagacccatatgagaaacaaagcatgaccggcaccccagaggcactccttacgctccttccatttcccacctccctcccaggctaaccactatcctgacttttctcatcacagattgtgttatttttgtagcgttttttcaactggactctgcattgtgcattattttgtatctggctgctttcaccccatgttagagttgtgagactcatccgtgttgttctctccttttcctcttgataaatcgtattccattatttacccatcctcctcctgatggatctttgggctgtgttggctatggagaataacactgccatgaatactcctgaacacatctttcaaggaatatatttgtacacttttttttttcttttttcaagacggagtcacgctctgtcacccaggctagagtacagtggcgtgatctcggctcactacaacctcaacctcccaggttcaaacgatcctcctgcctcagcctcctgcctcaggcctgggattacaggcctgcatcatgatgcccaactaatttttgtatttttaatagaagacaggttttcgccatgttggccaggctggtctcaaactcctgacctcaaatgatccacccacctcggcctcccaaagtgctggggttaacaggcataagccaccacgtccagctgatatttgtacacttctggtgagtgtagaccgccagtgaaattcttgggtcataaggtttgcacaaaaagcagctcttttgaggaactgaaaggaacaggtggcttgaaagaggagcggggagctaatgagatgaggggtcaaaatttctcaagccctgtgaacacggcaaggaggctgattttcaagagatgtgcagggggaggccagggagtgacatgctccaatgacattttaagatcaccctggagagtgaggttggagaccaccatgggggacaaggaaacaggtaggtggtggtggagggcatctaagggagagatgaccatggccgggaccaagatgctgtggagatggagaggagaggatcgtgctctagttagctagtaccgcatgacagagctgagcagcttaaaactatgcaatggattttctccaaggattttgggggttgactgagctctgccgggaaattcttgtatgggatctctcatgctgttgcagtcaggtgatacaggtgatagctggggctgtagctcca

SEQ ID NO: 1885609 - DNA, 4001 bp, Homo sapiens
gcctcggagatgctaagggtcacacatccaactgtgtaggctttatttggacccaggacagattctcacccatgggcatcctgttcacacttcaccaggctgggctaattctacccatcttctctctgccctgaaggacttatcacatagttacacctatgagaattttcagcaatctcagaattacttcctctggaagtatttgcaaaaatgggataatggtagaggcactaaaactgttcctacactataaagccagcaactctcctgcttataaaatgcagctggggtaggaatggtaagaataagataaagtgtaaggtctttcacctccaaggcacttggacattatatctttagactctttgttatattgactgcattactcccaaatgctttttagaggaggggggacatttagaaaagtgaatttcttatgatcaaatcaatatgttgtggtttatgacaattttatacatttatggctaagaacctatctgcaatcacttcctagacaaaagttaatcatcttagaatttaaaaaaacatagtttattttttacacaatttctgggattggatttcccaacatgcagcccaaacacctgctcagagcacaggtaaaacagaagtctcacctcaaagtcagcaatttttagaaaaacttgacatacaaaaaacacataagagctgttatgttggacattcttgctgtaatggctatatatatatatgtaattattattatacacatacacactcacgtttttcttttgagtcagggtctcgccctgtcattcaggctagagtgcagtggtgccatcactgctcactgcagcctcaacctcctaggttcgagtgatcttccccacctcaacctccaaagtagctggggccacaggcacatgccaacatgcctagctaattttttttatttcttatttttgtaaagatggggtcttgtcacgttgctcatgtgggtctcagactcctgggctcaagcgatcctcctgtctcagcctcccaaagtgctgaaaactacaggcgtgaaccactaaacctggcctgttatatattaattttaatttaaaatacccatgaaaaggggagtaggttattttcagtacttaaggtccgaatatcgtgggctgctgggctggggctcacgacccatccgcaaataacacagaggcagacacagagaaaatcagacattgaggctttcctcacctgcctctgtctccctccatctctgcaactctgcaatgccccaagcaggagtctgcttttttgtataatgggcaacccaatcttggcaggaaaccaaaagtcaatttccaggaaaggcagaaaagagggctataaaaactagaggacctctgtggccttgtggtcacctctcctctcttgcaaagacacagctgtcaccagaaccccacgtctccaccagcacaatgcctctcaagatgctgtaagcgcctagggaaagccagcctgctaaaggacgcacatgtgcgcacacacacaaacttcaggatggccatcaattcagttcctcctttaccaaacactgtgacatgcctttcccctcttctctctctctctctaaccagcctttctcccccacctctcccccttcacaacgcccagttttattagtattattattctcttaagtggcacatgtagtaccacttcctgctccatgaggccccgccgaaagcgacggaagcgcgccctcctcgccgtgacatctgtcttggcggcagcctcctcaggcggttctcttggcagcctccacgctgccaccaggcctgtcgggtggctgtacggctgacgggctgtcaccgccgcctcctcttgcgggctgccattttcttttgatttacctttgattcggaggcatttgcatgctttcatcacttggtggacaaagtcctcggcaagtctcccatggctgctttctgtgtaggcagccaggaaaggggcggatccctctgtgactttgctttgaggtgtaaatggaggcccggctggcctatgtcacggggagcccggaagcgggtgtagactgtcacttcccagctccccgggagacgctatgtagttgctcctcgctttggctagggagctgcttcgccagtgacaagtgtcccccgtgtcaattagtttattaatcacccagctagacaacttggtaatgtggtaatttcagggttaggctgcaccgagttcttccttttctggctgggcataagagctcgttaaaggacttcccctgctctccagaaaactctttctctgcctttgtgcatatcccagtgaagccattcaaaactgcaactcctcttccccggcgtgcggacaggagggaggacagggttaaattgctaatcgaggtttcgtgaggtctgccagagccgagtctccaacacttacatctgttcaacaattattacagcatttttgtcataaaaaattcaacaccctgagtgtcgtgctagcaaaacctgaaaatttatgcagtgaatagaatagctaatttctctgaggaaatgcaggaggaaaattacagattttacttaaattccaaacaccagagtgcacacatctgacgccctctttggattttttgtcaaccaccggaccgaagacgccttcccgtccaccaggaagcggggaagaccctggacacatgctctgaccttggaagaagccgtactgtgaaactccagactgatctatgcacccacccagagtgtctctaaaagacctctctcccaattaaatccatgcgtggtacagagtcagacttcgattccggagcgaggttagcgtgattggtttgcgtttttcccactcccttcttccaatttgccccccacgcctttaaaacagctccttggagaaaacagaggggatggagaagagccccgacagcatcgagagtcttaaatctccttaattcattctaatgctgtttgatgcttgcaacggcagcattggagtttgcctctctgctccataaaggtctggaatatggattttatgctaaaactaaagctgtctagttaggatgccagcagagtggaacaatatgctacaggcgatcctcaactattctccagggccggagcctgacttcccgactgggtgtttgttaccttaatcatcattgcagcgggatgaacaggaatttcttgcactgccaccacagtggcacaattaacgttatccgaattttcagagattctactgcagagagaggatacttgctcccctctgttagtgactgctccagggtccctgtttattttccctagaatgaggtggtcaaaggaaccagctgccctctgcccacttactctgtctcatgacagctcagcatggtaaatattttctctgtagggtctcacatctcctgaccatctcacctcagggctggggagcacagccacacgccaagagcagaatccatcactggcatttatgtcttaataaaagcgtgtgccattttcagataaagtaaacactgcagccatttcctcttgccagtagaggtttttctctctttccttctgagtcatacccttctagaaggtgcaatgtgccttcagaagaacccaaggaggctgtgattcagaggttccagaaacagacacagctctccaggccctgtgagtggcagtgacagaatgaggagtcctccaccccctgcagcccagctatgcctcaggcacagagcacccaccagaaggaggatcagctccacctggctcccaggcaaaccacgtccccaggcactggtgtcacggcccaggtgctgcctctggctctgtcccacatggaggcctcccagtgggtcacatcccagcacagtcctcctgcctgatatcacccccaatctgtcctggggctggagagctctgaggaggggacctatgagtgcagtgtttgccggccagggcagagcctaagtgaccccatgtgaatcctactgt

SEQ ID NO: 1885610 - DNA, 4001 bp, Homo sapiens
aagccattgaagagaaatctcagaatctcaggtaggttagttggactcaacagagccaagccttgtccatgaagcatcactaggcatgtgtaaaagtagggctttgtgcttgcttcggcggcacatatcctaaaattagaacaatacggagaaagttagcgtggcttctgcataaggaggcagcacagatctttgaagcattccatattttgtgcagtcactggaaggtcatttgactatttgctgactagctctaaggaaacagtgtgaatcaaagcgaaatgggtgccacccaaatattgaaattgtgatttgcgctgcaaaaatagtcatgtaagatggtctatgagatgacttagagctgaataacatgtttggtgcaaaatatattgttagtatgtatgtcgaaaatgacagaatgtcagcttgctacttcttcatggaaactaaaaaaaataaaagtagacttttggtctcccatgtcagccggaattgaacatcaatataaagcatcattgtaaccaacatctgcgggctcagagtttgagtctgtagagaaggctcattggtccaaaccaggtcttaacatccattggtttttctgcccttggtgtgattgatcaactccgtaatagtggacaatcacattatctactttaatgagatatttaggaatacatttagttacaaactatgacatagttgagatgccctgaaatataagccataaagagtaggacaactaagaggcaaaattaggacttaataacattttctgaaaactacaacatttgcatattagaacctatgaacaaaatacgcattgggttttatttgtgattccaagataattttagtcataaagtttaggaagagattattccattgctttactatttctctcagcatttaaaaaatgtgatctcattaaatttttatcggaacctagggaaataaggcagcaaagtcctcactttgttgaagaagacattgagcctaagagaagcaagttgtccaagaacaaatagctgttcattatggagctaggacttatgcagagttgggacactttctattatgtcaggttaatgcaacctaatttactgggtcacatgccctcgatttatgagtatttcaccctacatttttttcttctttaattagaagcttaaagagaagtttgcagaatgtactcataagtggataggataatactgttaagttctgatattctgatattgtttgaaatactgttaagaatttcacatttggtaagtattttttatatcagtattaaaatagtaatttggtttattacaattttatacatagaatttgccagttactttctgactacaaagaaaaacagatgctaaaagtctcttctgaaaacagcaatccaggtaagacttataacagtgaattactttaggttagttttccccaacctttttggcaccagggaccggttttgtggaagacaatctttccatgggctggggaaaggtggggatggtttcagaattattcaatcatgttacatttattgtgctattttatattattattacattgtaatatataatgaaataattatacaacttaccataatgtagaatcagtggaagctctgagcttatttttctgcaactagatggtcttatctgggggcaaagtgagacaatgatagatcatctggcattagattctcatacgaagcacacaacctagatccttcggataggcagttcacaacagggttcgtgctccaatgagtttctaatgttatcactgatctgagtggaggcagagttcaggctgtaatatgagccatggggtgtggctgtaagtacaggtgaagcttccttggcttgcctagtgctcacctcctcctgtgtggtgtggttcataatagtccgtggactggtatgagtctgtggcctgggagttgaggacccctgctctgggtggttctaccatagataaaaaactaaaagtaaggaatttttgatcacaaaagaacactgaagcacaggtcatgttacatatgcttgtcccaataaggtctcactattactgacttcattcctcctcatttgaagttggaaagagatatattgacttttttggaacaagatgtgttcttctacctgctggttaattgtcatgataacagtaattttgttagaacaagatgctctgctaccatttgccaaaagagtgtcataataaatatgcaaattgcccaactctaggctcagcagattatcataaaagtagaaaaatgtttcacactaacaaaaatgctagtatgctacctgattgtagacacctaatacattgtatagtccaaactgtatgaggacacctttaatttagccatctatttatcaaagagcttctgtaagttaggttttataagttgcaggagacaaaaatggaatagatgtagttttcatctttaaggtgctcataatagagctgtctccatttcattgctgtgctttttcaacagaatttacaaagaaaacatttctattttcacttgtccacttaacagataactatcaaatgtcttttagatactagccattttttctaatgctacagagcacaaacaattaaaagtagagacaggagcttgttattatcattgtcattttcattatttgactactttattcagtgcttactgtgtgctagatgcccactggaagcttataattatgatttattatatattgattatgtgccagacatatgtgatgaggaatgaaaattttggaaaaaagtaggtatgatttaaggtaagcatgcagagagagaagaatttttctaggtaaagaagcagaagaataatgtttggcagaaggaacatgcaacgaggttgtgtgtttgccagaaggaacatctaatgagattgtctgtttggcagaaagagcagcaagtgcaaaagacaagatgcttgagtgaactttgcagggattctgagcaattcacttttgctaataccaaaagtgtgagatacgagaggttgggaatgaggtgaatactcagctaaggcaagttcatgatagactttttaatactatagaaatgagtaggttttaccccatgggccatgggaagtttaccaggtagaatgctttggactgcaaatactagatgagcggtggctaaaacagtaggaaccagagttgttttgtttgttcattgatatcctaggatcccacttgtccctctttcagctgtgctgttggcagtgttttattcacgtaactgggagaaaacttagaagcatgcaagggcttcctgtaatatttcattggctaggtcagagtacctgctcattcccaaaccaggcactgggaaggaaaatacatgattagcttagaataaacatttctctttctgaggctgaggagggggattgggataataaatatcccaatagacttgtgtttcttctgcaagaaagaataaggaatggctattgatagggagccaacaatgtgtgctgcaggggctcattggagaaatttgagcaggggagtcacaagattaaatttgagtattaaggcttctggttatggtgtaaaatgggttagaaagctttttctgtaaaggactaggtgggaaatattttagactatgtggtctctgtcatgtcttcttaaccctgctgttgtctgctgttgtagtgtgaaagccaccagaattatatgtaagcaaacaggcatgactgagctcctataaaactttactcacaatgccataatgcagattggatttagtctgtagcctatagtttgctgggattgatggaaggttctttactatgtaaagaaaccaggagacaaaggaagcttttgcagtagtcagctatggtttccttgtcatacatccttggagtagcatcaatgtattacaaggttttcacctgtccatagtgaaataaataaagttaggaatctcaattactcgttttaatatgttggcct

SEQ ID NO: 1885611 - DNA, 4001 bp, Homo sapiens
attgtaacactgcacttcagcataggtaacagagcaagacgtcctcccttaaaaaaaaaaaaaaaaaaaaaacatgtaaaaggtatagttaattatcctggcctatcctgtaatgaagagcttcctcagatttttggtgccaggcttcccacacaaatctcaagctcgccctctcctattgtggcagttcagagctccataagctcttcgctgtaatgatgaatgtgtaagctgatcattaaagcagaagtagaaaaaccagatttccataagccctttgctataatgatgaatgtacaagttaaacattaaagcagaagcaagaaaaatggataaggaatcgggggaaactggtgcctgagtacgaaagccagaatacaaaaaaagcaagccctttaaagccccacctatactttctctacctcagatctagctgagtgataaaagcattcctgcacatacaacccatcccaggaccaacttaagattaagaaacttctgtctgcaagtactcactcactatggtgggatcagctgcaaagcgaactgtcccatgctcatgttgatggttttctagatactgccaacatgttagctctttctggtgccgatgaatttcaaacgcgaacagacacccttgatgtgggtttgctaagaaaatagaagaacaggaagaaaagttgccaggttcagacatcccagggaaaaagaagcgtaaacagcattagcaatcagtgactgatgataatgctgcaataatgggaatggttttatttctaaatcaaatcgtttattgctttgtttctaaaaaacaaaaaaaaaacttctacctgcagacccctagtttagattaattaggaaacattcccgcaggtagtcatagagcttgaattgtatataaaagctaaagaaaagcttgtaactttgagttggtctggtgtgctactccgacctccctgtaatcagttgcagaaataaactcccgtctttcccagtctgtctgtctgcatctcattaccggaccacaagaacaagcagcaggaccagtaacactgtaagaatcatccagtaacactgtaagaatactgcttctaccagaggccaggacttccctaggaaaataatctggagtagcaaggaaagctgcctccagagctctgagaactggctcaacaggtctcagggttgttatgtgggccacctgaataggggaatcagcagctgcctggcctcttgtactaacgccttcccttctgtctttcccagggtccctcagctaccctagagtatgtatgggaaatgccccagacatttccatcaagagtgattcccatcagaactgaatcttctacccccacctctctatatccaggtagaatcctcccattcactcagttcatttctgttttcccctaagccttgctgtttcagggctagagcagcttcctttgtcttaaaccttaaatgtctttttttccacagttcttaccaggaaacaggcacagttagaagttgtaacagtataaatgttgtaataccagacatctcaactcattcctctcaaaactgatcccaatcaaaagagaaagaaaaaaaacaaatcaacttaccactagacatttccatgcctggagctatttttctggggttacaggaaagggtagttccctcatgtgggtactagttcccacagagtagcaccagcaccacctctcagccccacctctttacctccaggtggccccaaatctctgaaagcgggtggttcaagtatcagcattgcaacctataagacttgggatgaggtggagagggtatggaaggcttagatcaaacgtcctgagtgagacaggaccagattgtccccagtacaaaatagctgggaagcagctaccatagactttcctattttggattagaccaaccccaagcacatgaactaagactatccgtagctcttggattagtcatgccattgaagaggaggagaagacgccactgggctgtgcctggcagggagtctggagtttctggtttccaagctcaggaaggcgtgaaccaggggaggggcctccatgcagggggagggctagaagctggggcaggatctgtcagctctgcaatgctgcagaagcagaagcaacacagaaagaagataccaacagcctcctgaaactcacgagagtggacactccagtgttgaccacctaagataccactcctgctccaaagattacagctcccttgtcattctgactcctgggcttaccctacaccccagagatggagcaactactaggaataaaacttggctgcctgtttgccctgttggctctcactctgggctgtggccttactcccatctgcttcaaatggttccagattgatgcagccagaggtatagccctaccccatctttgttccatagcctgagtctcacctcaaccctgtcctgataccttgctctgattctctcaccatccccaaccttgggatattgagtgctgcctgctgctctttactcacctttgtctgtctcctcagtgtcaagtgggttgtaacttctgctttttattaggtcatcaccggctagtcctcagactcctgggctgtatttctgctggtgttttcctgggagcagggttcatgcatatgactgctgaagccctggaggaaattgaatcacagattcagaagttcatggtgcaggtgagagcagagatttcaagccgcaggtctatgaggccaaaatgataaacaggacaaagggaagagagcgggaaagtgatggagccaaggacatgggtggaacgacaaggaaaatgacagctcttgtgtgggatggtgaaagcaagtcagattaggctttaaggaaaacagaattgctgaagggacagcacaggaagctgtgctgctccatcccacatctaatttctgctgctttcttcttagaacagatcagcaagtgagagaaattcttctggtgatgctgattcagctcatgtaagtacctcccaccatcccctatctggagagtgaggagaaccagagaggcctttcatatccagacccttttgagaggaatacatgaggagtaccaagaatcccttctgctccctagctcagacatcgtagaggaaaagaggagcaaatccaatccttttgagtttatagaatgccagggaaagcccttgttttactctttcattctttccctggatcctctgatatacctcacatcatttgcccatgtttttaactctattgagattctgtcccttagcccctctggcagtcttttgttgttgttgtttttcgtttgtttgttgagatgaaatctctctgtcgcccagactggagtacagtggcacaatctcggctcactgcaacctctgccttccgagttctagtgattttcctgcctcagcctcctgagtagctgggattacaggcacgtgccaccacacctggctagtttttgtatttttagtagagacggggtttcatcatgttggccaggctggtctcaatctcctgacctcaagtgatctgcccacttcagtctcccaaagtgctaggattacaggcatgagccactgtgtccggcccactctggcattcttgttgttgcatggccatgtctactcttggcttcatttcccctacccttttttgtgttctgttaccacattttctcattctcttcaatctcccaattccatgtccatccaatgtattgcctacccttcctttccatctcacagcccttctttttgtttctagatggagtatccctatggagagctcatcatctccctgggcttcttttttgtcttctttttggagtcgctggcattgcagtgctgtcctggggctgctggaggatcgacagtgcaggacgaagaatggggtggggctcatatcttcgaactccacagccatggacatttaccctcaccctcaaagggtcccctccgagcccttgtcctcttgctgtcact

SEQ ID NO: 1885612 - DNA, 4001 bp, Homo sapiens
ggagggatgtatcagccccggtgaggcttctcagactcattctggagcttctcaagggcgcgagatcaatttggccgagaagggccaagggccgagcctgcaccttccttctgccccaatgctaggtgaaacattcaatgtctgtttaaatctatagaaaagggtgaatttgagagttgaggatttatcaaacttccagcagttaagtccctgggaaacagcaccaaaagagagataataaaggaaccaaaagaagaaaccacacaggagcagatggaggcaccaactgcataaagaatggtgactgcacacaggcaagatgcgcacagcaggtgggaaacttctgtaacaagtatgtccacaggcagatcacctttacctgtgaggagcttgtgtgcacgagggcaacctcgcagcagcgacgcccaccacagaatgctgatggctcaatcccagcagaagtttatttagggcacagaaagctggaaacaagggcttgactggaggcagctctgcagcaggtggagatttggacagcgagggctgtcctggaggaagtcccaaggtcctcacttccctctgtaggccacccttggtgtggacaacagctgcagacaggagacacggagggggcacacagaggtcttagggtctggcctcaggtgatgtccatcacatctctttctgttggtgagagctagttacctgggcccccagggtgcaaggccgagctggcatggcatgcagaccaactagtaggatcttcttgccagctcaggggacaatgcacacatggagaagtgcagttggataccaggcatctgggaaaatgcacatgctcactctttttcaaagaaatgcaggttccaaaaccaaacaccattagaaaatagacaccagccaacacaatcaagattagaaggtctatggtgagaccactgatggagcgtgaagctggccaaactctggagagtggttgatgatacgtatcaagaatccaaaatccagcagggcgtggtggctcacgcctgtaatcccagccaggaattcgagaccagcctggccaacatggcgaaaccccgcctctactaaaaatacaaaaattagctgggcatggtggtgcacgcctgtagtcccagctactcaggaggctgaggcatgagaatcacttggccttgagtgattgcagtgagcagagatcgcaccactgcactacagcctgggtaacagagtgaagtgagtctctaaataaataaataaataaacctgaaatcctagaaatctgtttaatggctcaagatgttatctttccaaaactcgaatctgaccctgtcactccccggctcaaacatctccaatggctccccactgccatcctggccatgttccagcccaggcccctccctccagcctcatcttccatgctgaggtttgcacctccactgtggtggagcacagcgggcatttctccctggtgcacctttgcttctttgggcccctctgcctggaatgcccttcctgttcctgtccagacccactcgagacactcctgccctgagcacctcctgcctctccctcctcactccagacactcctgccctgagcacctcctgcctctccctcctctctgccgctccccccaccctcatgctctcaccctagctcctcctgttactgggtccctctgggagcaccgtcctgaccagtgcccaacctgggcctgggggacagaggggtcggcacatgtaggctgagctgagctttcgggagcgaggaggccaggcgctgggagtggtggccttgctgtaggctgaagacacagctcgcagctcagcctgccctccacctgaccccccgggcccagccttccctagtgggccacgaccttcccaccagggccctcggccctgctcctgctggcccctgcagacctcagctgagtccaagctcctggagggcagggagggtgagcatctcgtgtgtccccagcgcacagctgctgtgccagctcccggtagggatttgttacaggaataaatggggtgggggttggaggagatggaggcaggccctgacgccggctcctggcgcaccctccaggccctctccatcgcggcttcgcggctccggctctggccccgccccagccttccccgccctgccgggaacctggggcctctcggaccacgaaagccgcccacacctccgcggctccgccctcgcctctcgctcccccagcctagcctggaccctccgctctccggggctcagcagcgaccccgatcggccacacgcaagccgcccacatcgccgcggcagccacctaccccgggacgcccaaccaagccctcgggggaccaagcccggggacttcgtccccaactccaggccagtcaagccaccccacaggggccctgcctgtcccacccgcagcgtgctggggggtccatgcttgcggtgatcaggagggtggcacggccctggggttacagccggcggaggggcttcccaaaagaatcctcagcctctcccgcctgcggcggcgcagcccaggcggggctcggcccgcagaatcccctcgtggcctcgccaggtatgcgcgcggggcccggggcgcgggccgggggcgggcgctggagcggggccggtgccgggcccgccgcgacacgctcggggacgcgacgcacaaaggcgccttctgccgccccccgaccccgccccgcgctgcccccgtccagcgtggcggcccgccccggcaggcggtgaggggctgtcggggtcccctcctcctgggcccgccacccccctcgcgggcgacgtgccctgtccgggcggcgcgcaggcgcgggcttgtcccaccgcgcaggaatccgaggccgccgcgcgcgtttccggccccagccccgcccgcggtgcaggggagcgagtgcgcagccgcgtgtcgggactcggacccccgtggcccccgccatactctctttctccacccgcggagcttttgctcaggaatccactcttgcagccagggagcttccgggccccctcctccagggagcgttcctggctgctccggtgagcacttgcctcctcgcacccctgtctgggcaccttgaggacccagcctgaccactcccctctcctctgtctgcataggaaggcgccccattggaaagggaccccccccccaccagaccctggcaatcccatggccaggccagggttgggagtaaggacccaccaggaaggagggtgcccgccgcgtcaagtgggcagtagaacaaggctgggtcccagggatccccgcaagccaggtggctccgtggctcggccccgcagaggccagagtcctccgccctgcagccggcgctcacctttagcgccttctccctgggccatatgtggcagagggggtggggcaagttccaggcccacagggcaccacgggcctctgggaggggacgctaatgactgtaatttccacttagcagatcaggacggctggcagagtggagccatcctcctgcctctcaggagcccgggcgagatccttccttgggcccctcctttatctggactcctggccctgggcccctcccacgtgggattttgagattgctctcccctcccccaggctcagagggtggtcctgtttcctgtgggaccccttgtccccttgtccactggttggggtgctcagtggtgcttgaacaggggtcggggacgcatgaaggtgtactgagggggtagctgtcagccggctccagaggctgggggagcaggaaacaagcacatagggttgagggttctgagccgcgtgccaggctttagcctatgctggctcctttgtggtcagaagcccaggacattctgggatctgtcttgatgctgagcaggccagtgtcctgaacagcaccaggcgcccaggagtctctgggtggggcagttgtggctgccgaatggggggtgctagggcaggagggtgagcatgtgaggccaggctg

SEQ ID NO: 1885613 - DNA, 4001 bp, Homo sapiens
agctggcgcagcttcaacagtggccattgagggggaggaagccagaagtagaagaagagccaggtgctgggaggcctacctgcctgcggtgtggtggagcagtgccaggctgctgtggaccatacccaggttggtgtaggtatccaggggtgcagtgtgatggacagggtatgtcaggtagtggatagtgtgagggttccagggccatttgccagctttgaagcagcctcccatctaatagcatttattaaaattcagagaagaaggtctggccactggagattgaggcctggcagaagagccagccaaaacagtgggatgaaggtagcattatctgggtgatcaggtgtttcctaggtccctggctatgagacttaaggaagcaaaatctatttcagacctcacccattgatggagatctgattttatctacactgccaggcatgttcagggctggcttgggcactggtgggcagagcctggtgaaagcatgactgtggctagaggggaggatgtaggagttaggaaaaacgcgatttaatggactttccctaaacttttggtagcccttaggcatgtaagtacatcctaagctactctttcaaaatgatatctcatttctgaaatttcttccatcatagtgaaaagtccccaaatgttctggagtcaaaatatccaccagtcagcacacttcccagtgaatcccagccgctgccacgaagagggatagggaagaaacaatttttccatagctgtacttactgagccccaagtgtaaagcacaagaaaatcgcatcccatttgtcagacagcaacgacatggctggttgccttcatactgcaatcgcctctgtaatcttcctgtgagacgtagcatcctccagggagtgagttggaaccttagcctagtgcagagtttattaaaaccatgtctttttttaaatcacttaacttccagcaaatagcataaatcttgcacacactgaattacctctgattaaaggtatttaggattaatcaagggagatgtgttgttccctgaaagtaaaaatcagacttttttttaatcattcctttgagatattaggtcatgattattttaatcacaaaggaaaatctgaactttggatcattttcttattaagcatcagaaacactgtattaaaaactgataaatggctgagtgtggtggctcacgcctgtaatcccagaaccttggaaggccaaggtgggcggatcacctgaggggtttgagaccagcctggccaacacgttgaaatcctgtctctactaaaaacacaaaaattagccgggcatggtggcgggcgcctgtagtcccagctactcgggaggctgaggcaggagaattgcttgaacttggaaagtggaggttgcactgcgccgagatcgtgtcactgcactctagtctgggcaagagagagagactccatctcaaaaaacaaaccaaaaaaaaaaaaaaaaactgataaagaagcctcactacatccctcaaaagtgaagacaaaagctacaggataataaaccagaagcaacaggggcaaaacagtgggctgaaagccatcccaaaagcatttttattagacagtgtcaaagacacctgcggaggtggtgacctgacctaacaagctttgaccatgttaccacgctgtcttcatgcccgtggtaaagagctgcactgtctccactctgcaaagagctgcttctggccaattttgcttcctggttgtcctcatgtagacatgagtcccagctgagagcatttttccaaaaaataaagtcaacttttacctccttcatttgaaaaaaaaaaagcagattttgcagttgtgtcttgataaaatacggcaaagggttgaatccacattttcaaattatcccaacttacacaaagatattttctaaaaataaaagaacagttgtacatctatggtgtgacctccatgagagaatacttgccttgtgtttgcaggccttctttccaataattaatgctgtgaaaataagtaaaaaaataaactaacttatataacacaaaaataagacaatttatacttggagatcagctacagaatagaaactaaagcagatttattacttaggcacaaaataaactacgaacttgcatctgttttcttactgccttcattgtaaaagggttgaaataaacaaggtgttactgtttttggagaaattcttgtgtatcatcatcaaggaaatagaatttagaaaattttgttttgttttgttttgagactgagttttgctcttgtcgcccacgctagagtacagtggtacgatctcagctcaccgcaacctccccctaccaggttcaagcaattctcctgcctcagccttcctgagtagctgggattacaggcatgtgccaccacgccaggctaattttgtatttttagtagagatggggtttctccatgttggtcaggctggtctcgaactcctgacatcagatgatctgcccgcctcagcctcccaaagtgctggcattacaggcatgagccaccgcgtccggcctagaaaacttttaatgattttactctaaattttataattttactctaaattttataacttagagaaagtcttcattaatttaaactctattaattcacactttgctttatttcagaagtaactggagtggtgtttaatattactcaaaaaatcttttctttgtggataataatggaagtgtttaatgcaataatgtgaaaacaagattgtaagaatagtgcttaaaatgttaaaagaataatttgtttttgaacatctttaaagtctttaaacatagctctttacatataaattttgcacatgccaaacaaaaattgttttatctagcctttcaagcaggtccccagaagaagtgttttgtagcaaatccagctcacatactatgagttaccctcagaatttaaaagtaatacatgtatccccaattttgatgttttagactggtctttttccttagtttgatgattacggtttgacaacataaccagtcccagctagtgggttcctggaccctgaatgaaaggtagatttgtaaggcagctgagctttggctgattgagacttgtttgtttgaacatgttccgccctagtaatggatatggtccagtaactgaataaagataatgagcactgaacaacagatgtttatcaggcaaaacggagatcatcttttaacactctgttgctgaggctttggtataagtttatttaacaaattttaaccaaacacctgtttatgtaccagattctaggtatttataggcaaataaaaatagatatggcccctgtcatggagtgtactgtctagctggggagcagaactaaacacatacacaattagatataaaccgttgtccctctgtatctgttggggattgattctaggaacccccttggagaccaaaatccatggatactcaagtccctgtataaaatgatattgtagagctggccctttgtatctgagggttctgcatctgagaattcaaccaatgttggatcaaaaatatggtatttgtgggatgtagaacctgcagatactgaggaccatatctggaactaacgcaggactgactgcaagacttgagcatcctcagattttggtatccacaggggtcctgaaaccaatcccctgaagatatcaagggacaacggtatttgcatgtaacttatacaaaccctcccctatactttaaatcatctctagattatttataatacctaatacaatataataattataataattataatacctaatacaatataagtaaatagttattatactatatttttagaaaataattacaagaaaaaagtctgtacatattcagtacagacgtaaccatccattttttccaaatattttcaatctatggttggttgactttacggatacagaaggcagaatataattacaaattatgatacagaagtactctgaacaa

SEQ ID NO: 1885614 - DNA, 4001 bp, Homo sapiens
atggctcaaaaagctctgagatgtatcctatccacctgaagagcctattgcttgcctgtatccctcccttctagtgacactaatcttctgtacagaaatcctagtccagcaaacattgctctcatcttcgcccatacacaacctatgtaaagaatggctttcctactctttgctggcgaacttcagctcccggattaggcatgccacctcttccaggtagctctcagcaacgcacttttccatcagcctgggtgtgcccctctgtgttcccatggcgctttgctttcagcgcttctcccaaattatgtttacctgtttattagactctccacctctgaagaccaggccatttcatttggctttttactgccacgtagtaggtacctgttcaagcttgatggaaggacttccccagcctccccacacatattatgtaaagtgatcgctgtctttgcttcctcctggagaccatttattttatttttttgagacggagtctcgttctgtcgcccaggctggagtgcagtgtcgcaatctcgactgactgcaacctctgcctctcgagtagctgggactacaggcgcgcgccaccacgcccggctaatttttgtatttttagtagagacggggtttcaccatgttggccaggctggcctcgaacttctgacagcaagtgatccacctaccgcggcctttcaaagtgctgaaactacaggcatgagcctccacacccgtccaggagcccatttatatgggagcctgcttctaaagattattacctggtgccagggtattttccagacctgtcctcacattcctgttaaacaggaggaagtgaatcgcgctccttttcatctaccttctcggagggtttatgcctccaatattaacctcagcacagccaaagaaaatcattccattccattgagcggagtcagaaacatgactaggtcacgatcacaaccccgtgtgtgccagggtgaccgagactgggtgactttatggtgtttcaacgtgtgggttttgactgattatattatgggttttccagtcaaaaactcaaagcagtggataaagcacttgcgacctaaaataagcaatggaatgaacaggaaggcgaaaccagagtttaaagcggcaggacaaacaggaaaaaggaagagtgaggcaggaagggtttaaatgcaggctcctcggaggacaagtcgccgccacacccctgtctgccgtcccgccagccgccctcacgcggcgcgggaaaacggtcggcctcgccctgggctcaggttctctccgcccgccaggcagtggggtttttttttgttttttttgagacggagtctcgctcagtcgcccaggctggagtgtagtggcgtgatctcggctcactgcaacctccacctcccgggttcaagcgattctcctgcctcagcctcccgagtagctgagactacaggcacgcgccaccacgcccagctaatttttgtatctttagtagagacgggctttcaccatgttggccaggatggtctcgatgtcttaacgtcgtgatccggccgcctcggcctcccaagtgctgggattacaggcgttagccactgcgcccggccccagccaggcagttttaatcgagcgctcacaaccactgagacgcagtgaagcacccaccataaaatcccaggaggccgaccgccggttcagactttttcttttctttaatccccgtccaagggatccgccctcaccccccaccccagccaccccaattccctattccctccccttggacggcgccggggaaaacaagctgctcgagctttatttcttcggtgcaaccaactcagaatgaattcctccgcccctgcgtgctcagtgagtcggcaccctagcagtgaactgcatttaaaacctcaggaattgagcgaactctcccagtggctctcctcaccgggatccccttccacgcctcctccccgtgccgcgcctcagtccgcactgctcattggccgcgtgccctgccaatccgatgcacgtcggctagggcaaagaccgcgaaaaagcgcgtacacctggctctgggagcgcgcgcctaacgccagccagcagcaggaggcgcgcgaggcaccacggcctggcggccgagagtcagggaggaacctcatttacataacggccgcccctctgtctcctggcgggggccggagtcccgcccctcgtccaacttgaaatctgttgggtcacgggccagtcactccgacctaggcaagcctgtggtggagctggaagagtttgtgagggcggtcccgggagcggattgggtctgggagttcccagaggcggctataagaaccgggaactgggcgcggggagctgagttgctggtagtgcccgtggtgcttggttcgaggtggccgttagttgactccgcggagttcatctccctggttttcccgtcctaacgtcgctcgcctttcagtcaggatgtctgcccgtggcccggctatcggcatcgacctgggcaccacctattcgtgcgtcggggtcttccaacatggcaaggtggagatcatcgccaacgaccagggcaatcgcaccacccccagctacgtggccttcacggacaccgagcgcctcatcggcgacgccgccaagaaccaggtggccatgaaccccaccaacaccatcttcgacgccaagaggctgattggacggaaattcgaggatgccacagtgcagtcggatatgaaacactggccgttccgggtggtgagcgagggaggcaagcccaaagtgcaagtagagtacaagggggagaccaagaccttcttcccagaggagatatcctccatggtcctcacgaagatgaaggagatcgcggaagcctacctggggggcaaggtgcacagcgcggtcataacggtcccggcctatttcaacgactcgcagcgccaggccaccaaggacgcaggcaccatcacggggctcaatgtgctgcgcatcatcaacgagcccacggcggcggccatcgcctacggcctggacaagaagggctgcgcgggcggcgagaagaacgtgctcatctttgacctgggcggtggcactttcgacgtgtccatcctgaccatcgaggatggcatcttcgaggtgaagtccacggccggcgacacccacctgggcggtgaggacttcgacaaccgcatggtgagccacctggcggaggagttcaagcgcaagcacaagaaggacattgggcccaacaagcgcgccgtgaggcggctgcgcaccgcttgcgagcgcgccaagcgcaccctgagctcgtccacgcaggcgagcatcgagatcgactcgctctacgagggcgtggacttctatacgtccatcacgcgcgcccgcttcgaggagctcaatgccgacctctttcgcgggaccctggagccggtggagaaggcgctgcgcgacgccaagctggacaagggccagatccaggagatcgtgctggtgggcggctccactcgtatccccaagatccagaagctgctgcaggatttcttcaacggcaaggagctgaacaagagcatcaaccccgacgaggcggtggcctatggcgccgcggtgcaggcggccatcctcatcggcgacaaatcagagaatgtgcaggacctgctgctactcgacgtgaccccgttgtcgctgggcatcgagacagctggcggtgtcatgaccccactcatcaagaggaacaccacgatccccaccaagcagacgcagaccttcaccacctactcggacaaccagagcagcgtactggtgcaggtatacgagggcgaacgggccatgaccaaggacaataacctgctgggcaagttcgacctgaccgggattccccctgcgcctcgcggggtcccccaaatcgaggttaccttcgacattgacgccaatggcatccttaacgttaccgccgccgacaagagcaccggtaaggaaaacaaaatcaccatcac

SEQ ID NO: 1885615 - DNA, 4001 bp, Homo sapiens
taagtgcattcgtgtattaattcattcaagtctcagaacaacacggtgaggtaggtactattatttcatcatttccattttacagatgaagaaactgaagcgcagagaggtggagttccttggtctacagtggcacctcattgtagctaagctggtgtttgaactcagggagaatttgggctccttaccaggatccctcgccaaggacagaggtcagtgcaacgagtcgagggtttgccctttgaaatgggctaggaccggcaggtggcagactagggctgcttgagttcaaagaccgcttccaagaccaagcccggagccagctctgtgctaagcgttccatcacacaaccgcggacagcttcttcggcttcttcaaactctcctttccctcccccgcaccctagggtcttcgcccagaatccatcaggaaaaatagccccacataacaggttcaaatctaacctccccaagacaaaaccacgtccgcagggaaagaagcgagtaaagcgagttttctgtaactcccctttaacccaggagcgcaaccagcccgggaaatctacaaatctctctttagttcagcaaagggctgggagcctaagccaagggggagaaagttggggaatccctcttgaattccccagaacacttaggtggcgccgggctttggtgcacgcgcgcagggcatgcggacaggcaccggagaggctctattttgggcattacttcgggaaggcggatcttcttgcagggtccgctgatagcgggtggcaaatgaatatgaggggcagtgcaaagggtgggggttaaccgggcggtttccatggcgcccggggcgtgggggaggaatgcatcccgcaagctgtggcgaaacaactgctctgcccggaggaccgggctcgagaaggcaagagacactgggtcgggggtggagtggtggcgggggggttgggggcggaagaagccaggcaggacgggggcggggcggtcacgtgtgcccgactgggcgaggccccaagctggcccgggagaggactctgcgggcgaagtggctgcgcaaggagagaacttttcctgcacaaggaacgcctcgtggggagacccaaggcaggagcggtccggagccggctgcggcgtgtgcggccggccttgggacagcgatcgccgcgggtggcaacagagagccccaagcaaaagtgggagcaggagcttggaggtgagcacaggaagccccacttgaggcttttacgcagcctctagtctctgtttcttctggaataggcaagtgtcctttcaactctaagagaccagcagaggccactgtcccttaagactgccggagtcctcaccacttctccaggattccagaggagactgtggcgatggtgaatgaaggtcccaaccaggaagagagcgatgacacccctgtgccggagtccgcactccaagcggaccccagcgtctcggtccatcccagcgtctcggtccatcccagcgtctccatcaaccccagcgtctctgtccaccccagcagttcggcccaccccagtgccttagcccaacccagtggcttggctcaccccagtagctcgggccctgaggacctcagcgtgatcaaggtgagcaggcgccgttgggccgtggtcctggtgtttagctgctactccatgtgcaactcctttcagtggatccagtacggctccatcaataacatcttcatgcacttctacggtgtcagtgcctttgccattgactggctgtccatgtgctacatgctgacttacatccctctgctcctgccagtggcttggctgctggagaagttcggcctgcgcaccattgctctcactggctcggctctcaactgcctgggggcctgggtgaagctgggcagcctgaagccgcatctctttccggtcaccgtggtgggccagctcatctgctctgtggcccaggttttcatcctgggcatgccctcccgcatcgcttccgtctggttcggggctaatgaggtttcaacagcctgctccgtggctgtctttggcaatcaggtaggtagaacagtttgtgaatgttcccaggggcgtgtgttagattgcacctaactattgggtgtggtaggctataatttgctgattgtccaacagtgtttgtgactctgggtgacagtaactgggtgtgacaggcagtgattgtgatgctgtaagagaggcgggaaacaaaagcagggggacctgctctttcatccacagttgctcttgccccagccaaaagcatgcttctagaacatactataccttcgctgtgtcgttctcgaacctgtgtcagtccaccaacttagacctgtaatttcaggaatgctcttctgtctggcagcagcccctgggcatcagactattctggtgtcatcagaacttggcagtgctttcagttggaccaaccagctttcctagagtgcagtatctcctctactgcatagaattgcaaagccatgcctggtggtgtttggcactgcttttaccttgttttacacacagctgaagccaggacagtgggagcagtgctttgtgccaaactccttgcctgggatttagagccaagtccagcaggatggagtagaaatctcactctgagtttccatggcctagaaagggtagttcatgtcttaatctttttctctttctttcttattggaaggagaagctcaaattctttgcatctcaatgtggttatgatccagaaagctgggcaggttgtgaacctgaatgccgtctccaaatactcgaagcaaatatttatgggaatatttaaagcaaacgtcctttagccagaccactgcctcccagtctcgcatctttccaagcacgtacagtcctggctgtgtgtttaacaaaggattggtaatcctgtctcacacgtccatgtgaagagaccaccaaacaggctttgtgtgagcaacaaggctgtttatttcacctgggtgtaagcaggctgagtctgaaaaaggagtcagcaaagggtggtggattatcatcagttcttataggttttgggataggtggtggagttaggagcaatgtttttcagacagggtggatctcaaagtacattctcaagggtggggagaattacaaagagccttcttaagggtgggggaaattacaaagtacattgatcaattagggtggggcgaaacaaatcacaatggtggaatgaaatcagttaaggctattttcactttttttgtggatcttcagttgcttcaggcaatctggattgcctgaagcatgcaggtcacaggggataggatggcttagcttgggctcagaggcctgacattcctgtcttcttatattaataagaaaagcaaaacaaaatagtgaagtgttggagcagcgaaaaattttgggggtggtatggagagataatgggagatgtttctcaggactgcttcgagcgggattaggggcagcgtgggaacctacagtgggagagactcagctgaagaacggttttggggtaaggggtgatactgtggggttgttagaagaaacattggtcgtatagaatgattggtgatggcctggatgcggttttgtatgaattgagaaactaaacggaagacacaaggtctgaaaaagagaaggagaaaaacaggtattaaaggactaagaattgggaggacctaggacatctaattagagagtgtccaaaggggtccaaggggatttagcataattacttgtttgtttggtgagtttttgggctctattcttgacagagtcctcttttttaagtttgaagctgagcttggtgaggtgtgtttttaaaagaccgttagtccattctacctttcttgaagattgaggacggtaaggggtatgaaggttttactgaataccaagagcctgagaaactgcttgggtgattccactagtaaaggctggtccgttattggactgtatagaggtgggaaggccaaactgaggaattatgtct

SEQ ID NO: 1885616 - DNA, 4001 bp, Homo sapiens
cagctgacttctcccagaatgagtggttcaagagagcagggaggaggtcacaatgtctcttatgactatattagatccacagggctgctgtaacaaagtaccacaagcaagataacttaacagaaatttactctttcacagttctgggggccagaagtctgaaaccacattgtcagcagggtcagaacggtggcacatggaaggtgctcattggtgaaacaatgagtgggaaagaataaatcattccttgcctcttccaacttctgacggccgcagatgtttcttggcttgtggctgtatcattccaatctctgtctccatcttcacacggccttctcccttgtgtctgtctactctttgtctctctctccttatgagaacaccagtcattggatgtagggcccactctagtcaagaacaacccttgattacaactgcgaagactatttccagaaaaggtcacatttataggccctgggggttagggctgcaacatatcttctgggggacatcattaaacacacaacaatgacctagcctcagaagatgcatgccatcagctctgcaatagcaagtggctacaagggtcggccctgttcacggagggaggagacacaatgatgtgaataccaggagatggggacaatgaggggccattgtggaagcaggctaccacaatatcatcagatagcaaactgaacatgagacagactcccatatgtagtatttacaaaggaaataatggggaaccagttgcatagcactcagggccctcagcctaccaacaatatagagtgtggagaatggggagagtttggaaatagaaacttccagaaagggcaaagccatgctgtaagctaccccaccaaggagttaggggccctactgctttcaactcaagcctagtgatgggggcttccatgcagccacttggagctgtgggcccccatgggactgtgccaggagggactgcattaggatgagtgaaggggctgtgtgagttcttcccatgggccacatgtggatcagatggaccatggcaggagagagggccaaggtgggggtcattttaagtcctgtagggcctctgagaagggcaaagggatgtcagcagaaagaagttggaagaggatgctggatttctaggggttgaagatggagtcatagctgtacctgaaatggaggtgcagaacagggaacttcaggagaaaaccttagagatgggaactttttttttttttttttttaagacagggtctcactctgttgcccaagctggagtccagtggcccaaactcggctcacagcaacctctacctcctgggttcaagcaatcctcctgcctcagcctcccaagtagctgggactacaggcgtgcagcaccacccccagatactttttgtatttttggtagagatgaggtttagccatgttgctcgggctggtctagtactcctgggctccagtgatctgcccgcctccgccttccaaagtgctgggattataggcgtgagccaccaagcctggctgagatgggaacttctgaagaacacagggaaccctccagaaagagctttcaccatctgccacacccagagagctggcaatcatacagtcaagtaaaaactgccctattcccctgctccccatccgcttccctgcatcctcacccaccacctccacttagactctgaaagcaaccagcaagtggggagaggggtattcgggagagaatagacaaaagccaccatgcccagtccctggcagctggcagcccccaactaaggccttaactagggcaggaggaagaagatttctctttgaagaaaaatgcaagagtcatttaatatctttgggtggctgctttaaatctctaagtcgatactggatttcgtgacataaaatgtacatacctaagcatgaccagaagagcctcggggtcagctgagctttcagccaggggaaggggaaatgcttcccttgctttagctcaaatgcacagtgagagccaaagcaaattgagttacatgttggttccaccccacattcaagggattggtttcaccgaatccccgcctccacagggaattgggtcttatatttcttacccccaaccctccccgccatggcagagccacaaggaggttcctgaagaaaatcccttctcggcttttgtgcagaattgaagaatgtttactatgttttccttcctgtctctctggaaatgacgcaaagaataacaacaacaaaaaagaactccttgtcccgtgcaaaacacccgcccctcccccgcccctgacctcctaactcttcaccctgtgttggcctgacttcaccctgggatggggaaacttcctgggaggatatagctgacctgggaacaaaacttgtttttttgaaagctttgtgcaacgtcaactaagttgggggaggggtctgggcaaggaaagaagaaagcaaaggggggcagggtgggaacagttctgctaaaccaaacaattccccagggatgatggagctgtggtgacctgataagtcctttaaatgtcttattaattactgggggaaaaattggctacttctgagtctcccctctctcactgtccttgcacaagcttgggactagctctgtccttttttaagagtcagtcttgggccgggcatagtggctcactcctgtaatcccagcactttgggaggctaaggcaggaggatcccttgaggccaggagcttgagaccagcctgggcaacatagcgagacctcatccctacaaataatttttaaaaattagcttggagtgttggtgtgtgtctgtggtccctgctactcaggagactgaggcaggaggattacttaagcccaggcagtggaggcagcagtgagctgtgattgcactattgcactccagcctgggtgatagagcaagaacctatctcaaaaaaaaaaaaaaaaaaaaaagagtccagctttttaaagaagggtgccccttggtggaagacaacaggacaaggcaggagctggggctgcggagagtccggggtctgcagagcatggggctgccatcagagacccaccaggcaggttcctgctcctagcaaggacccggctgagcagagatgagggtgtggaggtgaacctggaaaacatgcagaggattctagacacattccacagtcagagcctctggaaagcccaccttctccatcacagaggctttggggaatagacatcctgtttctctgtattattacagcacaaagcatttatcatgctgacaatgacagtgacatttcaggacctaaacaagcttagttgttcacagcttacaggagagaaggctcctaacactctttatttatttatttatttgtttgtttatttattttgtttttgtttttttttgttttgagacagagtttcgctctgtcgcccaggcagacagagtgcagtggcaagatctcggctcactgcaagttccgcttccagggttcacgccattctcctgcccagcctcccgagtagctgggactacaggtgcctgccacggcgcctggctaattttttgtatttttagtagaggcggggtttcaccgtgttagccaggatagtctccatctcctgacatcttgatccacccacctcggcctcccagagtgctgggattacaggcgtgagccaccgcgcccggcctatttatttgttttttgagacagagccttgctctgtcatccaggctggagtgcaatggtgtgatctcggcttattgcaacttccacctcccaggttcaagcaattctcctgcctcagcctcccgagtagtcgggactacaggtgtgcactaccacagcaggctattttttttttttttttttagtagagacagagtttctccacgttggccaggctggtctcgaactcctgacctcagacaatctgcctgccacatgattaggtcctgagggctctcccctcatgaatgggattaagacttttataaaa

SEQ ID NO: 1885617 - DNA, 4001 bp, Homo sapiens
gaggttttattattaccttgaatgctgaatgaattaacagatgccagccagtatctatagcccccttttccatcttaattaaatagggtgggcagaaagcatcatccaccccttccacaagggagggaccctctcacatttccatcctgtttggttaggccatgtagttctgatgcttggccaccagagggcagtgggagccaggtaacaaacttccctttccccactcctccaaccccccaccatctctgcactgcctaaagggatattgccaggtctggaagtgaggaggggacctcagacactggcccagcagtgtttctttctttctctctctctctttttttttttaaaatagagatggggggggtctcgctttgttgcccaggctggtcttgaactcctggtctcaagcaatcctcccgcctcagcctcccaatgcgctgggattacaggcttgagccaccatgcctggccagcccagcagtttcttatcccatgtagcaaccactggtgcaggtggcagcctggtgcattggggagtatggggacctcctgctggcagggaactgcgaggagattgagccccttcaggtgagacctcattgggggtacactgaggagggacttgtcagggggacaggacttgcaccagggccactaactgtatccatgtctgaaggtggacgaagaggaagtgctggcattgctggaaaaggtgctgcagtcccacatgtccctgccagccactcgaggatatgccctcacagccctcatgaagctcagcactcgcctctgtggggacaacaagtaagaaggggtcccagccccttgagagatggcctgtcactgggtccacccatttttgagtttctttccaggcatacatgcccagccctccctaccccctagcccttaggttcttgtttttgagccaaatctgggtatttccctgctccgtgggcctttccttcttgccacatcctgcagtggcacactgccatagccacttacatactacactggcccagccgcatccgccaggtggtgtccatctacgggagctgcttggacgtggagctgcagcagcgggctgtggagtatgacacactcttccggaaatacgaccacatgaggtgtgtccagcactgtgctgcagcatgggacccaaacccctgccctctcccaaatgcccttttctaggtacaagggcctcatcctcacctgtgttcttccatatccacggtgagagcttcccacccactgttaattgaagctaagctggcttccaaccctccttgttcatctgaaaatcagcaacaacatgtcattttaggaaatcagaagggtacttctgagccaccatgtgcccagggctccatattcctagtcctcatcctagatgcctcttgtgaaaggcccagagaccacacagaggcacacttgcattccatcctctcagggctgccatcctggaaaaaatgcctcttgtggagcgagatggccctcaggctgatgaggaagcaaaggaaagcaaagaagcagcccagctttcagaagcagccccagtgcccacagagccccaggtgagaaggctagaaactctggggtaggaagacgggctgagcttcatacccagccctgccccttctgtcccttctgccaggcctcacagctcctggatctgctagatctcctggatggggcttctggggatgtccagcatcctccccatctggacccctccccaggaggtgccctggtacacctgcttgaccttccctgtgtacctccacccccaggtaagcctaagcaaagggaagatgtcttagagaaggtaggtggaaatgtactgctcctcctcctaagccaagggctgaggctcatggaccctgcttcttcctgtgtgtcccccatcccatcgccatctcaggaggtaaaagaatgaagtcaatcatggtcatctgtcttccctttgttccagacttctttccctggcctacagggccctgcttcctccccaacccttcttataccactttcccactacccactcactgcccccttctcagctcctcacaccctcccacccttggcatttcatgttcttttttacatggaatgttctttccccagcacatcaaatgaccagctcattctcactcttcaggcttcagctaaaatgtcagatgccttcccctaccactcctatttaagtcagttctccccagttattctggcatgacttacttccttcatagcatctattatggtctgtaattatcttgcctttttttttttttttttttttttttttttgagacagcgtcttgctctgtcacccaggctggagtgcagtggcgtgatctcggctcactgcaacctctgcctcccgggttcaagctgttcttgtgtctcagcctcccaagtccgggcctcaggtgatccacccacctcagcctcccaaagtgctgggattactggctcacgcccggcctttttttattgtttctctcccccattagacagtaagctccatcctcatctacatgtctactttgttactagcctttcgagtagtgcagggccagtaggtgtttactcaatttttgttgaatgaatgaacaaacatgttctctcaaacctgcacactgagctgcttctgtctccctactccagctcccatcccagatctcaaagtgtttgagcgtgagggagtacagctgaatctgtctttcattcgaccccctgaaaaccctgctttgctgttaatcaccatcactgccaccaacttctcagagggtgatgtcacccatttcatctgccaggctgctgtgcccaaggtttgtaaagatcagagttcagaggtggcctggggactccaggagaaaaggccactaagtggaggaggtgggtgggagacagtgtgagatgggattgagtcatctggagatcagcacttggggagttacaggaaaagggtgtggagccactgagtatagaggggctgcctgagccctacctactgccatactgtgctctgttaaactcctgtgttcagagtctccagctgcagctgcaggcccccagtgggaacacagttccagctcggggtggccttcctatcacccagctcttcagaatcctcaatcctaacaaggtgagcttcaggagttcccccaagacaagacccagggatagaagaagccgtgggtgctaaccctggtccctgctctcctattcctaggcccccctgcggctaaagctgcgcctcacctacgaccactttcaccagtcggtgcaggagatctttgaggtgaacaacttgcctgtggaatcgtggcagtaactgtctccactcacagcctgaaattctcctgtgtcccaaaccccagggggccccagcagcttcgaacctacacctgagggctaccagcaggtggcgctctggctttgcactgcaaaaactggggaccagcccccttctcccacaaataaagcccaataaagcctgagaagtgaggaaagccatatttgggtatatttgaagtggaaagtgtgtatgaataacagcaagggaagagcattcttacataggaggtatgcatcttcccctgagccttgagaacctgtctcaacacgggggcggggagggggcagctgttggttctttctaaccctctccaggtcagggaacaaatttgcccctaaacttccacaggaggcactctaccctctgggccagagctgggcacagtggcaaagtcagattagaatttctagagttctaacagcgattcccaaccatttcctcaacttttcttctgtttcccacatcccaaggcagggaaatccctgctgcctctcctcatcttctaactcagctgtaaggcggtttaggagccgctggcagaatcaatggcatcgaccaagggagggggggtggcaagggattttcctgtgcttaactactgatcacggctaagtggaaatcctataaa

SEQ ID NO: 1885618 - DNA, 4001 bp, Homo sapiens
ggattaactctaacttgtatttatctatttttcccacctgccttttccccaatgaaaagtaacactgactcaagagtttttctttttgtattatgatagattatccacccccaactttttttcttttcgtcctaaatgtatagtagtgataaaataggcacaatttgcaaaatacaatttgggggtgataattactttcacacgtgatacttttaaaaaataatcttaattattttaaataaaacattccaatccttaattattaaacttgcaaaattcaatgtaagcattagtttctcagaaaaatgcattttgtaaaatgaggtataatttcatgaccaaaaaaaatgacagatgggaggggagggtgtgaggatttttactattctaaccagctagtatgagaaaagcagttctccagaagtacaaatcaaatggtgggaagtattgaatgttttcaaaatgttatataattgcttaattgcctcactctcctaaatggttccctgtgtcccctcaggcaaataaagccttcattaccctaactgtagaagggatctaatcactctggagagaatatgcatataatttgaaatatataagcattaatgatataataatgtgctcagcaacaggtatatcactgattccatctatatttcccagataaaggaatatgtatctggagaaaggtgtatttttcactaaaaataatgagactgataacagtttaaaattatttttagttatctaagcatgcatttaaaacaggaagacaagttatgattctcgaattctcatagatatgatagtgtcttttatcaatcttttgcagaactaattactaagcatctaaaagtactcatactaatactaatatagtcacactatggtcaggattaatattttagtgttgtatgaagaatgagaaaagataatctttacagacctaaaatatgtttgagcatttttaagagccttggcagccagtgacgctttgcttttgaatattttaattattctttactacagtaagatatggtaatctggggaaaaaaatattgttttcctaggagaaagagaagcaaaaaaaaaaaagaagtggaatagaaatcaggaaaacttctcatctatgtcattgccaatatatagagttatcaagtaataattcataaaatcatagaactggaagaaatcttagtgttccattcagtccacactcatgcctcctggaagttaagtagaaaataagaaaaaaaggaaaaacaactatagactcttgaataaaaatcagcagctcggccaggcacagtgtctcatgtctgtaatcctagcactttgggaggccaaggtgggcagatcacctgaggtagggagtttgagagcagcctggccaacacagtaaaatctcgtctctactaaaaatacaaaaattagcccagcgtggtggtgggtgcctgtaatcccagctactcgggaggctgaggcaggagaatcactggaacccaggaggtggaggttgcagtgagccgagatcatgccactgcactccagcctgggtgacagagtgagactctgtctcatacaaaacaaaacaaaacaaaaaacaaaacaaaaaaacccagccgctcatcaacctctgatactatttaaaaatattcatgatagttttggcaaccaaagcaggtagagctccttttttgccacttcatcagacataaaattaacagtaataataataataataaattaattaaaataccagagaaacacaactcagcatactggggatcatctgacgggaacactttattttacagataagatgaccatcccctgtaaattgtggcacgtgttctccatggctacatagatagaaaaaacaagatgcaaatggagggacattacctggcaggccaacatccgttttaggacaccaaggtagtaatcaagcttgctctattattagctattaacacttaagtggtagcagaaactaacaggagtctgaaaattctagaacttttagtttatttgacaaagggaatcatgatctcggcctctagggcatctcagatgtggcacggaagtcatttattttgatgtctaccagcctctcttccagcactctgacctgctacagatgactgctaataactatacccaaataaaaaaacgtttggaagggaaagttcaaatgtacagatttggtacaaatatatattagcaggaaaattacatatgtatatatctggtggaaaattaatcaaaatattatttattacagatatatatatatatatatatatagctaatgtactatttgacataacctatggtcattattgaaattctttagatctgttctttgggtattctataagaaggttaagattcgtaatgttcgccaccatctcaatagattttttagatatttttctgattttacttttaatacaaaccactattaagacaagaaacaagccaacaaacaaatacatttcccatggtaactggaactcattctctataccacagatcaccaagaaagcaaagtgtattccatctgcatgacagtttaggctgtgaataccaagaatataatgttatgacctaagaaatctgaggtgagaatgttctttaaaacagtcttgacagatacacataatcaagatgtcatattgctgtggcataccatacccacatccatgtgaaacacaacctgtagaagaaaacaacaggaaaagacagagtcattccttggccgataccttatacattgcatcaccaccaaatgttaagtaaacaagaaagcagattttaaccaggggggtaaaagtcctttatctagagatctttatttaaagttttattacaaactgggaaaaacaaatgtaattatatttgctctcagagagggatcaggcttaatacatttatataaatgtagccttcctaagaaaatagatatttaagctttggttcctgggagttcctaaaactgaggatgaagggaaattgcctttggaatcagttacacacccagaatgagcttcaagatgaactaagggaataggaagaaaaaacaaatataacctatcactgaaactatattaagtttatataacattgtcatctaatgaaaaatgttatgaattgaaatttatttgatttattgactatacttaaaacatacaattattcaaaatatttcccatctgagctattagtattttgtagaaagaatgtttccaaatatttaaaaaacaatcacattcttaataagctcacaaattatactacaattattgcaaaaagttaatagataaatgtgggctggtaacttacttttacagaaataacaaaagtaagctcagatagtctccatattacagtaaagactcttccataattgaaacgcaaatgcttttacttacaaacacatgcagtgaatgttgattagggactttgggtgtatttaacctgtaatgagggctgatgcagttaagacttgccctagacaggacacaaaaagttcaacagcgcaattccatgactgaaacaaagatggagtttcatcattcaaggagaatgctcatagatttagccattattgatatgtacctagatgttaactctttcttaaagctaagtagtccatttctaacttgtcttctaatatgatctcatctcagaatctacatgactttaaatttaaaaattcttattgaaataacttcacttctctatatttattcaatttctctcactcctattctcaggtgaggtgataatcccatattcaccatcttcaaaacaatttatttttttttttttttgagacaaagtctcactctattgcctaggctggagtgaagtggcgtgatctcggctcactgcaacctccacctcccaggttcaagcgattctcctgcctcggcctccctagtagctggggttacaggcacccaccaccacgtccagctaatttttgtattttt

SEQ ID NO: 1885619 - DNA, 4001 bp, Homo sapiens
tttgtaggtttaataacatttacaagcctgtccaacccacagcccgcaggccacatgcagcccaggacagctttgaatgcggcacaacacaaattcataaactttcttaaaacattatgagattttttggcaatttttctttttttctttttttttttttaagctaatcagctatcattagtgttagtgtactttatgcgtggcctgagacaattcttattcttccagtatggcccagggaagccaaaagattggacatccctgatttaggcagtctccagaggaaaaattcctgactcacctaaatcacactgaagaatatatcaatacaatggtcttattaccttaaaattaacctgttaaattttctttccatgttctctaacctttcctagtcaaactggaaaatatccaataaaattagtgtagagaaaccatactcaattctataacgaataatctctcatcttctcacgaatttcctggaagtaatgagtgtggactgaagaagcagacatatagcacacagactgggtcccaagttacaagcacactgacgttatctagcttcaaaggcatactgcctttcagagtctaaaacagagcgatgtgcatcataagagatagcctatcagatccctaggccccaaatgtaccaaaggtcagttttctaaaggcaatgtctatttttaaacgaatataagttgggttctaaatctgacctccatttaaatgatcaactggggaggaatgtctggctggactcctaagcagtttaagttgcttgtggaatggtccaaacaaagttcattttatacacaacacacaaagattctcttagcagcaggcgtcttccacagaggcaagagcagcagctgtgaacaaggagccatcctgcagctgaggagcctggaatttacttcttcacataactgataaaagcaggccattctccactaagatggtttgggaaaaccaatttccgagtgctcagtataaaagaatgagcatattttatgaaaaacagagcatattttcagtggcgtgcagagtacatgaataccatccagaagaagatgccaacaaaaacctacagtattttcaagcttcctcacagtactcttctcttcacaaagtacaagttcacagcctacactgaccaagagtctcagtgacaaggaagaaagagttttcttttgaattttgtgttcagaaacaggaaaataaaggaaaaccatgaatttcctattacaacatctcttagagataattatggcatcaactgataattttggaaattttcatcattctcaattttgaagaagcctcaaagcactgggaacttttacagctttttaaaaattatttttcatgggtactacaacagtggtataaggttggcactagcatactgtactagttgggaaattatgtcctatccattttaatatccacatttgaaaaatcacttccaggacagagtgaaattctaaaacaaatacacctctgaaaacacatctataaacatagaactacataaattatatatatatattttaagccaaaataatagtaattcagtaaactccatttaataaactattaataatcagtaatgaaagtgaatatagcagatgtgcccatttgtacatgtcactaacaaggtctgccttctctcattagccagtagttctggccccctccaccacgcctaaagataaaccaacacagtgagtcagagggcagagcaaagccagacatctccttttctagatatctgaacaatcagactttaagattcaaaaagtatcgaccatgagaagtgaaagcatagcatctgcatcaaaagccttgatttgtcatggcacctacacactgaggatggggtgtatgtgtatgtatctgtctgtctcccccagttccctggaaaatcctaaaggtaaagactactcttgttctcttttgcagctctagaacccagcatatagcagatattcaagtgttaaatgacaacttgagcaaatgaatacagatctcctacaatgagtcttccaatgacaaataattatagctctcaattatgccctggtatctgcatgaggtccagctcattcaataaaacaaagcatggtgaaaaactgctgttcctcacctcattctttacctctgggatccacagatctcacttcctcatgtccccaagagctgagcagagtgaaagtggacactggagagctctaggtagtcttcctttctcctcttcctgctcacccatgcacactcattcattacatatttaatgggtacctaccatgccctatacaccatacacagatgccaggaatagctctaacacaccatagcaactgccctccaagaatttatcactgagaaaagcagagaagttactgcaatgcaatgtgaaaaaatgatggatatacagaatgcatgcttcctatgagaagtcaggcactgtttggagtatttacaggaactatctcattttctccatatcaccactgcttaacttcctctctatgatgcggtaggcagagaccagggaacattcagtaggaacacctaagccactaaaccagccaggagcacctgagccactaaaccagtcagaaggtgatggggaggggagggaaaacagcacgcatgtgaaaagaaggctgagcagaagacgtgaaacctgaaggatcaaaagaagtttccaggttgaagaggagtaagcagaacttttcatgcagagaacttaccaggcagaaaaatccagagggaagaaagaccaccgtgccatcagaagattatggcagaatttggtactgaatcagcgtagctacccaaagcagttcttaacatgctagggagagagctttcaagagttctatctaaagaagggcctctgtgagaaagaaagaccggataattttacataaatatttctaaaacatgcgcctttagaagaagcatgaaaaaatttattaatttgtagcacgtaatatcaatcctgttctatttttaaaccctgaataatatttatagatttaaaagattacttattggaaagtaataatggtgcattaagaattttacaaaagcatagaaatgacctgggaaataatttgtcgaaagctgaaatatttctttaaaatactcttaaataacacccttcactctaaattttggcaagatggttaggcagattcatgacttaaaaaataaaagttgtatttgatggcagaaagtcaactttttcaaactcagtttccactccgctccccttctttagcgatagaagtatcattttatttgggctggcaaagtgcccatttaaacaccacacttgagcctcccttgaagatagcagtggccaaggagtttcaagtagaagtcaatgagtagagattccagaaagtctcatttgcctgttttcctttcccctcctcttgcagacaactaggctggagctcctgtggatttggggacaaaggccttacacccaaaaggctgaaagccaggagcctgtgtcctttcctgatgacttgatagaaacaccaccccaagtggtttccccacagaaaatcgaaccctgtatagtcagatagctgttcctactagtcaaacagaaatttcattgcagatgctggagaatatttaaagtacacatggtaagatttggcaaaaaacagttgcaaatacatttagggtattaaaaatatttcatgattcactatctttttctgtctaaatcgcacatccgtatgattatgaaacatctttttaaatcaaaataaatgttttccaatgttttctttgggcaggaaagacacccagttcttgaaacatctgatctactctgggtgctgaattagggagagtgagtagggccaacagaaagatctctggagagagggtgtataggcaatgtagggggggaaatggaagttaaacatcaacaacaacaaatgtaagcaatttacaaaagcttccttgtg

SEQ ID NO: 1885620 - DNA, 4001 bp, Homo sapiens
tgtgcctgaggcagacctggaccgtggacatggggcaatgccttgagcggaaggggaagccactggtaattaatttatccttcctgtattgctgggttgggattgttttattctgcttcaataaaataatctttactgaattaaaccataaattctacatgtgtttccattttttgtcccttatctctaggtcctttgatgagaaacaggactgagattaagataaagggaatgagccactcacttgaggtgcaaaacttaagagggcaccagaagaccaaaaacctagtaacctagatgaatatatttgatttcagtgtttcctttttctttttttgagacggagttttgctcttgttatccaggctggggtgcaatggcacgatctcggctcactgcaacctctgcttcccgggttcaagtgattctccttcctcagcctcccaagtagctgggattacaggcatgtgccaccgcgcccggctgatttttgtatttttagtagagatgaggtttctccatgttggtcaggctggtctcaaactcctgacctcaggtgatctgcccacctcagcctctcaaagtgctgggataacaggcgtgagccactgtacctggccttgatttcagtattttaaaacaatcaaaattaatgcaaaaatcttggatgctcgccgggcgcggtggctcacgcctgtaatcccaccactttgggaggccgaggcgggtggatcacgaggccaggagatcgagaccatcctggctaacacggtgaaaccctgtctctactaaaaatacaaaaaattagccgggcgtggtggcgggcgcctatagtcccagctactccggaggctgaggcaagagaatggcgtgaacccaggaggcggagttgcagtgagccgagatcgcgccactgcactccagccggggcggcagagtgagactccgtctcaaaaaaaaaaaaaaagaaatcttggatgctcaaaatatctatcacaaaattttgaagatccaatctgacaaggctaggatcagggtaagatgagttatgtgagaaacgtagtgcagggccagatcctggtatttaaaattttaacatttgttcatcagggattattttgcattaaatttattttctggccaggcgtggtggctcatgcctgtaatcccagcactttgggaggctgaggcaggtggaacacttgaggtcaggagtttgagatcagcctggccaacatggtgaaacctcctctccactaaaaatacaaaagttagttgggtgtggtggtgcacgcctgtaatcccagctgcttgggaagctgacacaggaggagcgcttgaacctgggaggtggaggttgcagtgagccgagatcatgccattgcactccagcctgggcaacagagcaagactctgtctcaaaaataaataaataaatattttctaaaattgttgcattaaaatattatttatcttgattattgagttttgtggcactctcttaaattttggtcttagagtgagtgtctcattaacctcagcctaatcctagctctgcttctagctgtagaagcaacagaggtcacctcttagggtcttttttaaagatagcatatacaactcaggcagcatctgttcctgttcagcagctccctttgtgtcttgaaataaagaaaggagcctgactggtctgaaaccatttcccttaaagactttagagagacacagataaggatttcccagggagggattgagactttcagagctcagtgacctcctctttgtgtctccagaaggaacagagaggactttgagccggactactaactcttttctctttttagttcttacaattggacttactgcttagtttccccacattcagctatgggcatagtatccttacagctagaaggagaaggacgagaaagagagatttctaattctggggatttcatgaagtcctcttcttctctattcattagtttccttgtctgtaaagtgaggatcttgaattagataatctttcaagttctttccaagtctattagtctataattctatttcttaagtagtacagaaaatggctatattatagccattgttggaggggagaatttgtattgtgaggtagtaagaaataaggggcaattggcaaataaaggccagattatgttgtcactaattctgagctatggcatttcaatcctgtatgtgagagctagagactcatacagtgacctagagcaggcatgggtgggtcacaggctttggagagcactctctgtcctgatcttttcagttgagagacttcagctgttcattgctcatttggacttagttcaaggtcatgtcaaagaagaaggtgcacttacgctagttgttagctctgtcttttgtaaccatcaagttccatgcgattgatcagatttaggagggggcgttgggggataatcgtaagtgaaggacagtttgcaaccttgtgagtaggcaacgcttactcatctcatggcttcttccatcttaggtggccgtttttcagctgagtttcattttctagttctctgtggtaattctgttgtcattgttgtctccatagaattttgggtgtcaccaggtaaacagagccctcagcatctgaatagaaactgaacaggaacaggtaggtggtccctagcacatgatttgttgggccttggtagcatcattttttgggcaaaactttgaagtggatgaaatgcatcctttaggttcctacatctattttctgaattctgattcctttttctatccctctccctaggttttgttgtcttttctttccttttcagtgctttttctccccttcttcaccgaagctcctcctttctaattaaaaatatcttgcagataaaagtataactgagatgaaccaataggatgtatcctcagagtaatttcattcaatagggatcaacaccaaattcaaatgaattgtgacattttagacattcgtagtttgggtgtgtgtgtatctatatctatctatctgtatctaaatatgtatatacatatatattatacagatatataggatcagagtctcattctgttgcccaggatggagtgcagttgtgtgatcacagctcactgcagtctcagacttttgggctcaagaaatcctctcctctcagcctcccgagtggctgggactataggcatatgccaccacaactggctttttgttgttgttgttgttgtagagatggattctcactatgttgcctaggctggtcttgaacttctggcctcaagtgatcctcccgcattggcctcccaaagcaatgagaccacaggcatgagtgactgtgcccagccaggtatatttttttaaagggcacctcttagcagtttcaaataaaacctaggcagctgtgaatgctgcccacttgaaatatatgtctcagaaagactggaaatttctgccctgctcttcttcctgtttatctttctcctcctggtctttctgtttccctattgtcacctcactactgatgtcaatggtataggatatagaagtttaggaaacaaaataaattccctataaatccctcatcctttctgccttcaaaatgtatcaggtctttggtcaaggcatccttggacacacacctggacacatatacttaattcttaataatctatcaataatccatcaacccaattaaggcttatgtattcttggtgctaggtttttcctctagtttctcacacagacattttaaattcaaatataattttttaaaagttcatacataataacatcaaatgagtggtataagaagggaatgataagaagttcagagaagttggaaatggatttagtagacttaagcggtgatgaaacatgtaaaataaagaatgagatctgaactgggctttgaaggatttcaagaggcaggaaagaatagccattcaagaaagaagctaagtgggagagatggcatagggtatattaaaaa

SEQ ID NO: 1885621 - DNA, 4001 bp, Homo sapiens
ctgacacatgaacatgggcatccattgacttgtggggtggtggctgctcttggcatgattaaaaaaaaaatagccgggtgtggtggctcatgcctgtaatcccagaaactttgggaagctgaggagggcagatcgcctgaggtcaggagttcgagaccagcccggccaacatggcaaaaccctgtctctactaaaaatacaaaaaaagtagccaggcatgatagcacgtgcctgtaatcccagctactcgggaggctgaggcaagagaattgcttgaacccgggaggcggaggttgcagtgagctgagactgccccactgcactccagcctgggcgacagaggaagacaccgcctcaaaaaacaaaacaaaacaaaaataaataaatataatacatctgggctagaggtggcgaacatttaggatagattctgtatctcttgaccttgatgacagggacatgtcagggtctgctttgttcatccagcttaaaactgtcaccagaagccctggataaaaatgcagcctctgattcacacacggtcaggaaacatgccttgtgctcagtacagaaacatgtccgtcaacctgggaaaggaatcaccaccacgaaatatgcttttggcttgccaaagcttagcagctgtgagagccaaaaacccagctgcctggactgtctggggaagttggcgggagggagggggggttgctttctgaatcacctgatttctgcctctaactctagtttaattccaagtcgaaacctatcttgaaatgtctcaagagcctactgctcctaaaaattgtaggttttagctaacccttcagctctgtgcctgctggcaaggtgaagcagatggcgtttgttgattatttatttggaaggggctactttggaatcaggaaattccagcgagacagagtgcatcgccttggccagagctgccgtgacaatcacgagcagacacccagagacagtcaagttcaaagaaattgcagctaagccccaggaacttggggcattttcagtctttctcgtctcctggcctccatgttcaccatgcacttaggaagaaatgtttcgttcagttcaacattctgtggtcttcaagtgtttgaatacaagggcccacattcaaggtcccgctttgtcaaaagggcttcacgaagctaacaggcctctgacttgtgtttcatcctgaagcccctcattatacagacagatcaaaacagaaatcccccctgccttaatgcccagcacataaagtcctctttaattaacatacaccatttttcagtgaaacagcctcaaggtgttaaaagtgcataaaggtctgaaagctgaagcccaagataaacagtgtgccgaaatatatttagcagaaaatattgaaagccacaggaaaaataagttcccttcctgggatgttaacgaatgtttaggttcaggaaaccttcaggaagtagcgagccgagaaggaatactgctcaccgtttttacccccaatgtaaataaatcactaaacctctttggtttccataggcctgggctggagtggaatatttcattttttccccattaaacaggccacccggagtgttggcattacaggcctgaaaatataccaaatctgaatgtgctattttgtttctgtacattaaatcagactgtgtttcaaacggcagttcgtgctaaatggggggctgatgatccagactgtgcaccctcacacacctgaaattggcgcagcgtaaatgatagatctgtttcaccttggatctccccgtgtcttgtctcctacaggaacacaccctctgtcgttgttgcccaaggtgatgtcatgttcattctaaaggccgcggttccaaggggactacaccacaagaagatgccttcagaaagacccagatttcctgcggtctcaggtaggcggcagggagcaagagaacaaggaaaggacccgccaccactctccccaagatggatgctgcatgatgtaagtggctggctaaaatatctggcatccttgcagttttaagttgccagctaaatattattaaaaagataaaatacacgcaaactgtgcagaatgcagggctgctgtgtttacatccgggttttgatgactcaaagacttacacttgagcttgctgaaaagcctctattaaaaataccgctttgtgaaagcccccagggagcaggaagaaagctgggggtgtgaaagaggagagcgggaggatggtgacccacccaaggacggcgctgacacctgtgctccgggctggcacttaaggccaaggaagtgcttagaggttaacctcctctcaccctcggaaccagagcggggagggttaacctttttccagaacatttatttcaccatctcactgactagagggaggaggggcgggagggggagaacgagagcctgccgcgcagagaggctgcggatcacaaggccattctgatagcctcctgtccccatggcaactgcaacggcatttatcagttccttctgcgcacaggcacagcaaatctgcattgcacatggcaggcttccagcatttcaaatgaaagagcactttgaacggctgccaagtttggaaggagcagaactgtcagggctgcttaaagctggcagtttatactggggaggttttcgcttcccacaattctccgggcctggcgagccgccaagtacttagcggaagctaaaaagtaactcgctcccctccctcccctcccctccccctgctcacgctccccctccacactattcaccgcagtgctctcaaaattttccacatgtcctgtgtcaccagtgcagactgtacaatgaaaaccagaacgccggctgcccacgaccaggcttttattaataaataacggagggaggaggaggaggggttgggatcagacactgacagctggggcaccgggtctccgcgtacctgccaaaaccccataaccactgggtgtgaatgcgtgtggtgtgtgtgcctttcagccttaaaaatacattaataaaaataaaaataaagggagcctcagagctgtagacaccctgagtaccaggggaggaggggtgggtttcggttggatggtttggcgctttatttagggtgggaatggaggtcttgcaggcagcgttgttcagatccagcctttctaagatctgtagggaagagggttgttattgagagctaagcctgtttctggagctttccttgaatctctcagatgtcatggtgaaagctgtgaggccacagatggggagggagttcggagatgcttttcaatgcaaagtttaccagataacttctgaccgtcacgcacagcccagagcacaagggcttctatgggcagaaagtggaaattggcatagtattcactgtactttttttttttttttaatgaaaatctacactgagatcaagggcttgggctttattttccagcacaaatagaatgaaaattgtctgccgcttaggcggttggatagagttcaggaaaactatgtctggcattaattccaaagtggaggttttggttcaaacgaggcccattaatttcagtaaactgttttcactagtccagaccctgctgtgcaaggactatttattaccttttgctaacctgatgtctgcagagttgtaaagcaaagggggaaaaatccagggtgaagatatctatattttgcatcaaatgggttttgcacttcccttggggggccgtgttttatggggagttttctatccttggcttttatcagtgccaattttttaaaaaaaaactccatcttgcaatgaattagaaaaaaaaaaatcctgaaggagaggagcctggtgagagcaaatacccatctcctgcctctttcagaagggcacctcccagacacagggatgtttcgtgtccctgtcttcagctcccaggctgcaggtccactgcaaagccctgacatgattcaccctgacgatcgggtctaaaatacaccaagacag

SEQ ID NO: 1885622 - DNA, 4001 bp, Homo sapiens
gtttgtgctccgtggtactttatgctgttcttttcttctgtaggaattagggcttaacccatttttgactgaggcagttcaagttaaatgtgatatggagaaattacctctacagccatataaaaaacagcaggaaaaaatgccatttagaggaatctttatggaaaaatgagaagcaaactgctcctttatgaaagagaactttaaaaatcaattaaaatgaaaactaacgcaattaatttcctttaggacttaaaaaaatcagtgctaaagcttgaaataaatggattctgttaaaaccactggaaactagttattgattctgttattattatttatattcattgttgggataaatagagatatgtcattgattatcactgccatgaaaactgagatttgaatataccacaagagttctcatctcctgatttaaaagaacttttcatatctgtatcttttaaaatattaaaaataaatcttcaatatttttgttcatttataaagctacatcataggttttaagaatattaatacaaacaaaggatttcaatgaaaaatatgacgcatgaggaagtttattcggaaagatgacattgagtttctagccctttaatatacatagggttaaactataaaagcgctgagataaatctttgcatgtgctacaaggtataataattatgactggcttaaactatagactcatttgatgtgatcaagtgatgcccacgtcttataattgagggacattatttgccaaaaaccccttctcaacatgtgctccataatgcacctgaagtaccttcattatcataacatgactttatgtttagcattaccctcttttctggagtcttcttttaaaatgttgatatttcaacaattagataacctcccttcttgacaggatattcctgaccaatataggaagaaaataaattattttgttatgaaagacagaagacaacaatagcaaactgcatactctaccactgtatttagaatcagtctcaaatttagctggacttcacattcatggattcagctttacaggttatgtaatattttgagatataaattcacattggaagacttgtcatgaatagaccaagaatccttaattcaaagcatcatttagaaatgttaatttttgtcaatcaatactaaataatcttctggggtttccctcggtgatatcctaacactcagtggatgtcatttttattttatttttaatatcagtatcatctatattcctctttttttggttctattcaacaaacttttactgatcacctactataagccaggttatctctagatacttggattacaaatatagatatgttgtttcttccaccttgaagaatttcaattttctaagagggggcaatcaggggacacaaaattacatagacttcctaaatgaccatactttaagagtaagaggcacaaaacaaaccaaccaaccaaccaccaccaacaacaaaaaacaaaaacaaaaacaaacacccataatttataaagggtatagtatttggggagggggtgaaattgacactaaaactttctgtgtaaacggaaaaatgttgtttttaaaactgttttaaaatagtttctgtctctttagaggtcgatttatcttgggcaagcaataaatacttttgctctcagaaaaccgccaaaacttattttcttattagctgagtagaaaacaagtactcaccattgtggctatggaagacataagcaggccaaaggcatcattcacctaagtagagacgaggtgacagcgtgctgtcagtcctcacagccctcgctccctcttggcgcctcctcggccttggcgcccactctggccacgcttgaggagcccttcagcccgccgctgcactgtgggagccccttcctgggatggccgagaccggagccggctccctcagcctgcagggaggtgtggagggagaggcacgggcgggaaccggggctgcgtgctgcgcttgcgggccagctagagttccgggtgggcgtgggcttggcgggccgcgcactcggagcggccagccggccctgccggcccctggtagtgaggggcttagcatcctggccagcagctgtggagggtgcgccggttcccccagcaatgctggcccaccggcgctgcgctcgatttctcgctgggccttagctgctcccccgcggggcagggcttgggacctgtagcctgccatgcctgagtctccccgccccgacgacgccgtgggctcctgcgcggcctgagtctcccggacgaacgccgcctcctgctccaaggcgcctggtcccatcaaccgcccaagggctgaggagtgcgggcgcacggcgcggggctggtaagcacctccacctggggccccagtgggagatccaccaggtgaagccagctgggctcctgagtcaagtggggacttgagaatctttatgtctagttaagggattgtgaatacaccaattggcactctgtatctagctcaaggtttgtaaatgcaccaatcagcactttgtgtctagctgagggtttgtaaatacaccagtcagcactctgtatctagctaatctagtggggacgtggagaacttttgtgtctagctcagggattgtaaatgcaccaatcagcaccctgtcaaaacggaccaatcagctctctgtaaaacagaccaatcggctctctgtaaaatggaccaatcagcaggatgtggatgaggccagataagagaataaaagcaggctgcctgacctagcagtggcaaccgttggggtctccttctgcattgtgggagcgttgttctctcactctgcagtaaatcttgctgctgctcattctttgggtccacactgcctttatgagctggaacactcactgcgaaggtctgcagtttcactcctgaagccaccgagaccacaaacccaccgggagaaaggaacaactccagacgcgccgtcttaagagttgtaacacacactgggaaggtgtgcagcttcactcctgagccggggagaccacgaacccaccagaaggaagaaactccgaacacatccgaacttcagaaggaacaaactctggacacgccgtctttaagaactgtaacactcaccgcaagggtggtggcttcactcttgaagtcagaccaagaaccaaccaattccagacacagagatatgtttgccatacaaattattgttctgccgggtaaatgaagttgcatgtatctttcaatataaaataagtgcaaattttatatgcctgtttgggaaaaatagtacctttgtttgatttaaaacacttttcttctgtttttaaattttagacttttctaatggagttgtatatagctgtttttgagcagctgtttgtaaatgagaagctgtgatggaagaatcttaggaaagtgatgaaggctgttctttatttcaaccctaaagagactatgaaaaggaactagactgagcaaacactaaacttggattattgtgttgtgatgtgattgtgtcctttaggccaaaggcgaataccccaacagtatgattgggagttgggtttctcctgaagggaatggcatttcctacaatcgataaacctgggaagagttcaaagatgggacaggaaataaggaattgaaacacgcggcctggatttttaaacttcataggggacagactcttttgctattatgtctactcaaggtcgagtaaacacaggtgttcacatgatgatgatgccttggttgcgtgtaaaaagactcagaatttaagtaattcgagtaactaattactaggccatatcaggaaatgactgacttccaattgccaaatggcttgtggtgccatcatttgaacaatcccagattgagttccattaattgcaatgataacagacaaaccactgtgttatgcaattatgaatacaaggtcattgttgtgatgtctataaaatgccttaatgtgggggataatcttct

SEQ ID NO: 1885623 - DNA, 4001 bp, Homo sapiens
ctattaatgagacgatgaagagaaacagttttgcagcaaaatgctttgaaacggtgctggccttagctaccttgtccctgttacctctttcatcccctggtggggaatatactgctgaaagagaagggggatagaaaattcttaaagaaacattttgctaaattgtataggattgcatgaggtacttgggaatactatacaaagaagtggtttctcgcttcttaatgaacttaacattgtcactagataaagcaagtacaatgaatagtataaaatttcagaagaaacatttttgattctgacatgagtttggcatagctccacaactaactagctgtgtgactttgagaaagtcccttggcctctctgaaccccaggtccttcatttgtaaaatgggcccatttgattgttgtgaggttgaataaagttatataaaacacttattgcagtgctagggagtgtttaatatcagttaatcaaatgattagtaaagaagaactaacgaagaataagaattgctccaagatctggcagaagttctcttgacttctttggctgagacaccctttccttactgtcctattatgcaagagaaatagtgtctaggattcttctcttcttgccaatcagcagaaaccactttcatcctaggacacagcttgggtctcaggataggtttgttttctgtttctttattctgctccatttcactaagtttactttgctttttgttcaattttttttaaactctacataaaaagtattataccagaaaaatggactctttcacagtaaatttattacattataattttctataatactgtatttacatttaatatatactctttaaaaacttttagcttaattaagagttcattcccttcagggaaaacatttttatctcctccagctctgagaatagatatttttgtctgtcatataaaaatgtccaggacaaagaagaatgaaagtcatctaaaggacctggaggttacttaaagttgctaataaatggaggtttgctacattgatacagagaaacattttagagtgcagaatttatcaggatagtgggagaaaaggcaggtgtactctgaggcccaatgtcaaggcagtaaactatgcttaaagcctcagagcattttcaggatagaattgactgctgtcagttatcctcttatggtgttgtctcttggcaaatgtgatgcttccatatttgatgtacccaggagaggggcagacccttttgtttccagactgtttcctgggactgtctccactgctgatctctctaacgcctgacaggtcgtagtgcaatttgaggcagcaaaatagtctgagagttcatcagagaaaataagtaagagttcactcctaatgaagggcttctctatgtactccataccaccatctccagacactaaatacccatgggtttcaaagaagaataaactcacctcccagaggaagagttgatttatcttcaggcattcggcactttccacactccctcaggtatatgtcagccagacaaggctggtaattgctacgtgatatatgaacaaactgcaattgacatttttacaaaatttttaatgttcatctgtcatttactgctctccaaggataacaattatttgagcaactaattagaaataggtatgaaattattttatctcaacagatacattttgcatgcaattaaggaacaaagtttttttaaaaaaaaacagagaaaaagtcatacttatgatttgttaattcaaaattaattaggacatccaggagcacctgtggagcctcatttctctcagccctccccttaccttcatgctgcagtcacaaggaagtaaggcctcctctcctcacactctgcctgcctttgcgctcaaagctctcttttcctagagcctatttccccttctgcttcacctggttaattcttactcagacatcaaggctccctgtgaagctctctggcttaggcagccttcccaagtgccccatagtacccagcgctcagctttattattgcttgtaacacaggtcattctgaatgtctggttgcttatctacattttcctttagacaatgaccgtctcaatggaagagaatatttcttgctcctctttgcatcttcagctagggactcaatgcttgcttgcttgctgagtgaaaagtttttggtggaactagatgattgttgttcatactgttctgactgttttttttttttttgcttgttttgactgaaacaagaatagatgacagaattccacaacaagctaatatttggggatgcagaagtcttatgtacaaaatatctatttatatccccacatctcacccatttctgattgttcatttttttcttcttaaagtttgaatgaaacctatatgtgaagctttgaatagcactttacataaagcccagcaacccctctccacctataccatcatctatgactatttctttttttttaaaccaactttgtgatttttatcgatgggtgacaactttatactcctagatatcactaaactgtgtacaattagggatgcagcattagagaagagcagacagcagaattaaacagagcagactgaaggagagatcttcattatttgtccatttttcattatgtgtacacagaagcatgaatgcaatctgaaatctttttaatggcagtaaagttacaatcatccatctatgtagactaacattttaactccaaatatttgatctgcaatgtctatgtaagcagtttccctcagcacaattactaatttttttcctgttgggaaccagcaacttattttttatgtttatttttcttttgaagtaagaactagttcttctttgataactggctcatttttatcatttatcaaaaactaaagggtagggaagaaaaatgtgatggattaaaacatttcttttttaaggaagataaaattcattttcacaaatttacaagtgttgctggtgcaggatttattctactaagcaatgagactggggatcaaatccactttcttatctcaggaatcagcattatttcagaaatatgggtttttgtgtgttttttaaaatcaagcgacagtctgtttcaaccaaatgattttgatttcaaagttagagtcaacagaagctatgttgtgcacgaaccccaaggcatctccttttcattctagcccatttttgcaaagggagaaagagtttctctctaaagagccaataaagagaggcggaaagtgagtgtgaggtggtgtcctacaaagcggacactgggctcacacacagcgcacacagggtttacagcaggtccactcggcagtaatacaggagatgggctgtgcgttcagcagttggtttcaccacctggtactggttgatcaccttgactgtctggtcatcgatgcgcagccagccattcagaccgatctggaagacgtctctagtgtaatggccacccgtcgcactgttgccgtgatggtagaccactgcaaagagccgataggttctgtggcatttaaaattcttatttttaacccctggagaaagcagttctttactaatttccaagtccacaggatattcaatatttttgataagcttctggcaccaccagtcttctcataaacgaatcgtttcaggtgcagcacgaggacaggagggagtttttccagagtcactcttcgacttttctcaacttcttgttcggtttttgtggtataaccttggacagattctcttgccaccaagctctccagtgcatcctggactgtgcgtattttgtcagactggatatccaactgcaacgtgaaaaatggctgcaaagtggcagattcttttgcactctgttggtaaaccacagacctgatgtggccaccaaaaatgtggtgattggagtctgaacaaaatccgcctggctggtgatggaagtcttgttccgggggcccacttgttcccattcatcctcgcttccttcacctt

SEQ ID NO: 1885624 - DNA, 4001 bp, Homo sapiens
agtcaagagaaagaaataaaaggcacccaaataagaagacagaaaatcaaactatctctcttcacagaagatatgatataatagtatatctaaaaagcccttagtctctgctcaaagactactagatgcaaaacaattttagcaaagtctcaggatacaaaatcaatatataaaaatcagtagcatttctacatcccaaaaacatctaagctgagagtcaaatcaagaatgcaaacccattagcaattgccacaaaaagaaaaaaaaaactaaaaatacagctaaccagggaggtaaaagatcgctataatgagaattataaaacactgctgaaagaaatcaaatgatgcaaacaaattggaaaacattccatgctcatggatagaaagaatcaatattgttaaaatggccatactgcccaaagctacatacagattcagtgctgttcccatcaaactatcaagcacaggaattagagaccaacctgggtaacatggcaaaaccctatctctacaaaatttacagaaaatagccaggcatccttgggagcctgaggcaaaaggatcacttgagcccattagttcaagctgcagtgaaccatgttcatgccactccactccagcatgggtggcagagtgagaccctgtctcaacaacaacaacaacaacaatcaatcaatcaataacacttttcacagaaatagaaaaaaaaaatctaaaattcatttggaaccaaaaaggagcctgaacagccaaagcaatcctagataaaggcaacaaagttgagacatcacactacctgacttcacactatactacaaaggtacaatatgtgtgcaaaaacagacacataggccaataaaacaggttaaaaaacccagaaataaagctgcatacctacgaccatctggtcttcgacaaagctgacaaaaacaagtaatgaagaaaggactccttattcactaaaggctgctgtaataacaggctagccatatatagaagattaaaattgaactcttacatttcaccatatataaaaatccactctagatggattaaagacttaaatgtaaaacctataactgtaatgatcctagaaggtaatctggaaaatatttttctggacatcagcctatacaaagactccataaaaaagactccaaaagcaattgcaacaaaactaaaaattgactattaggacctaattaaaataaagaatttctgcacagcaaaataaactatcaacaaagtaaatgaacaatctaaagaataggagaaaacatttgcaaatgtttctttgttggcttatccatctgacaaagtcttaatatcaagaatctgtaaggaactcacgtaagtcaacaaacaaaacacaaacaaccccgttaaaatggcaaatggccaaggaactgaacagacccttcttggaagaagacatacaggagtccaacaagcatttgaaaaaatactctatcactaatcattagggaatgcaaatcaaaatcacaatgagaaacaatctcattccagtcagaatggctattaataaaaagtcaaaaaataacagaggttattttttggtggtttgcttgtgagtttacagagaaaagggaatgcttatacactgctggtgggattgcaagttagttcaggcattgtggaaagcagtctggagatttctcaaagaacttaaaatagaactaccattagacccagcaatcccattactgggtgtataaccaagggaatatgaatcttaccaccataaaaacaaatgcggaggagccaagatggccgaataggaacagctccagtctacagctcccaccgtgagcgacgcagaagacgggtgatttctgcatttccatctgaggtaccgggttcatctcactagggagtgccagacagtgggcgcaggtcagtgggtgcgcgcaccgtgtgcgagccgaagcagggcgaggcactgcctcactcagaaagcgcaaggggtcagggagttccctttccgagtcaaagaaaggggtgacggacggcacctggaaaatcgggtcactcccacccgaatactgcgcttttccggcgggcttaaaaaaacggcgcaccacgagattatatccggcacctggctcggagggtcctacgcccacggagtctcgctgattgctagcacagcagtctgagatcaaactgcaaggcggcagcgaggctgggggaggggcgcctgccattgcccaggcttgattaggtaaacaaagcagccaggaagctcggactgggtggagcccaccacagctcaaggaggcctgcctgcctctgtaggctccacctctgggggcagggcacagacaaacaaaaagacagcagtaacctctgcagacttaaatgtccctgtctgacagctttgaagagagcagtggttctcccagcacgcagctggagatctgagaacgggcagactacctcctcaagtgggtccctgacccctgacccccgagcagcctaactgggaggcaccccccagcaggggcacactgacacctcacacggcagggtattccaacagacctgcagctgagggtcctgtctgttagaaggaaaactaacaaacagaaaggacatccacaccaaaaacccatctgtacatcaccatcatcaaagaccaaaagtagataaaaccacaaagatggggaaaaaacagaacagaaaaactggaaactctaaaaaacagagcgcctctcctcctccaaaggaacgcagttcctcaccagcaacagaacaaagctggatggagaatgactttgacgagctgagagaagaaggcttcagacgatcaaattactctgagctatgggaggacattcaaaccaaaggcaaataagttgaaaactttgaaaaaaaattagaagaatgtataacaagaatagccaatatagagaagtgcttaaaggagctgatggagctgaaaaccaaggctcgagaactacgtgaagaatgcagaagcctcaggagccgatgcgatcaactggaagaaagggtatcagcgatggaagatgaaatgaatgaaatgaagggagaagggaagtttagagaaaaaagaataaaaagaaatgagcaaagcctccaagaaatatgggactatgtgaaaagaccaaatctacgtctgattggtgtacctgaaagtgatggggagaatggaaccaagttggaaaacgctctgtaggatattatccaggagaacttccccaatctagcaaggcaggccaacgttcagattcaggaaatacagagaacgccacaaagatactcctcgagaagagcaactccaagacacataattgtcagattcaccaaagttgaaatgaaggaaaaaatgttaaaggcagccagagagaaaggtcgggttaccctcaaagggaagcccatcagactaacagcggatctctcagcagaaacctacaagccagaagagagcgggggccaacattcaacattcttaaagaaaagaattttcaacccagaatttcatatccagccaaactaagcttcataagcgaaggagaaataaaatactttacagacaagcaaatgctgagagattttgtcacaccaggcctgccctaaaagagctcctgaaggaagtgctaaatatggaaaggaaaaaccggtaccagcccctgcaaaatcatgccaaaatgtaaagaccatcaagactaggaagaaactgcatcaactaacgagcaaaataaccagctaacatcataatgacaggatcaaattcacacataacaatattaactttaaatgtaaatggactaaatgctccaattaaaagacacaaactggcaaattggataaagagtcaagacccatcagtgtgctgtattcaggaaacccatctcacatgcagagacacacataggctcaaaataaaaggatggaggaagatctaccaagcaaatggaaaacaaaaaaaggcaggggttgcaatcctagtctctgata

SEQ ID NO: 1885625 - DNA, 4001 bp, Homo sapiens
acaggtgtgagtgagccactgtgccaggccccagggcatatctttacaagctgctttgaagtccatagccttaatacattattgaattatctggatctcagattttcagtcttttagggacaactatgctactgggtctccagccaaagccaccttgatgacaagaggaaaagagactaaatggaagaaatgacaatcaaatataagtctgtttgcagatcagcactatttaatggaaatgaaggccacatatataacttaaaattttctagtggtcacatttaaaaaaacaggtaaaattaattttaatagtatattttcttttttttttttttgagacaggatctcgttctgtcaacgcaggctggagtgcagtagtgagatgacgactcacggcagcctccacctcccactccagggatcctcctacctcagtctccggagtaactgggaccacaggcaggaactaccatgcccagctaatttttttttcttttttctttttttttttttttttttaactttttgtatagacgggggtttccctatattgcccaggctggtctctaactcctgcccaagcgatcctcccacctcagcctcctaaagtgctggatcacaggtgtgagacaccgtgcccggcttacattttctttactgcaatatatccaaaatatttcaacgtgcaatcaatataaaaagtgatcagtgaggtatttcacattcgtcgaactgacacccgtgcgtattttgcacttccagtgcctcctaaacgaactagcctcatttcaagtgctcagtggccctaagtggccaaggggctacactaatggacagggcaggtctaggtcctgtgtttttcccattcggagtcaccagtcctactagacattctgtgaaaaaagggaaagcctttgtgaaacttcctgaggactcacaaatgcacattattacatttagagtttagaactttggttaaggcagcgtcctgtatttgattctttccctcttcctctccgctaaccccctatgtgacaccgtagaacttataattcgttctaattcgcagatggagggcatatgagagaggaggctctgcctcaaacactttctcaaacttttgccgaggggtggcgagaaggtagacttccaggtcccacccgatatagattaagggctggaaacacagtcaaggggaaattatgaccaagacaacctttgctaaaatgccagcggtgactgccattgatgttcctataaaaggtcagctctgtcaggaagttccagtgcatcatttgttcaaaagtaaaatcagcccgtgttccagaattcgcggactgtcgtcagtcctaacctacacatttattcgttcaacaaatatttcagcgcctgggtcaggcatcaggaatacactggtggttaaaacagacggaaagctccatctggtgggacgcagtctgggagggaaagggagtcctggggacatgttttcgtcggctctaggctaagcacctctcgccgtagcacacggggtcggcaccgctgcccggcgaagtacttgttactttgcagtccagtacgaagcggcggagtaaccggttccaacccaaggcagcgactcatgcgagtcgttctaagcgccgcgctggggggtacatacggtgcacgcgtgggtgcctcaccccctggcagcgcctccagggacgctgctccgggaaagagcagccgccgcgacctcaggcggcgggaaaggtgggacctcacaatgcgccggaagcggtgcctcgtggcttgggatctctccgggttcttccttgcgccgtccacgccgcactgcccacgagggcgtccccgcccgagggacaactcaccgcccggggcctccctgagcgttcccttccaccatctgacacccactgctaagtgtgagaggacccagggggtaattgccgggccgcaggcggccttaggaactccgcttcccgtgaggcttcgcggcggacggcgctggtgcgcaggcgcacgcacggcgtgcgtggtggcgtcagcagttctagaacgttgctgtggtagcgctcgggcgccatgttaggacgaaggggaaggaggagaagcgcttaaagcggcgggagcggtgcgggagaggggttggacccagggctgaggcaggcccccccctccctcccgcctcagtggatcatgcccagggcggcagcggcggcggttgcgggggggaagtgactgggcggtgccggcgccggagacgatgccgttgtaagtaatttgtattctgttttctttcgctcgccggctgggccttggggggcgtccgggaaggggaagaggtaggcggagagggtggcacgcgagcccgaccctccccgctggtaggaggcaggcaggactggggaccttcctgtttcctcgctcgctcgccgccgcacttccccccgtgtgctgggttcccgcgtcccccgacccttcctggctgggtcagctgccgtcgggccgggggccttccccttccggaattgctggcggaacctctaactcgcccggccactccagcttctccgccccgtccacaaagaaaatcaaaacaacccgaaaacaaaacattgcctggtggtggggaaccacgaccctgctgcacgcgggatcagcacttggggttcgggctcgctctcggcgcccctcgggcccattcgatgttgcttttctgttcctggtctgtctcagtttgctcactctcttcctcccatttccagatgcctgtcttgtgcgccggagttagcccctttccactgaccttgtctgaatgtaggagcacgagttaaaagcccagctttgagcgttgagtccgcctgcctccacctccgcctccctagcattcacaggcggtcggagaagggggcacttcacagggtgccctcctccaaaacgacttatgtattgctttccctgttttgttttgatggggtaaccaggtttcattctgtttccttctttctctatctctggtgatactttttttttcctggttgtaaggcttgaagctagtctctttatgctttctaatgccactgcgcctttttcttttcttggtgggtttttaaaaagtttttttctcccctccccctttctgataatgagatataatttggcagctcattgccagtagattacggattttttttttcctgcaaatatacagcattgtagaggcctaaatagtgagactgcatttcttccatttttgaatattgaagcgtaagagtgcctctttgagaccagggaccgagttttcttcatcttagtagcctcaaaacgcaacatgtaattgacactcaaagttttggttaaattcaggataaagatttttgtggtttctagacatcgaatgtagtaactcaggtctattttttttttgtaagtaaggataatttctttagcacataatcaccgattgtagttttacaattatatatgtgtgtgaatgtgtttctttacaggtgagactctaactttggcacagaccttaatgacttctatcgcaatttatgtattttaaaaggattttccatggctcccacccacccccttaggttattaagaagtctatcacattacttctgtgatgaaaacgtttgttagacttaactaactatacaggtctaaaatcttggaatctgcatggtttctgtttattgatttttccctttcatagaataagagaccctaggagaactgagtctaagcaagattgttgtggtgtttctcagttcaataggagataaatgtttgcagtgatgtcgtgatgactgcgttattaagttaacattttgctgtctttgaaaagggacttctttttctgataatcataccagcattaaaaatgatagatgtaaaccttaaaaggcttcaatgaagaaataacattaagtaatttgtgtcttatttctaggaattaaaagtacttttatacctactttcccccaaca

SEQ ID NO: 1885626 - DNA, 4001 bp, Homo sapiens; identical to SEQ ID NO: 1241434

SEQ ID NO: 1885627 - DNA, 4001 bp, Homo sapiens
actgcccacatgaaaaagctccatctgaatgtgccacaggcatctcaaattcagtgtgttcaaaattgaactcattatattttccaaccagcctccttctcctaatgtatgccttctcttgaaaagtaacaccaccattcttctattggttgagctattatcctcaaccaatctttgactctatccccctattttcattcactcattaaatccttctgcatatacctcttaaaggtcttaccacattttttttcctcctcctcattccaattgcctctgccttggttcaggccctcatcacctccccttaacttgatgtcctccctgtagtctgtcttccctcaagttcatcctctacactactgtgacagcctcctgaaaggtaaatctgctcatgctttacccctttggaaggtattaatggtttccatgctctgactcctgcctacctcacatgctcatcagccacaacctccacagaggaccctaggttcaggccacaactatagttctctggaactgaatggatgtttctgtactttggcatgggctgtttcctctccctaaaatgtccttttcccttggctgtatggcatactccatacttccctaaagatttaaatcaaagatcttctctttgaagactttcattctctctggtagtattataagcattctctttcttgtgattctggttagggcttgcacatactctttgtatagcacttgtcacactgtaaaacaatgtttacgggcctttcttccctactaggttacatgttcattgaaggcagaaactgtgaacctatcacaggttcactgtctggcacatgctagttgttaaaaaaattgtttaatgggttaattgtcatgccacaggcatatggtataatttaaagacataatcgttctccatgaccagagtataatgatagagtaaaaaggaccatggtttctgtctgccgtgagagttggttaggatgtcattctgagaaaactttttttttctctgcccagtagaagtcctgtatgggtcaaattatttcctcctttgggtataaaaggatcagaatccatcagttaccactgatggtccaaataaaccccctacactctctagatgagcagtgtcaggtttggttagggagcacttggtttttccagcccagaatcttaattggtgcagtaaaatctgcatagttggctgtaggccaccctccctttccttctcttgaactttgttctggtaccctgactgcctcagtaaagccacctcactgtctttcatcattatcatcaccattgcaccattacggagttcccttgacctcaactttgcttcactggcgtcttccccttggtatggcttggaaggaaaaagaggggatcaaagactcccggtgatgtacgcccgaaggccaccaggtgacggattctgaccttatcacagagagagggtggattccggggcaatccgattcaagtccgagtccactccgatttcccaatccctgtcttgcagcagaaggtaggaaaccctctcccgccccaggcctggtgtgtacagactgcctgtggcggttgcctaggtaacctgatctccgcctccggcgacctccgggtggggaggaggagaaaaggggcggggagggggataaaagggtgggggggaagcggaggccgacccgggtttgcatcacgtggtggcgacctccaaccaatcagcggaagcaggggtccaaccggaagaccccacctggggctcctgggaaacggcgggagcttctcgctggcaggtttttctgtacctgcgcttatcttttcacttaccttcgccagttcgcggaacgtgactgaaagcaacgcgttatgggcaaggtggtggggacttattcgttacctcctccagtctcgctctctcccattcattatctttagctctcgggtcctggaagcgcggagcctctctggccttgagccccgagggcatggccctgtgatgtcacaaggtggcgtgacagccgggacgaaccccgacccccagcgcggcatccttcccgcggccagcgaccaccgcctcccgggaaggtggctgaccacagccgcaagccgctgcgcgcccggcaagccgaatggaaggacggcgcgggcaaacgaacgcccagtgaggtccagagaagagagggaccttccgagggtcttctagtcgatctcggacaggcttttgagtgccttttaagcattccaaaattttcaggagacaacagtaatttacaaaatagagtagaattaaaaggggggaaaggggagacttttcagagtgggcagagaggctgagaaatgaacttagtaaaaggcaaaccaaagcaaccgcaggtctcgtgtcgttctctggatctgcgcagtccagcagggtgagccgctacccacagactcgcagggcccatgatcgcttgaaatgtggcttgtccaaattgacatgtgctgtaaggtacgcattgtattttgaaggcttagtatgaaaaaaataaactctttcgttattaatcttcatattgattaaatgttgaaataatatttttgatacattgggttaaataaaaaatattgttaaaattattgtttctattttgaaaatgcggctgttagataaattttaaattgcatgtatgacttgaattatgtttcttttggactgtgctctcttttatgtggttcagtcggtttgtgtagaatagttgtgatgttaatgcaaaatattgtctgtagtgcttctttctgtcaccagatggccacctcattaaatagactatagttttgaactgctttcccaagaaaaagttcagattttaggaatattctcatttaacaattgtcaacaatttcagcatatttgcctttattcaattaactttatctgtaatatagaccgtttgtaaagatacataaacaaaaattaactggttttccctctacattcttatttcacagaaaattgtttctatctgtcattaatagataattcgaaataagctaattaaagttatttgtggcttaggggtttcaaactaatgccagaaaagtcagattcatagtttttacttttactattatcttctctgaaatgtagttgaacaaggtgacctgtctttggggaagttttcttcatagagtataaagatgaattagaacataatagttgagatttctacacttctagacatagaaatttgaacagaaaccagttcagcgaattatctacactaagtttcttaatttgaggggtccagctctgggatgaaagtataaacattatcaaagtatatttttaggaatctattgggattttcctgaccagtgaaagactaggagagagctaacagttttctttacatgatataaacaaataattttaagattgttattattctaggtaaagctcaaggatctggccagtcagcaactgagtctgagttcttgcatagctgtagacttaagaactattggtgacttgccaaaataaagcctttgtccacagggtaagtcttaagagaatcaccttctgttcacatattcgaaatgttgtttgaagcaaaagatgcttacagttaaaagccatagaagcaatgcaaaaagagtgatcatttttgttaatctccttttctcactttaaagtagctttattataaggttttatgtctgaacaaaaaacgctggaaattgaaactactgaagagtcaagcaaattaagtaatcatctaattgaaataagacttcactttattcacctctgatcatactagacaaaggccaagccatattaatttaaatctatttatttatgggtaaaggcatcttgaatctgaaaacaactggaaagagatattaccactaattatagcaaatttgctatatcatatcctgaattaaagaatcacttattttaacaaaatagaggtgactttgcagacccaaataagaaaatcttgaattacatagtt

SEQ ID NO: 1885628 - DNA, 4001 bp, Homo sapiens
ttatttctcttcccctcgctgattctgatttattctgtgtgtattcttttttccctcaaatctattcatgaaacatccatattactgtctcagactccaaagacatggaattagtgcttatctaaatccacagaaccatctactgagaacattaatatcaaaaccctaagaaattattgataacactctatggtctcatccatcacctttcagcaaagctgtctctgcaatgccacttttcttcagctattttttaattttctttataccttttcttcaaatacagagaatcagaccataataactttatgtgacactttgatgatgtaacgtttggctcctctacatttccaatttttgcattagaataccatgttgtgctagattctacgggtctatagcagtcacatgacttggttaaaggcgattaccgcatgtggcttcagcttcacacaattatacagatatggtttaaaacctacttgttcctaaataaatcttctgaccactttgccctgaaataatactaccagaccagaatgctgcatttctcatttccacttacatagtggcatctggatcccctatctgaaaactacagaacaattcaattctttgcatacagctcctcttactcacctagaatcactgaacttatcacctgagaatctagaataatgggatttgcaacccccccaccctccagaaccaggccccacctcaccttagtggttaacattagagtttactacaatattaaaagtaatagtacgatctctttttctctctgaccccaaaaaggaatagaactgaacggaaataaaaatgaaatggagagtaggagacgtaccgcagattgaaacctcggttgctcttcctggaataagagagaaaaaaaaaaatagaaaatatagaagttatttttacacttaacattcaataataagaaagaaaatgccggcggcagaggaagcggagggtggggagtcagcccgacaccccttcctccctccccaccccttgcccccacccttccaccctcggcgggatccggtagcagggtagaggggtcccgagcgccgcccctccttccgggatccgacctgggccagaggggtcccgagcactgtctcctccctgcagacccagctcgggcatctaggcacccccaacccctctccgcccttccccggcccccaggatccgcgggtcacgggaggagaggatcgcagtccgaaggggcaggtcctgaacgccgtccccttcccctggatccggacaatgggatcccgggcgccccccatccttgtcccccggatcctgagccggggaaggtgggagcgggaggccgcagcaccctcccgcaagggaggaggtgggggtcccagaagccgcgtgtcttcccccaacctccagtcccaggaggccgctccggccaggagccggaggggagcgaaccgggaacgcgacggaggcactcctggccccgaggggaaggggaaggaggcggcggcagcccggccccctcccgccgtcgccccgctaagagccccggccgctgtccccgcctgacaacccgcacgggaaggaagaagccccaggactcacgtcgctctccacctcgatgtcatcgttatcgctcatttcctacggcccagggagcggccactgcagcggcggcggggaggggaaggggtgaaggggagggggaagtcaccgacaacaacaagccgagtcccccccacacacacactcactcactcactcactcgctctctcactcacacacacacacaacacgggcaagaaccacctcctcactgcagcaccggatcaacggcggcacgcacgcccggtcggcccccgccacgtgaccaggctcgcagcgctggggcagccgagacttgtagttcttgtccctctaacagacggcccgggtagctccagaaaaactacaaatcccggaagaaaccgcatccaggcgacgccagcccggcttgttgacggagcccaaggcgcctgcgcgtcccggggaggggggggggggcgggggggggcggggagagccgcggcgcggcgcctcctgggagtcgtagtccgcagaccgcgagttgtcaggagattttcctcccgaggcggcagaggaggctgctgggaagacaggacacgtggagggagctggaactcctggagccgggcaccgtctgcgcgctggacgccgggcccaggggactgggtggagtctctgggggagtagccggctgtctaaataatgctgcctctctttggtgtgactggttatactttgtcttcttcatacggagtggttccgttttgcgcctaggggcgtaacccgcccgggagggaatctggctgcggcggaccagggggcgcggctcgggatgcctgcgcgaaccctcgggggctggtggggaggtgtcagtggcaggtgtttcgtggtgctaccggacaggcagaatgaccgacctcgccgggcgaccgctcccagccgcgagaatcctgtattcgtttatctgggagtgaccatcctcgctactcagctactcacgtgaggctccagcgttcacacaacgcgaaccctcaaccactatggacgtggaagtaaaagccccttcagagtttgttgtagcccagacagtttaggcaatatcccagctcagagtaccataattaagattgcaaaaaggatcaatatgggaaacttttgcagttccctgtccagttaaaatcatatttatatactgtggcatgaagtgtaatcacatgcattccaccgatatttattgaacacctaacttgccacaaggggatgccataacggataagaccaaaaccatccctgccttcatgcagctcacagctgtgcaagcaagcgtgccggtcctgccgccattgtaagagtgtgcaacaagtcccatgggaaggaagaaaaccataacagacactttccaccctgagacaaagtacccatactactcctttacatctggtctccaaagtgaatgacatcttgagcttttcccatgagttactgattcccggatgaataccatattatccctgacttttgaatgtggaaatttggggatatgtcacacacaattcttgtgacacacattcctcaacgtgagcatgtcatctatgctgaaaagacaaatgtaaatgtggtaatttttcctttacattttttcctttaatatctattgtatttctttctctctctctttttttttttttttttttttgagacggagtcttactttgtcgcccaggctagagtgcagtggcgcaatcttggctcactgcaacctccctctcccggattcaagcgattctcctgcctcagcctcccgagtagctggggcaggcgcccgccaccgcgcccagctaatctttgtatttttagtagagacagggtttcaccaacttggccaggctggtctcgaaactcctgacctcgtgatacacccgcctcggcctcccaaagtgctcacgtgctcacgcctatagcgtgagccaccgctcgcggtctaatatctgttgtatttcttattcagtgatccagtcctactaagtctgcacatctttgcaagtgaacttaccttttctacatgcttttgtctcatagtgttcctttcctgctgagttggggagacagatataagcagaccattatgtgataagagctgatgggctattggggagacagacggccacttttgagtgagttaattaactggatactagaagttaaagctaattgatgattacaacagacagttcttgggtgcctgctatgaacagagcactctagggcaaccccggctacaagttaaaatcatcctaggagcttaaaaaagttcccatccccaggccacaccccaaaccaattaagccagaacctctgaaggggagatccagactgaaggatttttttttccagactgaaggattttttaaagctcttccagtaattccag

SEQ ID NO: 1885629 - DNA, 4001 bp, Homo sapiens; identical to SEQ ID NO: 1241449

SEQ ID NO: 1885630 - DNA, 4001 bp, Homo sapiens
accccaggccaccgcgccaggtcgctacgccccctggacgcctctccagccaccaccagccagagcccacctgtggctgcggcgcagcgcctcccgcccgcaccaggcgcctcctgcgcccccagccaccgggccccagccccagaggaaggtgggccacccagcggacctgcgccaggcccctctggagcgccgctccgcctgctacagggaaaagcagaaatcccgactcccaccttcgtcaatccaattaaacacacgttcactaaagtcagaaagacccagtcctccaggcaccgctgtcacgcatgtgggtggtctcggaacgagagacagaacctgtgacatcgctggaaagtaacgcaaagggggccaccacgccgctccccgccttcgcccccaggcatcaacatcacgcctccaaagtcgtgcctccctccttcgccacaacaacaatttctagcccccgcacgatggcccctcactgaccttgtcacagcctctctctccatcctgctcaaatgagccacaccttcctaagacccccgaaaccaaaaaccactggaaatcaactaacgtgcctctgtgcgcctccacaacacccgaagccacggcgcaaaggccgaccccggcctctgcggccactccgcagtgaatccggggggtctcaaaactgttccctcttgggtaaacgaatccaggatcctccagtagatcccgcgcccgaccccctccatcaggagaacaaaggccacctcccctccccaccccgccccccaaaattccgcagtgccgccagcgccctctcgcggccagccaggaaaccttccagaaacctgccacgtagccacccgcctgcgcccccaccaggcccgccggcccagggtgggagggggcggcctgggggggcttgactctgacaaaggaaatggcaaaaggcgatttgaccaaaagtccaagactgcaacatgtcaggattttcgagcgaccaccacgcaacgctctgaagacccccgcggcaccccatccccagctcccagcgtccagaccccagcaacacacccccttttctgcatttctctcctccctcttcccagacccaaggacacggccttctctcctccccaacccaccccctgcatctattctcccagtgcccccaatcccacgaccccccttcggcaaggactgatcctagggggctactggcaggtttgcacttgggcgccatctctctccactgtgaaagtggctgatcagggcagaaccagatgatatcgggtagaaattttactccacattttgcctggggtccacactgcactaaacctgtgtatttggattcggaaaacctcgcgaagaggaacctccactcctcccgcccacgatccaccaaaaacctggccaacagctggcgaggcaaatatgcccgggagacccttctattcgggtgcttccccccctaattcatggggcacgcagaaggcatcgccgccatatctcccactattaacgcgattctagaggcggcttctaatacaggaaatccggggttcgccccccagtgactgccgtatacccgaatccaagaggagttccatctgattcctcccgctcctctgaactgaagtccctaccacccagcccacccttaaggactggaccctccagagaggagccctgacttccccccagggaaatgtgcctcaagattttctttctgacaaattttgttgcggacgctcggggaccaggcgaagtggccgcctccagcagcaggacccaggatcaggcaggctctcggcatgtccaggaggacagagcccatcccagaagcggatgccgtcttccttttgcacatcctttgcggcaaggatggccaaccactcaccgggtgagggatcctctcgtgggcgccccagctctcctgaggagccgccgccaaggccagcgagccaaggcgcgctccctctctgctctccgccgtctgcgctaggggctggctgggtggggtttatatggaggcgcagaaggggtggtctctgacgtcagcgcattctgctgcaatgcgctcatttctctaaaagtgattggccggaaaaatgagccccccagattctatgacaaattgctctagccgcacccagattgcagcaaagaagggaggaaaaaattctgccgcagtgcccctggccgccatgaccaacaccctgtggtcgcgggtgctttttccctgcgtgagcccggctcgccaggcagggtgaattcaggcacaatgtgtggggggaatcgccccgatggctggccgtcctcaggcggccgatggccaaggtggggctgtcggggcgcagatcccacacctggcggtttcggaacatccatcggaggatgcgggcttagcgaaagaaaatcatgctttctcttattgttcaggaaaataaaatgcccgggcgacataactggttcccagatgtaagccagaggctgtcaccccctcccagcccacccgtgcgtttctgactggttctctttgacatgggagacagagctccgcgtctccgagtcagaaaaccctggctgtggagtcccgggctctgccgcttacaactcatgttcgcggaacccgctatgccccttcctcttccactgggtccgcttcctccaccttaaccaggggtaccccccaccacacacaccagggttgtaataagaatccagacaggagccgtgccctctaaggaaagtacttttagagggcggactgtgtcccatgtggagatgcctgagctacccctcaaagttggggtgatccccacacacatgccctttgaaagagccccagcgccccgaaaaacaggcagcgacacatgttgcgccgagccctgccgcggcctcggctccggagctggcacatgggagttaatccctaacaggtgggagccctcggcagctctgcccggctctgagtggcagagcgtgcagggccgtcaatcaaatgtcctctcgcaaaggtcaaaatgctgttgaaagggaccgaggatctatcttagggtgacaggtgggtggcagccaggaggacaaggatggagtgctcggtgacagaaagcaggtgaggatgagcaaggggccccaaagaggacagcagagaggccccgccgagggcatcaagtcagaatcgctcccccgcacttctttggggggtttaagcggcgtcagagggagccccccatgcccaacgatcccacaaggtgactgtaaagcagacgggagattccagggctgaaaagaagggagaaaggctatttctacgtccacagctaatgactagggaggtgaacattgaccgtcaggtcactagaggcgccgagccttgggacggcgtgtggggggctcgttttttcataaacaggcgcactgttggggagatagagacgtgggacgttggggtcctcatggggcgctgctttaatatgtcaggtaacacgaaggagaaagaaaacaccccctttacagcctgtggagcttgccaggagccccagggactagagccccggaagcaggccttgcacagcagaaacgcccgcaccagccacagacgtcaagaacgcttcaaaaaatcatggctccgagcacccgcgtcaacaggagaacgtttattagccacagtattaatagctaggaaacagccagagctggccggggccaatcagcaaccaggagcccctgtcgtcaggcccccacggccaatcagacgccggcaggcccggttgctagcctctcgggggcagaggcgaggggcacgcattgacaaggggctcgcattcacccgccgcgcgtgggaactgtggtggccgccagagagcatccgcagccacgcacccgggggcccgggaggctgtcgtagacacagtgccagcccgcgtcagccctgcagccccacaagggcatgagttgacgttccggtgggagccccaggcctcaggtgggatgctcctggagcc

SEQ ID NO: 1885631 - DNA, 4001 bp, Homo sapiens
aggctaggaagggctccacagcccaccccaggccaccgcgccaggtcgctacgccccctggacgcctctccagccaccaccagccagagcccacctgtggctgcggcgcagcgcctcccgcccgcaccaggcgcctcctgcgcccccagccaccgggccccagccccagaggaaggtgggccacccagcggacctgcgccaggcccctctggagcgccgctccgcctgctacagggaaaagcagaaatcccgactcccaccttcgtcaatccaattaaacacacgttcactaaagtcagaaagacccagtcctccaggcaccgctgtcacgcatgtgggtggtctcggaacgagagacagaacctgtgacatcgctggaaagtaacgcaaagggggccaccacgccgctccccgccttcgcccccaggcatcaacatcacgcctccaaagtcgtgcctccctccttcgccacaacaacaatttctagcccccgcacgatggcccctcactgaccttgtcacagcctctctctccatcctgctcaaatgagccacaccttcctaagacccccgaaaccaaaaaccactggaaatcaactaacgtgcctctgtgcgcctccacaacacccgaagccacggcgcaaaggccgaccccggcctctgcggccactccgcagtgaatccggggggtctcaaaactgttccctcttgggtaaacgaatccaggatcctccagtagatcccgcgcccgaccccctccatcaggagaacaaaggccacctcccctccccaccccgccccccaaaattccgcagtgccgccagcgccctctcgcggccagccaggaaaccttccagaaacctgccacgtagccacccgcctgcgcccccaccaggcccgccggcccagggtgggagggggcggcctgggggggcttgactctgacaaaggaaatggcaaaaggcgatttgaccaaaagtccaagactgcaacatgtcaggattttcgagcgaccaccacgcaacgctctgaagacccccgcggcaccccatccccagctcccagcgtccagaccccagcaacacacccccttttctgcatttctctcctccctcttcccagacccaaggacacggccttctctcctccccaacccaccccctgcatctattctcccagtgcccccaatcccacgaccccccttcggcaaggactgatcctagggggctactggcaggtttgcacttgggcgccatctctctccactgtgaaagtggctgatcagggcagaaccagatgatatcgggtagaaattttactccacattttgcctggggtccacactgcactaaacctgtgtatttggattcggaaaacctcgcgaagaggaacctccactcctcccgcccacgatccaccaaaaacctggccaacagctggcgaggcaaatatgcccgggagacccttctattcgggtgcttccccccctaattcatggggcacgcagaaggcatcgccgccatatctcccactattaacgcgattctagaggcggcttctaatacaggaaatccggggttcgccccccagtgactgccgtatacccgaatccaagaggagttccatctgattcctcccgctcctctgaactgaagtccctaccacccagcccacccttaaggactggaccctccagagaggagccctgacttccccccagggaaatgtgcctcaagattttctttctgacaaattttgttgcggacgctcggggaccaggcgaagtggccgcctccagcagcaggacccaggatcaggcaggctctcggcatgtccaggaggacagagcccatcccagaagcggatgccgtcttccttttgcacatcctttgcggcaaggatggccaaccactcaccgggtgagggatcctctcgtgggcgccccagctctcctgaggagccgccgccaaggccagcgagccaaggcgcgctccctctctgctctccgccgtctgcgctaggggctggctgggtggggtttatatggaggcgcagaaggggtggtctctgacgtcagcgcattctgctgcaatgcgctcatttctctaaaagtgattggccggaaaaatgagccccccagattctatgacaaattgctctagccgcacccagattgcagcaaagaagggaggaaaaaattctgccgcagtgcccctggccgccatgaccaacaccctgtggtcgcgggtgctttttccctgcgtgagcccggctcgccaggcagggtgaattcaggcacaatgtgtggggggaatcgccccgatggctggccgtcctcaggcggccgatggccaaggtggggctgtcggggcgcagatcccacacctggcggtttcggaacatccatcggaggatgcgggcttagcgaaagaaaatcatgctttctcttattgttcaggaaaataaaatgcccgggcgacataactggttcccagatgtaagccagaggctgtcaccccctcccagcccacccgtgcgtttctgactggttctctttgacatgggagacagagctccgcgtctccgagtcagaaaaccctggctgtggagtcccgggctctgccgcttacaactcatgttcgcggaacccgctatgccccttcctcttccactgggtccgcttcctccaccttaaccaggggtaccccccaccacacacaccagggttgtaataagaatccagacaggagccgtgccctctaaggaaagtacttttagagggcggactgtgtcccatgtggagatgcctgagctacccctcaaagttggggtgatccccacacacatgccctttgaaagagccccagcgccccgaaaaacaggcagcgacacatgttgcgccgagccctgccgcggcctcggctccggagctggcacatgggagttaatccctaacaggtgggagccctcggcagctctgcccggctctgagtggcagagcgtgcagggccgtcaatcaaatgtcctctcgcaaaggtcaaaatgctgttgaaagggaccgaggatctatcttagggtgacaggtgggtggcagccaggaggacaaggatggagtgctcggtgacagaaagcaggtgaggatgagcaaggggccccaaagaggacagcagagaggccccgccgagggcatcaagtcagaatcgctcccccgcacttctttggggggtttaagcggcgtcagagggagccccccatgcccaacgatcccacaaggtgactgtaaagcagacgggagattccagggctgaaaagaagggagaaaggctatttctacgtccacagctaatgactagggaggtgaacattgaccgtcaggtcactagaggcgccgagccttgggacggcgtgtggggggctcgttttttcataaacaggcgcactgttggggagatagagacgtgggacgttggggtcctcatggggcgctgctttaatatgtcaggtaacacgaaggagaaagaaaacaccccctttacagcctgtggagcttgccaggagccccagggactagagccccggaagcaggccttgcacagcagaaacgcccgcaccagccacagacgtcaagaacgcttcaaaaaatcatggctccgagcacccgcgtcaacaggagaacgtttattagccacagtattaatagctaggaaacagccagagctggccggggccaatcagcaaccaggagcccctgtcgtcaggcccccacggccaatcagacgccggcaggcccggttgctagcctctcgggggcagaggcgaggggcacgcattgacaaggggctcgcattcacccgccgcgcgtgggaactgtggtggccgccagagagcatccgcagccacgcacccgggggcccgggaggctgtcgtagacacagtgccagcccgcgtcagccctgcagccccacaagggcatgagttgacgttccggtgggagccccaggc

SEQ ID NO: 1885632 - DNA, 4001 bp, Homo sapiens
aacacacaactgccatgtttcttcccgactctaacccagagggactgtggctaaacggcactggcatttctaactgtcagctgcaggagaacgggaagcaacctttgcccaccctagcccacccccacatccagaggaggcaccccgactcccgtcagaagcccctctgtccccagctcctgcttgcacactaagcttcagggccccctgcagccgtcacaggctcttggaatcctcaaacaggcacagggttacttgtgtgacaaggatgtgacaagcatactcccatctacgtagaaaggcactgaggctcccagacaccaagaagacaaaactaagcccactttacacccagtcgggtggcaccctcgtcctgctcagtctccatccgcacagatcactaattggttaattggttaaatgtcttccctctcaccaagctaatgcagacagaggccttcgagaacttctttaccctctgccaggcagagacctattttcaaccatgactttgtgcggaagaaatctgagacaggttaagcagccctcggcctgcatgcctcgctcttaatcgcctttcctgcacgtgaagccccactatttattacacagcattttagtttggactgagtttgattcctgtgaaaaccttgaggtgattgctatagttttgcaatttttctttcttttttttttttttgagacggagtcttgctgtcacccaggctggagtgcaatggtgcaatctcggctaactgcaacttctgccttccaggttcgagcaattctcatgcctcagtctcctgagtagctggaactacaggcatgcaccaccacgcccagctaattttgtgtatttttgtagagacggggtttcaccatgttggccaggctggtctcaaactcctggcctcaggtgatccaccggcctcggcctccgaaagtgctgggattataagcgtgagccaccacacccagcaaatatgaaatatttttatggtaaataaaaatgcagtgcccagactgaggttacctgcatccaacctgcaggctggggtagccccacttggagacactccactcctctcaaagtccgcataaacccagccagtaccaatgaaagatatgccattgcctcaagaaaatgccctctgcaacctcacgtcgtccttcccctccaccccgaccctgctccccacaccttccctttggattccaaaaaatgagaagagcttgcaaaagggccattcggcggcagatccacctaaaataagtgccttttctacatgtgttgagcatctactatgtgccaagcattttatgttttatttcctttaaggtaccaatcaaggcaactcttgaaagttgcatccccatcctatgtaagacggggaggatgatttacagccacatgtccacagtcatccatctcccctaagcaaaccctgccctgtctgacccccacagtcatccatctcccctaagcagatcctgccctctctgacctccaggtagacccctgagccccatcccagatgtccccacgcacatctgtatatcatggtgataaactttaacaccgcccttggtttcacatagcagacagacaagagtaacagggttagtgggtttttggataacacactgtgttaaggttatacgaccctgactcctctcagaccctgtctcccaaaaggggctgttaggtgggagagagaagagcacacatacctgtcagggcaccaagcgagtctggaaggctggtcttcttcaaagtcagactaacagggcccctcacccctccaagccaggtgccatcttgggggcagcagggctgggtcatgccctgtcctcagaaaccccctggacccactgcccactgggggcagtgagcctcagctgcagaatgaagggcttgagttagttctattctaaagaatctacaaatttgcaaattgtcgaaatttacacattaggacaatgaatatcatttttcagaccttttgatttggtcctgggccaggcatctgctcccttcccaggagaaagcagccatctccccttcacgccacctgggagggcaagaagagaaactgctcactcggtggcatggccaaatggcatcttgcctctctgagcccttgccccaggcctcacctgctgccagcagccctactgtgtgctgagggaagatgggacaaaggagtcaccaatgcagattaatatgaaggagcaggacaaaaaccccatggggttgctgtgtatggggacccagggcggaagggatgagcagcctggggcgcagccacttgaatggcgcatgcaggtggcagggtcaggagaaaggagttgcagctcagggtgctaaattaagatttactcaaagtccaacagaggccggggcccagactcaaatacacgtttttttcttttctttttttttctttttttttttttttttgagacggagtttcactctgtcgcccaggttggagtgcagtggcatgatctcggctcactgcagcctccatctctcagattcaagtaattctcctacctcagcctcccaagtagctgggattacaggcgcacgccaccacacccagctaatttttgtatttttagtagagacaaggtttcacggtgtcagccaggctggtcttgaactcctgacctcaaatgctctgcctgcctcagccacccaacgagctgcattacaggtgtgagccaccccgcccagccagactcacataaacttttctatccatttgctagagagcaaaatggttgtccaccaagggcaggaggcttccaggaactgaagagcaaggctgcagggccatggccagtgaggacgccagcgaggctgacgctctggctggacttagtccttgcccagtccgggttattaaagtgagcgtgggcccgggtgtgagggtgggtgtaggtcccaaggcctcggattcctcttctgaaaaatggggataataaaaggaaggccctcgcagcttcttagaacgattgaaagagtgaaaacctgtaaaatggtgaaagcagcgcttggcgcatagtaagcactcaggaagcatcacggaggtccccaacgtagccacgtggaaaaaagctcacaacagaaaggcacgcgagcagagcaggctggaagactgtgtgtgtgcactgtggttgctactgtagaaaatgtacgcatgtcaaaaagactggactttcacaattaaagaaacaaatgtattcaataactttttagcaagcagcgaggatcgagtggcacaggacgggaggagatccacttgaacgcttgcagccaaggtaagatgtggggcagaggtcccatgtcgacctcccccagggatcgggtgggcaggcaggggaggtggggcagtgaatgggatggcctggcactcaggacaagggttaaagtgttcattcgtctgtaagaaaaaaccatgacatggtggtgtgtactcaaggcctctattcaaatacttgagcagctataattagcaggtcctgggccagctgtcctgtccctcctcgaacaccaaataagctagaatgagttgggaatgacagcaagcacctttgggggagatggaggcagacactgagacccccactcttgtggtctggatgcccctcaggccacgaggctggcagtatcaacaccatggaatgaagatggcatctctggctctgaaggtcccaacagtttcccaaatggcaactgccaaccccactctgggcatctgctcctgcccaggagaaacctggctttaaaccctgcctctgtctctcgggggccttgtgccagcacctcgccctccgaatcccagtttaactctgtaagacggcagcacatcccccaactcgttaggagcaaagtcagttttaggggtgagtggctagaatcacgcctgacacagagcaggtactcagagactcatttgaatgtatttaataaatacattctagtcgtccctttc

SEQ ID NO: 1885633 - DNA, 4001 bp, Homo sapiens
ggggaatttcaagttaacagagacagcgccccctccccaactgtttgtacagtagaactcagcaggctggcgggctcccccaggccttggcaggtcctgccgctcccctgccaacgagagagcataacagaaacatctatttttgagtgttagagaaaacgaagatctcacagatggcgggaagcagcattctggatggtttcctgcacccaggctctgtgcaccttctcagcagcctcttgccccaggaaagaccagggcctttggcctctcgggaccctgcaagctagctgccttgcacagggggctgtctgcctatcccatcgtcgagggccgagcctggtcgaggctccccatgctgtagcactgtccagttggctctgaccccttctccttggagcaaggctgtgtggggtgcggagggggctctgggcaggaagcaggagtccctgatgcattcattcactcagcacacaccaatggagcgaggagctacaccaaataaagtggtggcctgatctctgccttctcaagaccgaccctaataatgggcctgggtctcccctagaccccatgtaccttggaaaaatcccatccctgctccaggcccaaatagaggcaaccagtggatcttctgatggatgcaaacccaaggaatgcctccggggacaggccagacccccagctcacagccacatctctcctggcagaagtggcctgatgtggccacccccgccccaggccttggttcatggtcgggatcaaccgcaggctctgccgtgggatgtccacaccctcaggacccgccgggtgccctgtgctgcccacagaggagagacaaggccaacaagcatcactgagcactttctctggactcagtcctgtgctaggtacagggatgccattgtgcacaagtcagaaacagccgcggccccagcagagcctgcagtctgggtagggagatacttgctgatctaagaatcagagcagtggatatctgactgcaaattgagactgcctgtgaaggatgaatcagggaaggcttcctggaggaggtggcctcccagagctcagcttgtccttccttgaggtcctttccattcccagtccccctctggtcactcacttggcccagggcctagggccttcgggcaggcagtgcagctgcacaggcaggtgctgtacctgctcccctgcacgctgctgggataacgggaaaatgatgaatgaggccccatcatgccctgcttcccggccctcaagcccattcccatccatgacaaattgtccctctacctccacagggtcttttcagcagcctcgcctgggaagccttggcagcacttggtggagatttatgcccatcttccccagattcttctttgtttttctgcttctttattccctcaaaatatgcttttatttattcattccacaaacgttctctgagtgcctcccgtgtgcttcctcctggtgatagagagatcgggttcagtacaccctcctgtgttgaacacctgctttgcactggtgtctatggtcagatttcatccaaggagacaggcatgaactaagcacctactatgagccagcactgccgagccaagggccctggcttctaaaagctctgccacagggtggccgaaaccccagccccttgggtattgaggtcctggcttggtgattttgcagcccttcttggtctgggtcgcctcaatttttacaaagaaggaagccgctcgttcatcagaggtgggtcttgaccccagagtctcaaccccaaagctggggagacagtgctcagaacaaaagccacagcaatgcaccctgccctctgtggacctcagttttcttacctgtccaagggtgtgagcagagaggcaggacaagaagggagcagccctgacatttgggggttctctgaatccttgaggacccctgacgaccgtgagctccgtgggtctccaggactgcaccagccaacgtgtctgtgcagagtggtggtacacagacaagggtgggggtggtgaggggagcacctggtcccacccaggagagatcaaccagatggtctcagcgcacccaccaccttcactaggtcttgttcactccatgcaactgaggcagtgaatatagccctcaactgccatcaagcggagtgaaaaacacaggtcaacataggtctttggtatttggatgcccatcatgctttgagtcttctgacaaagcaagcagccctctccccaggccagacacgcaccaaagcatcccacttcatgggtgatggcaccaagttggagagatgacaggtgagtacagagaaaaaaccatgaatattctggcaagctaagtctgggggaaagtgagcctacctcatcatatgataccaagaaaagaggcccattcggtgagcgatctgtcttccaggacacaggggctattcctaaagcccgtgcaagcagggtgggtgagagcacacagcctggagccagaccctgccccacctccagctgggtgaccttggttgactcactcaacctctctgcgctccatttcctcaactatggaaaagaaactgtctcctcacagcagctgatggggcccaggaccaaggcaagcgccccaacacgacagctattacttctcctcttatctcccgctgaaacaacaaggaaatgggaacggaggtccaggttgttcaatttcccaaccacgtccaggagacatagtggggataaaccgggcccttgcactggagaagggagcacacctcgtgaacttggaccggcggcagggtttacacaccgcactgaagacgggacaagtcacagagcctctggttgaagggtccatggagactttcatcctggccacctgtggggcacacgttcttatttggcttatctgatgagaaaggccctttgtttattttttcttctccgcaaacaatagataaatcaatcatttttgcttttaatgaaattctgcatcaagtggcacagggtcactgtgtttgggttagaaatcggcggggaacatgcacgctgctgcatgccgggccgacgccggactcaccccctaattctcaagtggcgcgtgatgcacccagcactcttcctgagtggtggcctgggagactcggcgggggggccgtgcctgttaacgccgtggtgtgcggggatggttatattgaagctattaaataaggctaatgtcactcttcccctcacacacacatttaatatattccaaagatgtgtagatgcattaacagcaattttcatctccaaatgttcccatttagtcagccccatgcataaaatatgagccctaacaccacgctccagcccgttgcagatggagttccccagagcatttggctctcagcgctggggcgtttgctggaggggcgggggcgcgatcagtcggcatctgcaggggaacacagggcctgtcacttcctctggggctttggtgcccccaccccccgacaagtggaagagagaacccagacccaactgactcgtgcctcctgcagctaatctcagcctcatcctggaagggcagaaaaagctagaaaaccaaacagctttgaacaaatgggaagaatttctaaaaatcaattaacatattcatgtactccatcaccacatcttattgactgcctgctttgtgcccagcacctgcctgggaattcatctgatccggtccctgcctttggggactccattagtcaatcaacaaacactcactgttctgctactgaacacagcaggggatgagagagagagagagagagagagagagagagagagagagagagaaatttctgccaatgagaaatctcacagtctagggcacaaagaaggtagacattaacattaggcaatttcagagaactgtaagctaggaagaaaacagtaacggggcaactggtagaatgtgatagggaagaggcaaggggagctgcttttatagggttatcagggatgaccttgctg

SEQ ID NO: 1885634 - DNA, 4001 bp, Homo sapiens
ggttcagtgagaggccagagccatcctccttggaggtgggggaggagggctgagcccaggcaggtcctgagacagaccctggacatggggctgaggctggggggctgaagagtgagccttgtccccgggcagatcctggccgagtggaagcagaagtatgaggagtcgcagtcggagctggagtcctcgcagaaggaggctcgctccctcagcacagagctcttcaaactcaagaacgcctatgaggagtccctggaacatctggagaccttcaagcgggagaacaaaaacctgcagggtgtgctgggggcccaagaggctggggaggggctgcactggcagtgttcccatatggtgccacccaagggctccaagaggcgtctgggcaaagaggcgtgtccctccaactccactggacctcagcagccctcaaccgagttaccgtgttccccacacagaggagatctccgacttgactgagcagttgggttccagcggaaagactatccatgagctggagaaggtccgaaagcagctggaggccgagaagatggagctgcagtcagccctggaggaggccgaggtgtgtgtgtgtgcagggcacggggtgcagggagctgagctccaggcttttggtccctgttctcatcccccgctttgtccgttttgttcactgtcccatccccagagcctaggacagagcctggcacatagtaggcattcagtgaagatttgtggagtgaatgaatgaccagtcactgaactctcttcacataaacattttacccattgcatcttagctgagcttcccatttccacatacctcccggttcccacctctgcctccctctgttttcttttatactctatacctgattgcctctgtttccttggcaacacttttctcttcattttcctccttgtcttcatagctggctctcccctgtgagggcctgaatcactttctcttaggcttatttttattttctcttagattctcttttcctccaccttctgcttctttgaaccacttacaccactcttgaagtcacttcgtatccatgattagtgagcaggcccccaccctgccctgtgccctgactgtctgcctgcatcccctcccccaaccccttcccaggcctccctggagcacgaggagggcaagatcctccgggcccagctggagttcaaccagatcaaggcagagatcgagcggaagctggcagagaaggacgaggagatggaacaggccaagcgcaaccacctgcgggtggtggactcgctgcagacctccctggacgcagagacacgcagccgcaacgaggccctgagggtgaagaagaagatggaaggagacctcaatgagatggagatccagctcagccacgccaaccgcatggccgccgaggcccagaagcaagtcaagagcctccagagcttgttgaaggtactcacccagaggggactggcctccacgtggcctggcgaagcagtagtgtcttgatacaggcaccagattcctcctgcccctaggttactgcagggacctctgacaggtgcctttagtgaagggaaccgaggctggctccctgctcatgcccactctcctgatcctcaggacacccagattcagctggacgatgcagtccgtgccaacgacgacctgaaggagaacatcgccatcgtggagcggcgcaacaacctgctgcaggctgagctggaggagttgcgtgccgtggtggagcagacagagcggtcccggaagctggcggagcaggagctgattgagactagtgagcgggtgcagctgctgcattcccaggtgagcagctcccctgctcattcctgaagggagcacaggctggggctcagcaagcaaggcttgagagctatgcatagatgctcaatgcttttcctgctctgcccaaccctcccccaacccagaacaccagcctcatcaaccagaagaagaagatggatgctgacctgtcccagctccagactgaagtggaggaggcagtgcaggagtgcaggaatgctgaggagaaggccaagaaggccatcacggatgtaagtcccccactccaccgacccgatccagaccagtgtctctccgtgggctgggcagcaagtgtgtgaggacttgaccagaccatgtgccacctctctcctgcacacaggccgccatgatggcagaggagctgaagaaggagcaggacaccagcgcccacctggagcgcatgaagaagaacatggaacagaccattaaggacctgcagcaccggctggacgaagccgagcagatcgccctcaagggcggcaagaagcagctgcagaagctggaagcgcgggtgcgggagctggagaatgagctggaggccgagcagaagcgcaacgcagagtcggtgaagggcatgaggaagagcgagcggcgcatcaaggagctcacctaccaggtgcgacgggcggtgactccaggcagagccctggcaccatagccacagtgacaaccagctgaggagaatgaagagtttgctcttagcctcttccagggcgaggatgggaatgcagcccccgtttcactttgcctagccctgccccactctgaatgtcccctagctcagaggtcagtctctgagcctcctggcctgggagctccatctcaacacccactcttagcccatcgccaggggacacacacagaattccagacaaagctcacccagtacagctcaccagaaagcaaatatgtagccagggtcacccccaaaagacaccaaaaacacacccatcccattcaaacaagcataaaaactttttcattgcccagggcagtgtggactctagctttctgaggtgttttctagaatcagactctgaattagaatttgtttcttttccaatccaggatgtcactatctctctaagcacactttgtccttaacttagattaagtcagtgttttcctggcctgcattgcagcccaggaaattccatcacactcatagccccaaagtcactcccagcatgtgccgaggtccagagcaggggacttcatcccgcatggggtccccggaccctgaaaaacctgctccctggagcactgcacacacacaattttgtgcataatttcaggagtcccactagttctttggactctttcctggtacagatcatttaaaatatttacacatatttggtaagaaattataaggagaattcaagtgtttagtgaggatcagaaagtagaattgggtcaggatatcagatgaagcagggcagggcggaggggatgctaccttctatgactgtgccatcttcaccccctgcctaccctctggcccccagacggaggaggacaggaaaaacctgctgcggctgcaggacctggtagacaagctgcagctaaaggtcaaggcctacaagcgccaggccgaggaggcggtgagtgaccctgctggggactaggcccaggggaggcataggagagctcgtcccccaagccaggagtctgagaacccaggccccctctcacctcatgctcccacctcccgcaggaggagcaagccaacaccaacctgtccaagttccgcaaggtgcagcacgagctggatgaggcagaggagcgggcggacatcgccgagtcccaggtcaacaagctgcgggccaagagccgtgacattggcacgaaggtgggtccctcttttgggctttgctagtcacccccacagcaggcatacccagacagagcaccctcaaacccgggatgcttccttttcatttattccacacacttgagccacatggccccagaggccaaggtaatgcagttctctgtgatttcaaggattcttccagctctaactttttttttttttttttttgagacggtgtctcactctgccgcccaggctggagtgcagtggcacaatctcagctcactgcaacctctgcctcctgggttctcctgcctcagcctcccaagtagctgggattatagg

SEQ ID NO: 1885635 - DNA, 4001 bp, Homo sapiens
gagacggggcacagacatcgaggcagaagcaggcgccctctgacctcccacatgcacgcacctggtgcggggctgacagctcccacggctcatccccagcgctgccttcatgggcaatcacaaatgacaaatagaagcaaaccattcttacagattcagcctggggactgcgagctggatcatgaacacccaagcatcaaaaaaaaaaagcgctgatgagcacacctcagccccttccccaaggtcaataccacctccaggaagccctcctggggctggcctaccaggctcgaaaacagcatagacagagccagtgctccgtggtccaccatcactgctgtctgtgttccccttgaaatgatccaacatccaggtcccccttctaaggctgatgctgggaacaggaagccttctgtgtatgacttggtaccaagaagaggcagatcaatgtgtgatttatccttaaaaaagcaaaccaccattaaacttggagcacacaaaaaggtccctcctctcccactgcttccagggagtccacaggaagaaccagcatagagggcgaaggcagaacccaggggcagcgtcacagccaacctcacgttcccggacatggaagccaggccatacctgagaggggctgacatccgaggctttgtcctggagacaagcagggtatgagtgtcttctccgacagtttgatacgcaaatgagagtctccccctgtatattcgccattaatcaagtgaacatacaaagggtatcctctctttaagtaccaaagggtggctcaaagagcaggtgaggaccatgccgggtctttgccggagtggacatctcctcctgcgaggcctgagaccaagggggaggggcccggtgacaagcctcatctggctgaccctggagctgggcctgcaccttgcacattgtggcctggccccgaaaggtggcacatccaggactccctgcaggcgagactggcttctaaacaagggaacaggtaggcatgactatcagtgtgctcagcatgcatgggtgaacctgcttcaaatacccacaagctacatggacaatggaaccatcacctttctccaaaggggcacagggtgtgagggctcagcccggcaagacatggagttatcagagaagaaggcatctgcaggcattctcagagctggagagcgctgagacaatgtctctcctctgaggctggttgtcctagagatgaccagatccaagaatgtgtcacctgtacctacctcgaaacaaacaaaaagagggccccagcgtcagactctagcgacaaaggagtcctgaagaccagacacacctgcccaaggcacactcaggtgcaatcactggacaatgtgctccgaggactggccattggagtccagcgacagtcccagagggcacaggcaggctcagggagctccaccagtaacttgccttagaacaacctgacatccatgtgcttccctcaaggctgacactctctcaaggatggagaccaccagggagtggcaggtcaggggagtagcaggtgagaagcagcatcagctctgcgctccaccatccaccacccattcgtgtgtccggagaggtgcgaggttagtgctggacgcaggaagccctctgggtatgacttggtatggagaagaggcagatccatgtgatttatccttaaaaaaagcaaaccaccattaaactcagtgcacacaaaaaggaccctcctctcccactgcctccagggagtccacaggaagaaccagcacagagagcgaaggcagaacccaagggctaggatcacagccaagctcacgttcccagacagggaagccaagccgtacctgagaggggctgacatccgaggctttgtcctggagacagcagggtctgagcgtcttcctcgacagagtttgatacgcaaataagagtctccccctgtatattcgccattaatcaagtgaacatacaaagggtatcctctcttcaagtaccaaagagtggctcaaagagcaggtgaggactatgccgggtcttcgccggagtggacatctcctcctgcgaggcctgagaccaagggggaggggccaggtgacaagcctcatctggctggccctggagctggggcctgccatacagttgactttacttcccagcatctcttcacgacaggattggttaccaaaagacaggcaatcctgtaccatttgaaataatgtaaatgtaaaatggctgaaatccctttagggcctgcaaaaacaccctgggagaagaacctctgcctctgcccaaagccactgcctccaggaagccctcctggtgaacactggctaagggaggttagaagatgcagtcacatgcatcattaaagaaaaaagagaaacagaaatccaacgcactccgtttgcaaatcacaaagcagcactatgacaagtgtcccttctcctgaatttggcattgtattcagaaagccatctgagcagttagttgttactcagaagtattcatctagggcaagattcgtcaaaggaaaatgagattctcatgggccaactctctctgaataaacacatgctaacaccaggaatccaagggtctttccattggcaagaatccctaaaggacaccaatggactaagagagcagtggggcttagaggtcccagcagcaagtcctgtagccacactgggtgctctggggcctccttcctgtggactggccttccctcaagtggacagtgaggtccaaaagtcactccaaggatgggctaggtatggagagtgggtagaccagatgacccacatctacattagacattgactttgctgacggtcattctttcatgtatctgggagatgcactgaccacgagacctcttctcagaggctggcatcatgctgggcagacctgccggagtagcagcccatggatgctttgtgataagtagggcccatcaagggaggccctttgttcttttcttttttttttaacctattgtgttgagacaggggtctctgtcagccaggctgaagtgcagtggcacaatcttggctcactacaacctcccaactcccgggctcaagtgatcctccagcctcaacctcctaagtactgggaccacaggcgcacaccatgacacccagctaatttttgtattttttgcagagatggggtttcgccaagttgcccacgctagtttcgaactcctgggcttaagccatccaccgtctcagcctcccaaagggctggggttacaagcgtgagccaccgtgcccggccaaggtaggccctttttgctaggcagaacaggtggtctgaagagaaaaccctatatcatctccaaagccagcatctcttccagaaagttcttggaaggaagcatgagatgaggagggtcagagaaccaggtcacaaacagcaagacagaggcacatgccctgtggtcaaccatccacaccccagggctatcctggccatctaacaggttgctggagtcagccttgttcccaagaaggcttcccaggcaggatttgctccccagagagagtctgcccttgtataatcattgcaagtaaagcaaatgcgtgaaggattacctctcttcaagtagcaaatgatggcagtgacaggaaggccatttcctctgtgactaagttgccaccagctccaggagcaagccttagagacacagatgggatctgcatggtgagagcagcacaccgaggtgtgaagtgcaggcccgtgggtgaatcacacatctattccttccatagcccctgaagcagtgccccttcctgaaattgacagcccactcaggtattctctaaggtacaactagtcacagtaaaagaggttcattccagaaaatgcattgcaatcatggtaaacatacagagaacaaacttcattcaaggtcaatgaggcaatactgagaacacagccttgtaacaacacattatgtgtgcaccaagggcagtgagcaaacagcagagaagctg

SEQ ID NO: 1885636 - DNA, 4001 bp, Homo sapiens
ttttggccccgcccacactgcaccaggagaggggatgtcccagaggccactgccttccctaaagtcatccaggtgcccgtgaagtcctctctgtgaagtggggacccgtgaacgatttgccacacacaaaacggatacacacggtcatgcacacacataccgcatcccttgctgagtgtggactgggtccaagacaaggtttgatactcacagagagcttgcccttgtatattccatgtcaataaaccgaatatacaaagggcaacctcgctttaagtaccaaacaatagcactgggcaggttcctcactatcattcacggggccggcctcctctcccggggttcatcctggcgggggagggggtgggagatgcgggatcagcagaccaggtggcaaacaccacctgccagctgtgtgcccataggtcagctctccatcccaaaggggccaggaaggggcagacgccagtgccccttcaccagaatcagcctcttttccaggcatcactccagattagaacttgttcctgaaaaggagatccaccccacgggccttcctgggcacacgcagagctcagcttctcactttctataggaattccctggggtgggaccaccatctccttcccagtgtgggcacctctccaggaagttttcctaaggatgcactcagcaccgaggtcccaggcactggatgaatttacaccttagacaaagcaaaggccctgtggtcaccatcccttcatccatctcacagagccgttgacaccagtgtcattctccatgccagcccttgccccacccctgccagaggctggcatcgtggccatgaagccatgctaagaaagagcacagggtcaacagtagtaaaccccacgtacccccaagtaactgaggaagcagacccacagcccattccccacagtggtctctccttcaagaaggggagaggagcgggagccgcctggtccaggtggcaggttatgtgactcattacccaggcgtggtgctcacctctcttcagctggacgttcgctttccttgggctgaggatgctgcgaatgtccttcctgaagctggcttcgggtccagatgacccccatggcagtcggggtgtaaaaagccggcagtcacacggcccaaggagtgtctccacaaacacagaacaagagtcccattctcaggcagccatcctaggtgtgagcagaaagccagcagtcagagacggggcacagacatcgaggcagaagcaggcgccctctgacctcccacatgcacgcacctggtgcggggctgacagctcccacggctcatccccagcgctgccttcatgggcaatcacaaatgacaaatagaagcaaaccattcttacagattcagcctggggactgcgagctggatcatgaacacccaagcatcaaaaaaaaaaagcgctgatgagcacacctcagccccttccccaaggtcaataccacctccaggaagccctcctggggctggcctaccaggctcgaaaacagcatagacagagccagtgctccgtggtccaccatcactgctgtctgtgttccccttgaaatgatccaacatccaggtcccccttctaaggctgatgctgggaacaggaagccttctgtgtatgacttggtaccaagaagaggcagatcaatgtgtgatttatccttaaaaaagcaaaccaccattaaacttggagcacacaaaaaggtccctcctctcccactgcttccagggagtccacaggaagaaccagcatagagggcgaaggcagaacccaggggcagcgtcacagccaacctcacgttcccggacatggaagccaggccatacctgagaggggctgacatccgaggctttgtcctggagacaagcagggtatgagtgtcttctccgacagtttgatacgcaaatgagagtctccccctgtatattcgccattaatcaagtgaacatacaaagggtatcctctctttaagtaccaaagggtggctcaaagagcaggtgaggaccatgccgggtctttgccggagtggacatctcctcctgcgaggcctgagaccaagggggaggggcccggtgacaagcctcatctggctgaccctggagctgggcctgcaccttgcacattgtggcctggccccgaaaggtggcacatccaggactccctgcaggcgagactggcttctaaacaagggaacaggtaggcatgactatcagtgtgctcagcatgcatgggtgaacctgcttcaaatacccacaagctacatggacaatggaaccatcacctttctccaaaggggcacagggtgtgagggctcagcccggcaagacatggagttatcagagaagaaggcatctgcaggcattctcagagctggagagcgctgagacaatgtctctcctctgaggctggttgtcctagagatgaccagatccaagaatgtgtcacctgtacctacctcgaaacaaacaaaaagagggccccagcgtcagactctagcgacaaaggagtcctgaagaccagacacacctgcccaaggcacactcaggtgcaatcactggacaatgtgctccgaggactggccattggagtccagcgacagtcccagagggcacaggcaggctcagggagctccaccagtaacttgccttagaacaacctgacatccatgtgcttccctcaaggctgacactctctcaaggatggagaccaccagggagtggcaggtcaggggagtagcaggtgagaagcagcatcagctctgcgctccaccatccaccacccattcgtgtgtccggagaggtgcgaggttagtgctggacgcaggaagccctctgggtatgacttggtatggagaagaggcagatccatgtgatttatccttaaaaaaagcaaaccaccattaaactcagtgcacacaaaaaggaccctcctctcccactgcctccagggagtccacaggaagaaccagcacagagagcgaaggcagaacccaagggctaggatcacagccaagctcacgttcccagacagggaagccaagccgtacctgagaggggctgacatccgaggctttgtcctggagacagcagggtctgagcgtcttcctcgacagagtttgatacgcaaataagagtctccccctgtatattcgccattaatcaagtgaacatacaaagggtatcctctcttcaagtaccaaagagtggctcaaagagcaggtgaggactatgccgggtcttcgccggagtggacatctcctcctgcgaggcctgagaccaagggggaggggccaggtgacaagcctcatctggctggccctggagctggggcctgccatacagttgactttacttcccagcatctcttcacgacaggattggttaccaaaagacaggcaatcctgtaccatttgaaataatgtaaatgtaaaatggctgaaatccctttagggcctgcaaaaacaccctgggagaagaacctctgcctctgcccaaagccactgcctccaggaagccctcctggtgaacactggctaagggaggttagaagatgcagtcacatgcatcattaaagaaaaaagagaaacagaaatccaacgcactccgtttgcaaatcacaaagcagcactatgacaagtgtcccttctcctgaatttggcattgtattcagaaagccatctgagcagttagttgttactcagaagtattcatctagggcaagattcgtcaaaggaaaatgagattctcatgggccaactctctctgaataaacacatgctaacaccaggaatccaagggtctttccattggcaagaatccctaaaggacaccaatggactaagagagcagtggggcttagaggtcccagcagcaagtcctgtagccacactgggtgctctggggcctccttcctgtggactggccttccctcaagtggacagtgaggtccaaaagtcactccaaggatgggctaggtatgg

SEQ ID NO: 1885637 - DNA, 4001 bp, Homo sapiens
gaagtgcaccgcgaatgtttcgtcacaaataaagcgaaaaaaacacgggcaacttctcattaagtaccgcacgtcagcaccgttgacaacactgcttctccgcggctggtatcactcctgcgggcttcctgagagcacatgggtcctgatgcgcaccgggcaaccggtgacaaagatatggccgtgcatacaaccccctcaagacctgggagacatctaacaggtctgccccctctgcacaggtggcattgtgtcctggagctgcttgtgagcacgatgtgttcaatttctcaataacaaaaagtctcctccagtagcacagaatatgacaatggcacagaaacagtgattttgcatcctaaaagtcctcctgaggatacatgaggagggaccaggagagtcacaataactccccagataagatggatgagatctaccacccaccctttagggacaaacagcaaagtgtctgccctgatggagcctctgagccaagggagtcgtcatagaatgggtagcgcaagggattttttaacatttgcctcaaacagatggaatgaccaggggtcctggcacagcgtcaccactgtcgatcagcctgagccggagaagagcccccggggcagaccggaagctgcgggttagggagggatgaatgagcaatgaataaaacccaagttctcaggtggtccacgtggacaactgacttggtggtggcaaatcctcaccggttcctgcattcacacctcaccacaaccccctcccgggtggagtgggcctccccgccccttgccttgggttcggccgtgtaattgttctggtcaatgatctgtgggtagaaatatagcagttcccagccttggccttaaggagtttctgcgtttctaattactttcttgtgcctctgccgtagccatgggagcataccaaggccggggtgagagctgtgggtcccaacttcagccctcagggcaggccttctctccacaagccatcctaggtatgggagggagactgaggatgaacggaccaagacacacacccgaaatagaatgtctgctctcagacaagatgtccactcccatacctctccatggacctgacgccaacagccctcccctgaagcgcgtgtcacagccgggacacatcttccgcagtctgacactgagggcatccagggcatctggggcctcgtaaggcaagcagagctgaacaacagacagagatgagcaacggcaacaaagccctttccccaagcatggactgaacgctgcccacgaagcggctggattctgagtggtcccaacacaggaagggctcatctcaatcacgctgccagctcctcagtcccccatccacgactcaccaggagtgctgctgacaccagtggccctgccggaatctagcttcatgtccaggaagtcctcctatggaaaagagatgggccacgtagcattcatcaaacacatggcaagctttgtcagacagcctctcttcatgtagcacagaataaagtggccctcactaccacagctgtcccaacgcctgccctgtcctgcacacacacaacactcctcaaacccttccgaggataaaccacacccctgtaccaggtcacacacacacctcctgcagtcagcatgtggtgtggggtgggactttccctgatggggcactgaagcccaggcctctgcaatcctggcattgtctgtggccagactatcagccctcctgggcaggatttgaaaccaaaagagagattattcactgatgattgcttatattgattttaacgaggtaggaggagggggccccgaagggaaacccctcctaaaatcctgcagagtcccacgggccccacgtcctcccacatcttctccgaagttgccatgtgcaccaagatgtcatcccacagatggaccgggcgctggtggatagtcaaacgggtgacctacatcgtaaatgaagtgcacgtcaccggtctaccatcccctcagctaccctggagagcagatggcaccatcgtcccttcaatgacgttgctagcgtgtccagaaggccatccaagcaagatctcacactgaagaggcgccacccaccgtgaatcaacaaatagacaaacaccacaatgagcaacctccttcaaccacagaagcacaggcccttctccaaactcagcttcccctcctaggggccctccatggctggggcctgagagccacacccccacgacgcatggcacgctgtcagcctcgcttgcgcctaccgagagtggagccggcaacgtccctccctgaaggctgcatcaggaacaggaagtgcctccagggtgggatttgatactaaaaaagaggtttcccgtgtatgtttcatcataaataaagagaagacaacacggacaacctctccttcgagtatcgaagattagcactgatcaaaaaacaaacaaaaaaaatcaaaacagaactgccgaatcttcgccgatgttggtgtcacctccaggaagattccccgaatctacatggcactgggtagaccagacgtcagatggcttctatttgcgtgtcccaggttgcttttgggaagtcagccaaaagctcttcaagccttcacaatgaaaagaggttgcccgggaaacattttccgccaatacagagaacactttaggtacaacctctttccaggtattggagctttcctgacggtggaaccagggtttccttgtggaagtccaggccacgggaagtgcccctagtcataatggtttgcatcccaaagtcagtgcgtcaagagagctcatgagtaaatctcgaattctgtggtcaagaagcaggtggctgggtctgcagttagccggtgcccaggcccctgtgtggcactggccatgggtccaagcagccttccaggcaaggtgtgattccaaaaacagatacatggcaccgaggaagctgtaagcaaagtgagtgcctgctacacacggctagggagggagggtcggggaagccaggagcaccgccaggccaccttcctccaggtcaaatcccacttaatgccttctgctgccttcaatccaattcagcagaatcaagaaataaaaacgaatctcatttcctgatgtgagctccccaaatgttttagccaattctgggccggattttctgtttgctataaaactcctttgacaataattgttttcatggtggggggagtactgttatctccagactcttttgcatctcaacagagagttagatcaatcctgacagggctggggagaatcaggggtcagaaaacttcaggtttcctcttacaaagttgtaaaattgtgccctcttttcccccgaaggtggaccccggagcagaggtctgagaagaaaatcccagggccaggctgcggctctgcacccttgccacctgtcctttgacccctccgtagccagcagagcacccaatctacatggacccagcagccgcctaccctggataccccggaggcaacagcatactgcctgctgtcacatggccttgacacactctctctgccctctctttatgagggctcttttcggctggaaggaacggtgtttgggtatcagctaataggaaggattggtggcggaggtcattggtgctacctcatatgttctctctggttataaaaagcagggttgacatggaaatacctggcccttctccagaacctgaggccctcctccctcacagtcccatccccaaatgccacagatgagccgaggacccacagtcacagctaagtgccatcaaaacaaatgcagcaccagcaaaacctacttctgtgccttggctttagagctggcagggagccttttccttccccagaggctggcatcacctccaggaagtcctcctggaaaggatcgggcaccaagcattactgccagacaggacgcttagaacaggggaagcacccatctcggcccactcaccctggcctgggcctgacaactgtcttatccggaagc

SEQ ID NO: 1885638 - DNA, 4001 bp, Homo sapiens
tcccctgctgtgggctgggctcattcaagcccatcactgagtgtggcaaggacgaggcatccccctacagcagggtcagatgccgaaagagcctgaattacacacacgatccgttgggagcacaacgaaggcaaccacagacaactcacctgcatgttccgtgacactgtcgtggtgacactgtcttcccccaggctgccatcacattgaaaagtcctcctaagaagggataagacattgagggttagcgcaatcggtggcaaaattcagaaacatggggcacgcttagtgatcagccatttgctcgtgtctccttatttatgtccacagcaccccttccctgaagctgaggtctggaccagaaggcctccaagatgggatttgatactggaaaagaggttaaccaggtgtgtttcgtcctcaataaagaaacagaaacccagaaaacctctcttcaggtaccaccaagtaacactgacaagaacaccactgattccttccccaaacttgacattcagtcctggaagtcctgttaaatacggattggacactggggttagtagaacagatgacatcagtcaaaataatacagcacaggcttcgtggttaaccatagatttctgtccagtggactggagctgagagtaacgcccttccctgaagctgaggtctggaccagaaggcctccaagatgggatttgatactggaaaagaggttaaccaggtgtgtttcgtcctcattaaagaaacagaaacccagaaaacctctcttcaggtaccactgattaacactgacaagaacaccactgattcttccccagacttgacattcagtgctggaagtcctgttaaatatggaattgcacactgagcgttagttagttgatttgccggaagaagccaagagttggatgcatgctgcttgccaaccatctatccaagtaccccagtggagcagaccccacatcacgtctggaagttgacatcacagccagaggtggtgatgccataaaaaggctggtcacagcagctatcgcgtttagggttaacctccagggccatcttttctcagttactcaagagaggcacagatgccccaaagcaaggctgactccaccaaaggtcctgctaaggacccagtggagactgaggtgtgacgggccaggcgaccttggttgtaaattaaagtgcatacactcaggtcagctgatcactggaggactttgggatggtatagacagcatgccccttcccttgaacttggatgcctccacatctaggaagccctccaaggaaagagatcggagtgaaaatcagtccaactcagccacatttggcatacatgtcgcaaacgcctcgcagatgctctcttcagagtctaacagagtgcagctggccccagtttactgtctctttcccaaaaagttgacacctcttccaggaagttctccaagggggcattagatactgagggttagtggaccaggtcacaaacggcacaaataaagcgtgtgctctctggtcaaccatctcatgtatccaggcacgtgctgacaccacgctccttgtccgcaagttaaccctgctgccaagccagagcagtgtgctgagaagaaggctgccacacgtgagttatcgtcacacacaagacaaacacatcacaaaccccgctgggtcacactgagcgcagacctagtggcccccacccccgcagttgatgttagctccaggaaagcttgcaaggcgggattagatactgcaaagaggtcgaccgtgtaatgtgcgccataaataaagcgaacgcgccacggaccacctctctccaagtaccaagcagcagccgtactgacaccaggacagtggctcttccgcaaagctgatatcacctcctggaagtcttccaaggcgagatgtgatattgagaagaagtagaccatgtgtcctacgtcacaaataaagcgtacacaccatggtcaaccgcatcttcaaataccaggaagtgacgctgacccctggctctcttcctttcacctgctatcacctccagaaagcctcacaatgcgcatcatgaactaccagccaccggcaatgtggcaatgaccacaaacccacatccaatgccactaccacctccaggatgccctgtaagggtgggaccggtactgagttcttggctggtggaccaaatggccaatgtaataaataaaggactgggtctgcagccaaccacccggtgacctgcactgcaccctggctaccactcaggcctggctctcaagtcggcatggcctccgggaagccccagggctggctgatactgagaatgagtggaccatgctacatctgtcattcaacaatgcatatgctttatgctctaccatctctccaagtactgtggaatggcgctgaagccagatcagtgtgtctcccacgaaggtgactttgcctctctctgggaagccctctatgactgaatttgatattgagaagatgtggaccatattacatacgacacagagatagcgcatgttctatggtcaaccatcttttcaggtaccttggagagggctgaggtcagagccggtgtctctttcctctcactagcatcacctccaggaagccctctgaggcctgatgtagtattgagaagaggccaccatgcaatgtctgccgcagatgcagtggacgcagcacaaaggagcccctcaagaatggagatgatgctggaactagtgctatgactgacactcgttcctgcctacagaaagccccccgaggtgcacgctgttataggaaggtggacgaagtaacatgcgttgtaagtaaaacatatgaagcatggccaacttctactaagtaccccgaggcagtacttgtaccagaactggtgctttgtctcctaagcttaacataacctccctggagactttccaggctgaatgggatacttcaaaagaagtagaccatgttacatacgtcatggggaaaagacatgcagtgtggctgaacccttttcaggtaccgtgaggtcagtgaagaggccagaaccagtgctctgtccctgaggctggcagcttcttcagcaagttctccaagcaagggttctgggatggagatagggaagaagtgggccatggaggcacttcctctgtaaacatacacgatggggtcgagcagctcttcatgaggatcagtgctgagtccagagctgggacatcttcccccgagatggctagacttgagatggaaaaaagatagactgtacacgcatcagcaaagacaaaaacgagtcagtgcgtcttcaagtacctggagtggcatcatctcctggacccatatctgctcctacatgggcgtactgtcctgaagtcatctgaggagggctctgaggatgagaggtgacctgtttcacatccctcgttcatgaacatttgcggcaccagccaccgtttcttcaattactccagagggatgtgccaacgtgggcagtaggacaccttcctggaggtcatccttgtcctgaggaagtcactggaggctgtgtttggcactgaggagaagaccgcatcacaagcattgacagagaaagcacacatctaagagtctaccattccaccaagtgccatggcatggcggatgccgagacccgtggctctcctctaactccaggctttctccagggaggtttggatggctgggctggataccaagaagcggtttaccatcccacatacatattcaaaatgtatgtgggacggtaaaccatttcttcaagtaccgcacgatggtggtggtggtggctggaagaaggctcatgtccacgaagttgcctgagggcgcttcttctaggctgcatttgacgctgagaagaagcaggtcacggtgtctactgaataagcgtagcgtagtcaaccacgtcattgagcaccatggaatggcactgattccgggaagaatcaaggtctcctccccagggatggcgcgatttcccaaggcagaac

SEQ ID NO: 1885639 - DNA, 4001 bp, Homo sapiens
agacagtaggggcaacaggtaggaagggccaggtctaaggtgagctgggggtgcagccctagagagaggtaggaaggagggacaggggttgctctggaggagagagggttgctccagaggcagagggaaaagacaactggagtgggagtcagtgagccaggttctgtgttccaaaggccagcattgcctggaccttgggtctgtcctcacctgcataagaggctgcaggagccaaatgggccttccagccttgtccaatattatggagtcccgaggtgtggagtgtattctgtgggcccaagaaacagcaacagatccccagaacagatgacagccctaaagaaaggctgctttcctgagcatccctggggctagaaagagtgtggatcaggtgcttcctattgggctgggcctgcagaggggacaagaggggccagtcttacagccacccagaccatactttccacacacatgcacatgcgcacacacacttgcacacacacacacacacttgcacacatatgcatgcacatgccaccagatctcagccagcacagaaaggctctcccagccttaggtggcttatgcattttctgaaactaactgtgggaaaagggcttggggaaccatcccatgtgcctgcaccaaatgctgtgtgggtggggcaggacacaagccctacactgacacctcccagaaatcagggaatcagagcttgagagattgtccagtaaaagttggaaccctcaacaccccttgactctgcccaggaggagcaacctcagaagcccccccaaacctcctctcagagacctgccgagtaggaggcttctctctctactctcctccccgcaaaaaagaggccagaaaagaggatgattggctaactcagaggtgccctgatggaggggagcaaacaaggggacttccaaggagaattccctagcccacctgaaagacccctacccagagtggtgaggggcagcttaggagcactgacgcaagggggagagaccaggctggcttccctctacgtagtaagttcctggggtgtgcgcccctgccccagacagcagagaaatcgcctgactgggagatggagaagaggggccaccttctcatgccaccccgccgccaatcctccaggcacactcgggcgcttgacctgctgaagcctgtagcctcaggtccagtgaggagctcacgggacagagggccctaccagagccacgaaaaccggagggggggacctccgcccaaggcaggcgtctctgcgcgcccgctggggccctggtcctgcagttggcttctcccgacacgttccttcgctgccgaaagcgattcgcccgcgctctaccgagcccagccagctcctacctcggcccgggcggcgagcgctgtctccgtcccgagaagaagtttcgcggctggtcccggggcggcaggcgcacgggacgctggcggcggcggcggcttccgacttgggctcagaccccgccgctccagacaagtccccgcgactgcgacagtgtctcgggcagttcagctccccagacgggagacagaccctcgcgacctggttcaggccttgccctgggggacactgcagtccaaggcgaaaggagacttgctcccggcctctgggtccctaggtcaaggcacctccccgccccgccgcccctgagcccaagtcgccaaccccgcgccgcgcgcagcgagggatcagaaggtctcggacgccgcggcagggccggccagggccccacgagttagggagttgccccgcacccctaaacgctcagcacccatttacggttgaaagtacgcacttgacgcgtccgggcgcctccgcggtgagtcgcgccgccgctctcggggtccgcgaaggtggctcagttcgggcgctccagtctcgacgttcccggggtagagagcaacgtccggggacgaacgggacgggtgcgcccagcggccggggctgcgctgggcgaggcaagcggcgagaggggagcgctccggcgttcaggcaacagctacccctagtgggagagccgcccggggccggcgccgccccgcgcccgctgccccgcgccccacgcccgtggcgccccgcgcccgggtcggctgggggcgcagggccggcgccgctttccccagctctccggtctccggcgcccggcggtaacccgcccgcgggctctgccctccgcacctctcagcccggccccggcggccgctgacccaggaaccgcggcgccccgctggaacgagatgggacggggcgggcgcggccagggcggcgcgggctggggcggcgcgcggcagcctcgggcagcggcggggggcgcggagcgcggtgtgcgtggcggggcggtgcggggggcggccgtgtgcgaggcgcgagtgtgagcgcgcgcgggaggcgggcgggcgggctccggcaggcgagcggcgcccgcgggcgagccaggaaggcggcgggaacgcaaagttgcctcctcgctggcccgcgtcctcggtggggcgggagccggggccaccgaagcggcggccgcggacccggcctcccgcggcacctgggcagcggccccgcacgagcggcagcggcgtgggcggcgttggcggcggcgcgcgggaagcgaaccggagctccggcgcggctcggcggccgccggggagctcggctcaggtgcgcggcgaggggggcgcgggccggagccaggcggcggggaccagggcggcgcgcagcgctcgcgccagctggaggacctccccagcggacgcccaggtccctggtcgggctcccggtccccagcggcagcggctgccggagtcccccgcccccgagagctggctgcggggcccgggcccgcccccaccggccccaggcccggccgctccgccctccgcccgcctgcgcccgccctcagcccaagatttctagggcattggccgcgctgctgggtgatccctccgggctcaagttgcaagggggcgggccgggccggaggtggagtctcccgccaattgaagcctccgctataaattgaactccctgcactgctgaagcccagatgcctcgccaggccacgtcgcggttggtggtcggagagggcgaggggtcccagggggcttcggggcctgcagccaccatgctccgctccctgctgcttcactccttgaggctctgcgcccagaccgcctcgtgcctcgtgctcttcccgcgcttcctcggcacggccttcatgctctggcttctcgatttcttgtgtatccgcaagcatttcctgggccgccgccgccgggggcagcccgagcccgaagtggagctcaacagtgaaggcgaggaggtgcctcccgatgacccgcccatctgcgtgtccgacgacaaccgcctgtgcaccctggcgtcgctcaaggcggtgtggcatggccagaagttggatttcttcaagcaggcgcacgagggcggtccggcgcccaactccgaggtggttctgcccgacggcttccagagccagcacatcctcgactacgcgcaagggaaccgcccgctggttctcaatttcggcagctgcacctgaccaccgttcatggcgcgcatgagcgccttccagcgcctggtcactaagtaccagcgcgacgtcgacttcctcatcatctacatcgaggaagcgcacccctccgacggctgggtcaccacggactctccctacatcatcccacagcaccggagcctggaggaccgggtcagcgcagcgagggtactgcagcaaggtgcacccggctgcgctctggtcctcgacaccatggccaactccagcagctcggcctatggcgcctacttcgagcgtctctatgtcatccagagtggcactattatgtaccagggcggccgtggccccgacggctaccaggtctctgagctgcgcacttggttggaacgctatgatgagcaactgcacggcgctcggccccggagggtgtaaacatccaacgga

SEQ ID NO: 1885640 - DNA, 4001 bp, Homo sapiens
gtctgctcaattttctattgctatgtatcaaacaaccctagaactatgacaatgctttccgatttctcatggctgggctcagctgggcagctcttctgctccacatggtgtagctggagttacttgtgtgttatgtttagctgggagctcaactgaggctagaatgtccaaggcctgtcagcctttgagctctgtccctgtgatttgttgtcattcactagtctagctgagcttctttatagaatagcagctgagttccaagggggagtttttagaggacaagccccagtgtgaaagtgcctataaagcctctgcttgcatcacttttgctaatgtcccattggccaaagccactcacatggataagcccagtgtcaatgtgggaggaccctactcaagggcatgaatccttgaggtgtagcccactgggggcgactgatatgacagtacaccacacagtccagtcaccttgccagatggtgagcaccttgaggaaggagctgtgttggtcttgtcctcctctccatccccagcaccagcatagtgcctgatctaccagggctacagtggatattcagttaatatttgtgagataaataaaccttattttattatgagtaataatggcaaatgagagccattatctttatttatttatttacttacttatttattctggggacagaatcttgctctgtcgcctaggctggagtacagtgatgtgatcacagctcactgcagcctcaacctcccaggctcaagtgatcctcccacctcagcctccctcatagctgggactacaggcatgcaccaccatgcccagctaatttttgtatttttggtagagatggagttttcccatgtttaccaggctggtctcaaactcctgggctcaagtggtctgcccacctcagcctcctaaagtgctgggattataggcgtgagctactgcacctggcctattatcattgtaggtttcctgtatacagatgctgtgctaagagctttttctggattatcccatttaatcatcccaacaggcccaggagttggagcttctactttccctgtatcactgatgaagcagctgaggctcagagaggttacataacttacccaaggtcacccagctgatgaagggtggagtcagaatctgtactcaggtctatctggctccagagcccaggctcttaaccccatcattgctgccttgcagatgaggaaactcaagtctgggagcaatgacttggtttggtctaagctgggaggtcccaggcaatgtcttggccccactcatggggtggttgcaagaccaagacaggggtgaaaaatgtgaggatataaagcctcacatttagagggaaaggtagacacaatgtgatacccaaggatttgggtaggaccctgctcaggaagcatggactcaatgcaggagaggaaaaaaggcccaggagccctaatcagtcctaggcctcagttttctcacctgtggaatggagcagtgcctttctgcctttggaagtgacaaggtgccccttgcctctgcagacagtgggtgagtctctgctctacatgctggagaagtgtctgggccctgccttcacaccagccacacgggctgcctggagccaactctacggggccgtagtgcaggccatgagtcgaggctgggatggcgagtaagaggcgaccccgcccggcagcccccatccatctgtgtctgtctgttggcctgtatctgttgtagcccaggctccccaagcttccctgcatcttggtccttgtccccttggccacactggagaggtgatggggcagggctgggtctcagtatcctagagtccagctgcagaaggagtggcttttcctccaggaaggggcttctgggtgtcccctcatccccagtagcctctttcttgcgtttctttttaccttttttggcactccctctgaccccgcgatgagtgttttggtggcagaggtgggatgagctggaaaggtatggaggtgggagaggatggggctcttctgtctgtcctgcttcttcaggtgagtgcaggccaaggcgggggtgagatggctgagcttccagcgccttctgtcctgcctgcccagtcccttcactgctttcctgccccaagatggcttgcttttcacaaataaagagaaagagcagctttagccttcttggtggaatcccaggcagtgggagcagaatcagaactgccagggaagggaagggggacctgggtctcaatgggtctcatttgagtctcgcgggctgtgcagatgccctgacagagtcggtttcctttggcggcattccctttccctcattcagcacttctgctgggaactccctgactattccgctgctgcaggaacccagctagctggccaggtggggaggggctggggaccggccaggaaggaggggtgacttcatcccagagagacccgagttcccccagcccttcatcaccaacccgctcctgcaggagtgagtcttacctcccctggccctcctttctggctcagcctgcagcgactgtgaggccacagctcctcagattcactgcccgctgtgtgccagtactcaggcagctggagagaagagaaggcagcagcagaggcccccgccctcaccccagccatctgcacttgtaccatttgctctgtgctgactgtggtcctataaattcatgagaaataaactggttctgtgtgcctctctgaccctcgggcctgatcttttcttgggtcttggcctgtgccagatgaagctgcagggcagtggatctcaggacaggatgggaggatggagtcagggaggccaaggctggagtgggtggaacaggagggaggggcctgggaggaagctctgggaagccagtggcagacatctgtggggtctgtggcccaaactggctggcagaccacaaaccagctcttcttcctcctgggcacacagctggatgtcatgcagccacccttgcaattaggtggggcatgtgactgggctctggccgctggaccgtgcagatgtgtgtgccactccgaggcctggtcccccaaaactcctgcatgctcctccatgctctgtcatccttctgctggtgtgatacagacctcacagagaccatgagggccacgtgttgaacatggcagagccacaggtgaaaggagtcctgaccctgaatcgctgcttggaggaaggtgcctattaatcagaatcacccattttgaattttatatgaaagagacaaacttctcttgtgtttatgccattacacattttggggttagttaaacccatacccgcactgatccatggtctgaagcaggtcattggtcgggggcttgggaccccacaggctgtgggctagaaagccagccagggacgtggggaagagaagctgtgttgagtaggcatgattggagcaggtttggggttacctccatgtgttccagcctcggcggcgggcccgaagcccacgcatggctgcaaggcctgtgcctgggctggctgtcctcgccctgggcttccagtttctcagccaagactgaatgtagcagatgcccacggggccttgccagctcccagatggggcctcattttctttaagctcagatgccaggcctgccaggctatgtgactgcaggcactgggtctgcagcatgttaggaacgccttggccgctgtggtgcccagagcattttctggagccctacaggctgcagtgagtgagggcctcatctgctgtgtgacctattaatgggtcaggctcaggtgtccatgtctggcccacagctctctaggtggcctggctttggaaaggtctaatgccctcctctgacctgtgtctgagtcatcctaagcatggatgctttcaccttttttgaaagccactcttctacttaggtgtgagtgcgtgtgtgcatgggcatgcactggtgtgtgtgcacgcgtgtgtatgcatgtgtgtgtgcacgtgtgcgtg

SEQ ID NO: 1885641 - DNA, 4001 bp, Homo sapiens
ctctgattagttgggcatctgatttgtccttgagaccctgatactgccacttcacaagatcctaaactactgcctttactccccacactccccttccaccaccaggttctgatctccacggtcccagctactgactggacgccatcacaaccttaccaatcttcagaatacactcctttccatccgacgaaatgatagaaccctctgaagactcatttgagacgatgatggagcataagaatccatcatcaaaacaaatggagtcctccgagggctcatccaacaccaccgaggcgacgtcgggcagtggagtgcggggagaggcagggccagccagcggcccagcccaggaaaagaaggagccccccagtggcccactccaggaaatggaagagctgcccactgatctactccaagacatggaggagccatccagtggcccacgtaaggaaatagaggatccacccaatgacctactccaagacctggaggagtcatgcaacggttcacaccaggcaaggggggatccactcagtggagcatctgataggatgaaagaagcatcagtcaacccatcgggagcccgagaagaacaagaggctcacactgacctgaaggaatcgggaagggaggagactcctcaagagcaaaaccagaccgagcactcaaccgcagaacttatggccatggtgaggtccatcatctcgctgtacttccgaatgcaagacctcaaagagcaacagagagtagcagaagagatcttgatcaaagggatcaatgcaggccaactgcccgccccaaagcacttctctggcgatcgcagagaattccacgagttcatcgtactctgccaactgaccttacagagctacccaagaatgttctataacgaccgtctgagagttggctatgtcatcaatcacctgtccggcttggcattagaatgggccaaagctctactgcaggaaaacagccccctgatcggagacttcccagccttcctggaggccatgtccgaagtgtttgagtaccgccaggcactgcgtgtggcagaagaggccatgttcaccatcaggcagggcggccgctctgccactgagtacatcgatgagttccagagcctggtacccatcttgggctggccagatgaagtcctgcaggcccacttgtgccaggggctcaacgaggagatcaggcactatctattccgggtccctcagccggattccctagacagtctgattgtgctcatcctgcaaatagaagagaagctggcagagagaagagctatgctcaggctgccccccgaggcccgcccccggaacctgacctggatcgactcacctgctccagagaggtggatggtcagcagctggttgcccagcgaagtccatccggacatcaatcgcgcccacctcttcctgctgctcatggtgagagtgaacccctaccacagcgtcgcggtccaggccctggtggattcgggagctgacggcaacttcatggatgagaagttcgcccaagagcactacgtcgagctctacgagaagccgtacccacagccggtccaatccgtggacggctcgctgattggcaacgagcctgtctggctctacacggagcccctggtgtgtatccaccagaaccaccaggagtccatcgaatttgacatcgtaccttcaccgaacttctctgtggtcctaggcatccgctggctccgagtccacgcccccgaagtcgactggatcaaaggccgctgcaccttccactctccctactgcctgaagaactgcttccgcccgcccccgccatgcattgccctagagaggcacggcatgagcctgctacccggactgccacacccatactcagacctggccgacgtgtttaacccgaaggaagcagatgatgagacttccgaccagccaagctcagacggatccgatgatctttctgaatcagagccctctgagcttcagcaggctggagacagtgatcacagcgagaccttttacgagtgtccctccaccgcgccttgggaacctgtgggtgccaggatgcaagaaagagccaggctacaggaggaatactgggacctgcaggacatgctgaccaacagacaggactacatacagatgattccggaactgtttgaccagttacacggagccgagtggttcacaaaactggagctgcgtgggaccattgtggaggaaagcgtgaacgggcaccgcaccgaagatgtgtggaaagcagcgtttggtttggagcttgaagagatgaagagctaccagccgtttgcgctctccccagaccctatcatacctcagaacgtgattcacttcatcctaaaggacatgctagggttctttgtgctttcttatggccaggaagtcctgatctactcaatgagtcaggaggagcacctccaccacgtccgccaagtcctggtccgcttccgccatcacaacgtctactgctccctggacaagagccagttccaccgccaaaccgtggaattcctgggcttcgtcgtcacccccaaaggggtgaaactgaacaagaacgtcatgaccatcataacagggtaccctacccctggctccaagctatctctgcgaaacttcatcgaattcgtcttcccctaccgccacttcgtggagcgcttcagcatcatcgcagagcccctggtgcggcagctgctgagctcctaccagttctactggggagtcgaggagcaagaggccttcgagtgcctgaagagggctttccgcaaggcgcctctcctccaccaccccaagccccagaacccattctacttggaaaccggcgtcaccggcacggccctgcacgcctccctgatccaaatcgacgaccaaaccggcaagagagcctgctgcgctttctactcccgcaacatctcccctatcgaggttgagtactctcaagcggagatgaagattcttccaatacgggctgccttcatggtgtggtgccgctacctggagaacaccgaggagcccatcatgatccttctcaacacagaggatctagcctctctgaataatgacaggctcaccgtacttctccccgggcattgggtcttcttcttctcccacttcaactttgacgtcatggagctgccagaacaagacggcggccgagctctgccacctgtgagaaacctccggtggaggagagccttccagaggaacactgccgccaggcaaaccctgctgctggcctcaaggggattccccagggatccatcgacggaatccggggaagaagagaatgaagaacaggatgagctcaatgaacagatcctacggcaagagctgctggccatgatacccatcgaccagatcctcaacagcttcctcgcccacttcagcatggcccagatcagggccgtcattctgcacttcttccgaggcctcctgtactggaagaacaccctagccctggcagccatcctcgtgctactgcgcgtgaggcaatgcctctcgctgcggccggcacccgccatgcgggtggctcggccccagccccagcgctccctacgactcatcctggattcgtccctcatcgcaggcagcagcatcacgacagccatcacccagctgctcacccagatgcccgctctcgtaggtgcaaacaccatcccagcccaggagctggctgagctgttcctgggccctggccgctggcagcgaaatgctctgcactcccaggcccaccgaggcctgcagttcacccctggcttctggctgacgctgtgtgagttcttcggtgtcagagtcaccccccaggagggccacctccctgccctgcgtcagaaccgctacctggagctgcacgtcgttggtgatgaggatgtcgtcttgcgagaagccctgcaagacgacctgcaacgttaccgtcagtgtggcctgcatgacggcctgcaagacacctcgcaggacaagcaggacaacgacgtgcaggaggccccacccagc

SEQ ID NO: 1885642 - DNA, 4001 bp, Homo sapiens
tgtggtgagtcacccttccagtgagtccccaagaatgctgaaatcaacgccccttccctgaatttgtcaacatgtctaagaagtccttcctccatggtaagatttaatagtgaaagagaagagaactatacattgtttttctttaaaaaaaaacacaaaaccccagaagcatcatgggcaccaccacttcctcagtcacagaggggtcttgagcacagatcacatgcttcttccccaggaatgcactggctgaggattaggagtgctagcagcacctacccattggttccagggccacacacatgttcagttgcactggtgtggaaccaacatgagtatggtgtcccctaaatcggcatcaggtccaagaagacacctggtgagatctgataccgaaaagaggtcgaccgtgtattgggcatcattaaataatgcgaactcaccacggacaacctccctccgagtaccatgaggtggcactgctcgcagcattcctgcatcttctgcacagcctgggcagcttgggagtggcctctgagggtggatgggaccctgaggatgagtggaccaggtggctcaaacccatgctctccggccaaccccaggttcaccaagccaggattagtgtgcacagaaataccacttcttgtgctcagctggccatgcaggcaacatttaataatgcaaggatgtcagtggcacaggagtcattaaatatgaagcaaaccacacacaaatgtgtgtgcaaaagcaggctaagcactgcctccttggtaaacctgggattcccttacaggaattctctggagggtgtaaggctgctgtgggttagtaaaccaggggtcgcacagagtcctgttcctgttttcttctgtatcccgacggctgactaataaaagatgcttctagatgcccaagattcaactccaaggttgaatttgataggaataaaaaaagaagtcagccatgtgtatttcaatcttaacttttaaaaaattagggcatcccaacaacctctctcgattttcctaaagttggtagtgccccaggaagttgttttagggtcagcttggactctaaagttagtaggtcagttacatgcatcctcaggaaaatgcttgccatggggtcagccatccagaaacctaccttggaagcagcactggctcaggaagccctccgaggcagaatttgacactaaaagagaggagagccgtgtatgactcgctttgatgaatcgaattcatcacggccagcctctctccaagtaccacacatgaacactggtgagaaatccattgcctctctggcagaggtggccgcccttctcgggagtcctgttaggaatgggtgggatagtattgggtagtgggccgagccgagtgacatacacccacattaagtgcatgctcacccgaggcgcacttaccttaagggagtgctgagggcactgccttctccccagcagcaaggatgcagttcgtccttccagacaagacagggagcttttgcgtagctcactggtccctgacaggagaatcatggccgcttcccaaagccgcattatctccatggagcctcctagggagagacaggatgctgggtattagaggacgacgtgacagacctaacaaaggcagcacatgctctgggaagaaggattcagtcacacacccaggagaaaagctggcccacatcaggtccctcaacagaagacaacatggcgtcccacatcggaagtcaacacttcaaggaggctgtcacagtggtgaaggggctgccaaggctgactcattgcattttaagtaaacatacacccccaagagcacgtgtcatcgcagtccaccaagcagtcacagcaagtccatggccgcttccccagagttggtgggagctctggaaagtcttcctggagtgggagtgatgctgagggttggtgactaggtggcccacagggtgaacacagtgcatgcccctctggtcaaccagtcacacaccctggacggtgctgacaccaacatctcttctggaagtcggcctggggcccagggagcctctcttcaaagtcttgtgaggtgacgctggtgacagaaccacagctgattccccagagttggtgagacccatgggaagacctcctataggtgcatgggaggctcggattatcgggccaggtgacttacagctaggtcagcgcattgtccatggcccgccatccattcttggcttttccacatggttgacacaaagactatctttcctgaagctgccattgtgtccaggaagtccttagaggtagcatttggtactgaaaaaagtgttgtccgtgaatgattcgtcataagtaaagcgaatccaccacgaacaacttctcttcaagtaccacagaaaagcagagacaagacagacaaggagtccccttccacttctccaaggggagtggctgccaaccaccatcctgtggacagagtggacaccgagcattagtgaggcagcttacgggtgtcctaggaacacactggagtttgggcaacccttcactcacctcccttggagtggtgctggcacagtcccccttccctggagttgaaattgtggtcctgaatccacacgcacaaggtttagaaataagaagagggaagccacttgtcacacgccaggagcactccgcagtgtgtagaccccagggtttctgaacagggccttggacttctcaacagagcacactgagttatccatcaagcacatcaaggtgccagccaggctcccgcagggcccactgaactagggaggtccagagggggcccccttttgccactgcaggtgcccctagagaaactgcccagctcaggcacgccaggctcctggtaggttccccatcactgccctgggtagattctctatcaatgcccttgtggtcagagtgatctttccaacacagaccacgcatcccccctgctcacaacccttccaaatcccccatctcactcagaataaaacctggagtcctgcctctcccagctcagacccagcgactcccagcagctcggttcaatcccactggccttcttgctttttcttaaagatgccagggggctttccatgggccttgccctcctcctgaaatgctcctaccccagaccttcctctggtccaccccactccattcccacccacatcctcagagagagctttccagacccctgtatttaacacaaaggtccacctgcttttacctctttctgtcactgtaacccgctttccctttccccataaaacctagcagtggacaaaattacgcttcctaattcatgtgttctcatccgtctcttccaccagaatgtaaagtccacatgagcaagaacttgatttcattcactgctctctgctaaggtccagaatcacctagaacacagtgtgcactccatcactatttatggaatgaccaagtcattccttgttatttgatcaactcatgaaccatgtagttatgctataaacaaaagaatctgatttttttaaaaagagagaactttatcgaaacaaaatcatggtggccaaagtcaccaaccctctcaatagccattatggccatgggcaggacacagctctggcaggagagtgagctcagggagacgcctcagaaacaaagctcagactgctcaactaactctccacaaactccaacagatgtggatgccaagtctccccagagggcggtgctgcttccagaaacccttccctggcaagatttggcactcaaaaattctgccctggaacaaaagcaataatgatgaccaattacctatcagtcagtccggctgatgacagtaacactaccgagccagcatgtctccagagattcatcttaccaagggtgagggtcacttggagcaggtgacagacgtcttgtgtgaatgggcctctcactggtcaacttcccccaataatgtagtgcagacaccaaagccccttccagaaaatcacagccttagaagtaa

SEQ ID NO: 1885643 - DNA, 4001 bp, Homo sapiens
tatattagaggtttggaattttacagtaataatgcatatctcagaggacttttatggagaggaaatgagttaatttctgcaatgtgctatgtacatcatgatgatgatgatgatgattcttataattcctataccatgctgatttgtatactgtgctttaaaaaaatgtgatctctaccttgaggaatgacaaaataagaattttatattatattaaggcccttacattttaaccagagaatagttttggtgagtttacatgtcagatatgtttacgctagaaggtttggatttaatattgcagacagtaaataaacagtggaaggctttaatcagagagactgcatgatcaaatttaagtgtcatgctaacaagggtgtacttaattttgagaaacagcagatctgaattttgtatcctgttggaaagcttggattttagccaatgagtttcacgtaagggggaacgcagtttttttttttttttttacggatgggtccagtggcttagaagaaaactcagaagtaacaaaaggtgttaaatttataaagagcagtagctttacagttaatctatcagataatcaaagcttaatttgctctgccccagcagagaagaaatgtgcaaataaccccaaccaagacattccctttcaattctgtctcagcccactaaaaccacccaacactagatttccaaaaatccactctgggaccgtcagattccaaagatgtcacatgttccccccaacccccacactcaatgtcccaactctgccagatacatgtctgttgggagggctcaaccagcaacagagagaaaaagatatttgctagaaagaggagaccagacccactggcgttaagaaggggacctgggaggataagattggagaggcgtgcagatatgcttgcactggtgaaattgaggccagatgtgtgaagttccagaagcctcacaaagagggcagtcctgggagagtggagattgtaggaagagaaggagattatttgaagatctcctcaacagctcagaggtcgggagaacatagcattggaaggagaccaaatcgagaaagagaaattggccaaaagtctgagttagaatcaagtaacaaatatgcagttatccagcacatagtaggtatgttataaaatttatggaaaaaaaaaaaaaaaacccagacctgtacacaccccctgaaatttctattttgaacatggggaaggaaataagaactattttgggctgctgacccaactgacgggacagtggccaagtgcccattttctcctcttccactgcactggtgaaacagtaggcatctttgctagagattcccgctccacaaccaaggtggctgggcttgctccagagccctgagcctgccaggggtggctttggatggtgctgagatgtgacctctgtgattctcaggtgaccaaagcaggaaaagaggattgaccaggtgcatgtgccaggggggaatggagcagcctgtgcaccctgccaggtacccgcctgccacggtggctgctcccagccacagaatttatgggctgtgaatttctcacatctatggaggaaaaggacaggacaggcagactgaataagcctgggaggcaggtcaggggttgacagatcttccctccctgggggcaccccaagtgaccagccaaagaggctggctcgatacaagaaggctttcccccatttctctctgctctgattagttgggcatctgatttgtccttgagaccctgatactgccacttcacaagatcctaaactactgcctttactccccacactccccttccaccaccaggttctgatctccacggtcccagctactgactggacgccatcacaaccttaccaatcttcagaatacactcctttccatccgacgaaatgatagaaccctctgaagactcatttgagacgatgatggagcataagaatccatcatcaaaacaaatggagtcctccgagggctcatccaacaccaccgaggcgacgtcgggcagtggagtgcggggagaggcagggccagccagcggcccagcccaggaaaagaaggagccccccagtggcccactccaggaaatggaagagctgcccactgatctactccaagacatggaggagccatccagtggcccacgtaaggaaatagaggatccacccaatgacctactccaagacctggaggagtcatgcaacggttcacaccaggcaaggggggatccactcagtggagcatctgataggatgaaagaagcatcagtcaacccatcgggagcccgagaagaacaagaggctcacactgacctgaaggaatcgggaagggaggagactcctcaagagcaaaaccagaccgagcactcaaccgcagaacttatggccatggtgaggtccatcatctcgctgtacttccgaatgcaagacctcaaagagcaacagagagtagcagaagagatcttgatcaaagggatcaatgcaggccaactgcccgccccaaagcacttctctggcgatcgcagagaattccacgagttcatcgtactctgccaactgaccttacagagctacccaagaatgttctataacgaccgtctgagagttggctatgtcatcaatcacctgtccggcttggcattagaatgggccaaagctctactgcaggaaaacagccccctgatcggagacttcccagccttcctggaggccatgtccgaagtgtttgagtaccgccaggcactgcgtgtggcagaagaggccatgttcaccatcaggcagggcggccgctctgccactgagtacatcgatgagttccagagcctggtacccatcttgggctggccagatgaagtcctgcaggcccacttgtgccaggggctcaacgaggagatcaggcactatctattccgggtccctcagccggattccctagacagtctgattgtgctcatcctgcaaatagaagagaagctggcagagagaagagctatgctcaggctgccccccgaggcccgcccccggaacctgacctggatcgactcacctgctccagagaggtggatggtcagcagctggttgcccagcgaagtccatccggacatcaatcgcgcccacctcttcctgctgctcatggtgagagtgaacccctaccacagcgtcgcggtccaggccctggtggattcgggagctgacggcaacttcatggatgagaagttcgcccaagagcactacgtcgagctctacgagaagccgtacccacagccggtccaatccgtggacggctcgctgattggcaacgagcctgtctggctctacacggagcccctggtgtgtatccaccagaaccaccaggagtccatcgaatttgacatcgtaccttcaccgaacttctctgtggtcctaggcatccgctggctccgagtccacgcccccgaagtcgactggatcaaaggccgctgcaccttccactctccctactgcctgaagaactgcttccgcccgcccccgccatgcattgccctagagaggcacggcatgagcctgctacccggactgccacacccatactcagacctggccgacgtgtttaacccgaaggaagcagatgatgagacttccgaccagccaagctcagacggatccgatgatctttctgaatcagagccctctgagcttcagcaggctggagacagtgatcacagcgagaccttttacgagtgtccctccaccgcgccttgggaacctgtgggtgccaggatgcaagaaagagccaggctacaggaggaatactgggacctgcaggacatgctgaccaacagacaggactacatacagatgattccggaactgtttgaccagttacacggagccgagtggttcacaaaactggagctgcgtgggaccattgtggaggaaagcgtgaacgggcaccgcaccgaagatgtgtggaaagcagcgtttggtttggagcttgaaga

SEQ ID NO: 1885644 - DNA, 4001 bp, Homo sapiens
acgcccaacgttcctccactagcattccctcatgaaagatcactttttccaggccaaggaccagaaaaggaccaggctttaggaagagggccgaggtgcatggaaagcagtgctggtgaggagagggttgagtaactggattttgactgtttcttcgcatttggttctcactaatgaaatcttgtcagacgtgcccctgctgctggattgggtgggggtgggacagaagcatgtgtggtcaaaggcaagtttatttgcagtttgggggttgaatgcagtggatttcaaactggatattttgaggagttccaggggtccaccaaggtataccagggtcctcgccctgatgcaaccagagtagttcttcatcgactttatacagtgggactctgaagaaaagaaaaaggaaaaccccatagcttagtgggaatccgggcgaattaaaacacaggatgaagtgcttgttctctttggctcttggagcataatgtatgtccttttcctacttggtttgcgtgtaataacatcattggtatatttcaaaatatgaagctcctggtgctggataataaatgttttcccagtttttcaacctcttatgtccttcattgatgcccagtggcccaggggctgcaccttcagcacagtgttgagaaagagccccggaaagggacttacaggcagaccttcccgggaagagtcaggcccagctccatgtgctctttggaggggagtggaaggttgttaaacctcatagctcttggaggtggggctgaattttgcttcttgtaaacctctttccattggaaattacctctttctcccctaaagagaaggaagtactggactgtcttcatctccctggctgccgaggccatttgacaccttgtgccacctgagagaaagcaggcccagcatggccctgcctgaggggaacaggacggcaagcccctggcctcctgcctgctcccagctgccctctggcggccactttctgaaagccggatatgtctctttgctgacccacccctgttctcaccccagggctccagatgttgtatcaggcagggcctttgtacgcctccatgccaacagctacccaagtcgcaccgtcagtcacactcttactcaggctctcctgtgcccctggcccttcttcccctctcacttttccccacacttctaaaatctcactcgtcctgtcagaatgtggctccacagatggagcctttcccagccgccccgctccctgtgactttgcactccctcctgcactcccacggggctttatttttgcctctgtcctaacagtcagctgccacttggcctgtcctgctattcccactgcatgaatctagtcaggttggaaattcagaaagtggcctctttgtctctggaccccaaaaacccacacatcgtctgccttataagctctcagtatatccatccctggctgcaggaacacaccaggacccagaggctgccgtgcctggagccctgtctcctgactcagcccaggccccagctcagcatcgaggtcctgtgggaccatgtccagcagtgaaggctgtgcattggcctgagcccctggtccctctgactcactggctcccattttcaccacctgcactgcatattctcaccgtctctcccctgacactctctcccctgaagtgttgtaatggggttgtaacccatccaccttctcttgtccttcttcagtctgtcctccctgggctgcgtctaaaggggccccgcccctgccctcatgcatgttctctccatactcctggtcaccttctgctcatcctttgccctgctgttgtgaagccttcccagtgccccagaagacctcaggcaccccttcccagtcctcgcacactgttggtgtcccatttgtttggaccctgggtttgtttgtctagactgtgagctcctcgagggcaggtgtctgtttctgtgtctcgggagccctgaagagagactgacacatcagaggtgtctggtgactgaacaagctcccagcttgcgcccatgtcatattgtgtgcctctcatagcctggcacttcctgccattgcatccttctctgcagactaagatggagttcctgaaccaagaccgcttgctggccaacctgtgaaactgggctcaaggtgaggggtgctatctgtgattgagggacatggttaatggaattgtctcacacagaaatcgcacccgtcaccttggcctacttatcaccaccccaaacagaggaacacgccttctccagccacagcctatggaagggccttcagctgctgtggccccgaggtgtgcatactgtggaaggaacttcggacgtgaactcggatctggttccagtaccagctgtgccaggagtgtgcccttgggcatgtcactgacctaagactcagtttcgccatctgtgaaatggctgaatcagactcacctcacagggttgttgtgagggtaccatgagatgatgtttgtaaacattctttgtcacctctaaattactataacagtttgaagttactctttttaaaaaaattatttgcaaaggtaactaacaatatcagccgtgcacagtggctcatgcctgtaatcccagcactttaggaggtcaggggatcacttcagtgtgagagttcgagacctgcctggtcaacatagcaagacccttgtctctacaaaagcattaaaaattagctaagtgtgatggcgtgtgcctgtggtcccagctactcaggaggctggggtagcagaattgcttgagccctggagtctgaggctgcagtgagccatggttacaccactgcacttcagcctgggcaacagagcaagacgctgtctcaggaaaaaaaaaaaaaggtaactaacaatatcaactcctgtgtggtgccagcagccatcacgttgggacacagagggaagccaggcttcttggatcctgatggtcagagaacactttctgagggaagcggggcttgaacctgggccctgcagggctgggggtgaatggggggatctgatgaggaggaggacggcggcaccagcagatcttggtggtttggaagttcaaatcaagatctgagaagaggctctgtctgaccctgggggtctccctcggcacattggtagtactgtgcatgcctcacgggtgcccctaatttcagagcatcccacctgcatcctgctgctgccattgtcctcctcaaaagagctgctggcttattgcagtttacatcctagagaagagaggtctcctccttccaccagtcccaggattatctccctaacgctaatggcgagattcctttggagttttagtcttctgtagatacagcccaggcgccatgtgcccagtcagggtttgagataggtggtggttcattccccagccttgcctcaccagcaccttcctgacgcctcctggtagggctcaggaagcagccagctgaggtgtgcctgccatggtcagcacagtggttgacagaagtggcacagattgtgggggcaggtgacagggtaccatgccctagctccaggcacccgctccaccctgtcacatggagcagctgtgaaaccttgagcaagccatttcaccattctaagccttagtgtcctcatttttttttttttttttttttttttgtgatagagtctagctcttgttgcccaggccggagtgcagtggtgcaaactcagctcactgcaacctctgcctcccaggttcaagcgattctcctgcctcagcctcccaagtagctgggactacaggcatgcgccaccacgcccggctaatttttgtatttttagtagagacagggtttcaccatgttggccaggctggtcttgaactcctgacctctggtgatccacccacctcggcctcccaaagtgctgggattacaggtgtgagccaccgtgcccggccagtttccttgtctttaaaatgggtgtgacaaccacctcacagagttgtcatgaggctca

SEQ ID NO: 1885645 - DNA, 4001 bp, Homo sapiens
agaggggctggaacaccaaggtccacctccagagccggtatctcctctggaagtctctgaagcaggatttcacacagagaagggggctgccaatgaaccatgtgaccgtgttcagtccagcctacaggggtttgagggaggacccgacctgaaggctggcgactcctcgtccagcgcagcatcctcagagggtgggtggggctgcgtcacagggacagcacaggctcaggtgactgtactccatgcactccattccaggaggcctcaaagagagttcaaccaagaaaacaggtcacgctgcctattcattcattcagcatcacacctactgtgcacatctggcgacacagcaccaggcaaaacagacaaggactctgccctcagggagcttccattctagtggcgagaggacaatgagtgcagatgacataacattcatataatgaccatcctcagaaacaatgcttatcctacagccacgtgccagacgctgtctagacacttcacaaagagcacgtttccactccgctgttaaccctgctttacagaggaagagactgaggcccagagagctgataggtgaagggattttccaagggcacacagctggcaacataaggtagtaataaatgctattaacaattctcgtcttgcagtaggaataaccgagtcgtgccatggaaatgtgtctttaaacaacattaattctcactgctgaggaaacccccttcaccccttgcttcccagaggtcacccagaagataaggtatttgagggcgtaatgtggatgtcttccattcagccaggagttcctttccctaaagtgtgccacacagccaagatgatttcacacctaaaaaggttgactaaatgtggtttattcactgacgagtcttcaaggatgcgactagaagaccaccatgtcaactaaaacgtcagcatcatttcggggaattcctcctaatgatggccgggatatgagccaagtgatgtaagtcacacagagagcacctgtcatgcggaggtgatccacttccttaccctgcgcaggtgccggctgggctttcccctcgtgacgtttcccaagaagaattgagtaccgaaaggagattggccatgtaatactcatcataaataaaatgaacacaccatggacaacctccattcgagtacctgacttgggtgctcgcttccagcgcgtcccagcagcaggcctgaggacggacgggatactgagagtcaggaaggtggcaacacaccacccacgaaataagctctgcggtccgggccgcactccatcccttacttgcaattagcacctcttgcaggaagccattcagggagggaagtgccacagcagagaggtctgcagagcaccatctgtgatacatgaagagagggcagcagggaagacagcaagacggtgtcttgtcaaacatgcagtgagccgatgagggaactgccgcctctttcgaggaaactgccatggtaagcaagcaggacgcctgcaggtgcacgacccaccaagaagagtgtgcacactgtcagcttcgccgtgcgttcaggcattcagacaccagttctagttcctaaactcggcaccacccgagggtgctttaaggctagatttaatgctttcaaaagagtccactatgtaggattggtcaaaaaataaatcgaatgcatcatggaagacctctccaccagtaccacagagtagctctgataggaaaagctccacttcttccccaaaggtggcaccatctctagaaacctccccaaggacggggcacacacagggttagggccagggcacactgctgggtcggctatggtcaatggtccccttccttaccctggagaggagctgacaccctgaagtaagactccgctccaggaagccctccaaggcgggatttggtactgaaaaataggtcaaccgtgtatgattcgtcacaaataaagcgaaggcaacacggataacctatcttcaagtaccacacgctagcgcagacccaatgtcaatgcctgttctccaaagttggcctcctccaggaagtccccctaggagacagtgaacattgacggttagcagacggactgcaagagggttgagaagaaagcacacgccctgtattcaaccattccatcccggaccctgcagccatccagacctcaatgcctttgccaaggtgggtgcatgtctaaaggagcactgccagggaacctgatggtggagaggccaagtgcacagaaactcagcatttggatcagagcagggcacattccctcatctcacattagcatcgaggctgacagtaatgatcctttccttacacaggccttgtgtccaggaaccctccaaagctgagtccatgacaaagagactgactttacaatattgatcatacagaaacaaacagcattgaatgcaaactttattagaccatggcatggcactgacctcagaatcatggcctcatccccaaaggtgagcataatttccaggaagtcttcctaaggatagattgcatgcttggggttaatggtacttcatatatggtttttcaaactcttccattgttagcagaaaattcacatacctggccagtggtgctgactcccacgaccatctcagaagtggcattgccataaggcatcctgccagggtggaaggtgacactgaggagggggcatctgggtaggattgttttaaatagacaaatgcacagtgcaaatgacaacagactgacgtgcagacagatggcagcaaggggccagatgacagactttcttctcctccagtacacaatgaaatgaacaaaacagattatttcaccaaagaaaaaaccaacacctggagtagaaaagtgctcataaaatgaataaatccttgaaacaaaggaacgattaaatctactcatcaagaaggcatattatgattcagaaaaactaatgaataaaaatagtgactgagtcataacccggtaaagtcaccaacgttcaagactaaagaaagaatcaggaaatctaagcaggaaaaaaaaaaagttcatccatccaagggaaagcagctgtccccaggcttgtccacagcaatggtttaacaccagaaagcaatggaggcaagtttacaaagttcagagggaagaaactgggagccaagaatgtcatgccaagttcacccatcattcagctcaaaggctccatcccagcaacaagcactgatagggaaccctctcctccacaaacattgagaagtgttggataaaatgcaacagcaggcaaaatcaattcccaaataaacatacagctgaaaggcaaaaccctcaggtgttaatgaaaagaattagttcatgcaacctgccactaagggatctaagggatgctgtgctggctagaggctccaagggtctacagtcaagttcaagtacaagcaggatgaaaagacatgaccgtgcatccaggagaagttgatctgggaatggaaaggggaaccagaaaattttataatggccagggataagagaatttgtcatttttagggagtggatagaatgaggtctcctgtgagataccaaaggttcaggacaaagatatggtgaggacttctgccagccatatgtctgggaatccttaagccaacaaaatgagttgaaaaactggtaccaactggtaaattccttggggtaccaggcagaaccaaatgcaaactcatgtgcatagggattgaaacaaaacagaaacacctaagtgctcaactgatgataacctcacaacacaaagctacaaaaaccatgaagaaaagcaccatcatgagagtcaatagattcaacaaagaaaggggcttgtatccctaaagctgaaagaaattatacaataaatatctttaaagtgactaaagaaattttaaaaacttgaaatcataaaggccaaatagaacagaatgaaaaaaaaatggacagatgggaaaaggtgtaagagcaatggtcagacattct

SEQ ID NO: 1885646 - DNA, 4001 bp, Homo sapiens
ggtccccagggccagcctacaggctccagcgggaatgagtgggagccagccaagggagcagtgttgtggtgagtggggggagtgggagcaggctggagcccctgaaagtggggcccctgggagccaagccctttccccagcctggctccttgaggcagtgcagctcaaacccgagggagggggtctggcccagtggcccaggggaggtcactgcaacgagaaagctggtggcagaggctgggggcttccctggagaccaaagtgccagaggcagagttgagggagggtcttgggtaaggaccaggccactgcccctccaccaaccatcctcatttctgcttctctgagattagaaggaaaaggctggcttgctttcaagggagaaaccacgctgaggcctgggggaaaaggacaagcaccccagggacacagcgatgctttggaacatgtttattgtcatcagtctaaattgtacagacgcacaccggacagaatgcctccaagccgcagaacagggacacagccgccatctcccacctgagcctcagcccctctcacggggctgctgagggctgagggcccatgcagagggcacgggggaacgtgcttgtaaaatgaaatggctacagggggctgcggtggtcagcaggcagcagctggggaagacactccaacccctccgatgccacagacccactgggcgctcccacggccccaagctctgaagccagatcctgagaggtggccacaatggcatttgctgagcaacagaggaggcactggccagtggtggatgctctcccgggaactccactccccccacctgggtggccaggggaccttgctgtcctgctgctggccctcttctggaacagccctccacagtcacctcctgtctcctcacatcaaccccctatgtgtgcaggtcgggctcagagagggcaggtgactggcccaaggccaccctagcaggcctcaaacccaggcctgtctgacccatctcccaggactccccgcagctctctaaacactgggtgaggaggtggggactggagggggaccctccaccccagaggacacagcaggccaggcagcaccaggcagaagaccccggcccctggctggaggtggggacagattcgaccctttgctgagtccctcccagggccgcccggggcttcacacgcagattgacgcgcacacctctcctgtgggcgctagctaccacgaggttccagggaggctccggcgaaggcacctgtcatcatgggcgccgcttctcctctacctgggtgtagtctgcaaacttcctccccacccccagttcctgtgcctcgaggtccttcacgagtttagcgcgcactcgtaggagccgcgcagcgctccctaaggcctcagtgagtggagacgctccggggagccggcagcgggaaccatcggccgcccagcagggtgcggctgccggcagcctgatgggcagctcccaggaagcccagggcaaggagcgctcctcaaccctacgggcccaccgccagttcctcgctgggaattccacggagtttcgaggtgcgggccctcggggtgcaagagggcggcggcggcgtctccaggccggcagcgcgccaggagcgtgggcaacccagcgcgcccccacccagcggttcccacagcacagcccggccacgcccggccacctcccagcagcacttggctctccggccgagggtcttccctggcagcaggtggagccagccaggccctggggactgcggggcgcggcgcatggggcggccgacctggagcgcggagccggtccgtgggctcccctggattggtcgccggcgcacccctgactgtgactctgactccaggccgcgcgtgggacgctccgtcgctgtcgccgcgcccgccgggtctagtggtcctaaacatttcacaattgcgctacagaactgttgaactgttaagaaccactggacccagcgcgcgagtccccaacaccgtcggttcgccgagctgcggagagaggagcccccgacgcccttgggaccgcccgcgtcgcctgcggatcccggggaccggcccctgcgcccagatccccgctggtcgcgcaccccctgccctgctgcagccacccggccccgacgccgtaccggacgccttagacgccctcgcctggcgctgggggatcccagccgccaagcccagccccgccgcgtcctcgctggccccggcgtcccctcgtcccgcgggccccgcgtggcagggcggctgagctccgagcggcggtggccagcgcggcggcgccttttatgcggcgcagccgcccttcccggcgccggaatgtgcccgcgccgcgctggcccgaccggtttttccgggcggggcggctcccgggcccataggtcccgcgactgatcctccacggcccggggacctgctccgcgcgcccgcgcgggggtggccctgactcagcggccgccccgccccatccggcgccccagcctccagcgcctggcctgggcgcacctggcctcccgggttctgggtccccgccgggccacgcccgaaccgtctcgtctgggccgggggtgctcgggcgcacggagggcccggggctccaccttggccgggtcgaggcccagggtggccggaacaggtgaggaccagcgcccgacaggagcccagggccgcgctagctctccggtgggtgtgggggctgggctggacacacccaccccagcccctctcacttcaaagggaacttcgtgggagggggaaggggaggggtaaagagaaagtgaaactggagggagggaggtttctgcttctcagaccctgaacccccaccccgcagcccacaggggtagccccgtacctgcctcctcatttcccacgcggggggagggacgccctaccccctcacgcagcaagggcctgagcctcgctccccccactcacagcccagccccgaacgtcctggcgcagctggccctgccggtcctacccacttagtcacctggaggtgtccaggcctgaccagtggcgcctcccagggactctgcttcagcagaacatggcagctgaggggagggctcaggctctaggaaataccctagagcccccttcagcacttgccccaagtctggagccattagtgtgtctgtatggggttgggcagcagggtggtgaccattcattccagtgcagggcggtgacacgccatcccaccacccgcccagccagccaggagccaagtgctcaggagccaaggtgagccccagaccagaacacagccaccagatctgagggaccccccagacatttccacatgggccgcgtgtggctcaaccaccgcagccaccctggaaagggaatcagaaaggttttgttattttcattttgcagttggggaaactgaggctcagggagggacagtgacttctggggattgcacagctcttggtggtagagaagggatgacaggccttgccatcgctgcatctgtgggtctcagtgcctgggtgtggagtccgaggggctgcggcatgggggtggggatggaagtgggcataggggagcttgagatcaagaacaggagcttgggagctcctcccccaacacaactgcatgggcaagaagaacccacctctcttcttttctttttttttttctttttttttgagacctagtcttgctgtgttgcccaggctggagtgcagtggtgcgatcttggctcgctgcaacctccatcttcccagttcaagcgattctcccacctcagcctcccaagtagctgggaccacagacacaaaccaccacacctggctaatgtttttatttattttttaagagacagagtttcgccatgttggctgttctcaaactcctaggctcaagctatccacccgcctcggcctcccaaagtgctgggattgcaggtgtgagccaccaagcctggccaccactccttaattctaagttctggtctagcccagtcc

SEQ ID NO: 1885647 - DNA, 4001 bp, Homo sapiens
agcttgagcctaggagtttgagaacagccaacatggcgaaactctgtctcttaaaaaataaataaaaacattagccaggtgtggtggtttgtgtctgtggtcccagctacttgggaggctgaggtgggagaatcgcttgaactgggaagatggaggttgcagcgagccaagatcgcaccactgcactccagcctgggcaacacagcaagactaggtctcaaaaaaaaagaaaaaaaaaaagaaaagaagagaggtgggttcttcttgcccatgcagttgtgttgggggaggagctcccaagctcctgttcttgatctcaagctcccctatgcccacttccatccccacccccatgccgcagcccctcggactccacacccaggcactgagacccacagatgcagcgatggcaaggcctgtcatcccttctctaccaccaagagctgtgcaatccccagaagtcactgtccctccctgagcctcagtttccccaactgcaaaatgaaaataacaaaacctttctgattccctttccagggtggctgcggtggttgagccacacgcggcccatgtggaaatgtctggggggtccctcagatctggtggctgtgttctggtctggggctcaccttggctcctgagcacttggctcctggctggctgggcgggtggtgggatggcgtgtcaccgccctgcactggaatgaatggtcaccaccctgctgcccaaccccatacagacacactaatggctccagacttggggcaagtgctgaagggggctctagggtatttcctagagcctgagccctcccctcagctgccatgttctgctgaagcagagtccctgggaggcgccactggtcaggcctggacacctccaggtgactaagtgggtaggaccggcagggccagctgcgccaggacgttcggggctgggctgtgagtggggggagcgaggctcaggcccttgctgcgtgagggggtagggcgtccctccccccgcgtgggaaatgaggaggcaggtacggggctacccctgtgggctgcggggtgggggttcagggtctgagaagcagaaacctccctccctccagtttcactttctctttacccctccccttccccctcccacgaagttccctttgaagtgagaggggctggggtgggtgtgtccagcccagcccccacacccaccggagagctagcgcggccctgggctcctgtcgggcgctggtcctcacctgttccggccaccctgggcctcgacccggccaaggtggagccccgggccctccgtgcgcccgagcacccccggcccagacgagacggttcgggcgtggcccggcggggacccagaacccgggaggccaggtgcgcccaggccaggcgctggaggctggggcgccggatggggcggggcggccgctgagtcagggccacccccgcgcgggcgcgcggagcaggtccccgggccgtggaggatcagtcgcgggacctatgggcccgggagccgccccgcccggaaaaaccggtcgggccagcgcggcgcgggcacattccggcgccgggaagggcggctgcgccgcataaaaggcgccgccgcgctggccaccgccgctcggagctcagccgccctgccacgcggggcccgcgggacgaggggacgccggggccagcgaggacgcggcggggctgggcttggcggctgggatcccccagcgccaggcgagggcgtctaaggcgtccggtacggcgtcggggccgggtggctgcagcagggcagggggtgcgcgaccagcggggatctgggcgcaggggccggtccccgggatccgcaggcgacgcgggcggtcccaagggcgtcgggggctcctctctccgcagctcggcgaaccgacggtgttggggactcgcgcgctgggtccagtggttcttaacagttcaacagttctgtagcgcaattgtgaaatgtttaggaccactagacccggcgggcgcggcgacagcgacggagcgtcccacgcgcggcctggagtcagagtcacagtcaggggtgcgccggcgaccaatccaggggagcccacggaccggctccgcgctccaggtcggccgccccatgcgccgcgccccgcagtccccagggcctggctggctccacctgctgccagggaagaccctcggccggagagccaagtgctgctgggaggtggccgggcgtggccgggctgtgctgtgggaaccgctgggtgggggcgcgctgggttgcccacgctcctggcgcgctgccggcctggagacgccgccgccgccctcttgcaccccgagggcccgcacctcgaaactccgtggaattcccagcgaggaactggcggtgggcccgtagggttgaggagcgctccttgccctgggcttcctgggagctgcccatcaggctgccggcagccgcaccctgctgggcggccgatggttcccgctgccggctccccggagcgtctccactcactgaggccttagggagcgctgcgcggctcctacgagtgcgcgctaaactcgtgaaggacctcgaggcacaggaactgggggtggggaggaagtttgcagactacacccaggtagaggagaagcggcgcccatgatgacaggtgccttcgccggagcctccctggaacctcgtggtagctagcgcccacaggagaggtgtgcgcgtcaatctgcgtgtgaagccccgggcggccctgggagggactcagcaaagggtcgaatctgtccccacctccagccaggggccggggtcttctgcctggtgctgcctggcctgctgtgtcctctggggtggagggtccccctccagtccccacctcctcacccagtgtttagagagctgcggggagtcctgggagatgggtcagacaggcctgggtttgaggcctgctagggtggccttgggccagtcacctgccctctctgagcccgacctgcacacatagggggttgatgtgaggagacaggaggtgactgtggagggctgttccagaagagggccagcagcaggacagcaaggtcccctggccacccaggtggggggagtggagttcccgggagagcatccaccactggccagtgcctcctctgttgctcagcaaatgccattgtggccacctctcaggatctggcttcagagcttggggccgtgggagcgcccagtgggtctgtggcatcggaggggttggagtgtcttccccagctgctgcctgctgaccaccgcagccccctgtagccatttcattttacaagcacgttcccccgtgccctctgcatgggccctcagccctcagcagccccgtgagaggggctgaggctcaggtgggagatggcggctgtgtccctgttctgcggcttggaggcattctgtccggtgtgcgtctgtacaatttagactgatgacaataaacatgttccaaagcatcgctgtgtccctggggtgcttgtccttttcccccaggcctcagcgtggtttctcccttgaaagcaagccagccttttccttctaatctcagagaagcagaaatgaggatggttggtggaggggcagtggcctggtccttacccaagaccctccctcaactctgcctctggcactttggtctccagggaagcccccagcctctgccaccagctttctcgttgcagtgacctcccctgggccactgggccagaccccctccctcgggtttgagctgcactgcctcaaggagccaggctggggaaagggcttggctcccaggggccccactttcaggggctccagcctgctcccactccccccactcaccacaacactgctcccttggctggctcccactcattcccgctggagcctgtaggctggccctggggacctggccaggagaatgggcaaggtgggagggttgagggattgaagagacagaggcaccttcctccaccctccctgcctctggcacaggggaccgagagtct

SEQ ID NO: 1885648 - DNA, 4001 bp, Homo sapiens
agggttgagagggaggatgagaagatacacggtgtcagccaggactatcgcccagagaagaagagctgagaagagatggggaggtgggatctgcaccccatgcccaccacggtgctattggggagaaagtgctggactctctgggcttcccctgtcaagaaaagggtttggacctcacaattgccagaccctccagcactaacactgcataaattcctgacctgtctaaagtattatagaaaatggaggaatttttataaccacaaatacaaaattttatcttgttttccaggtccctcaccctttcctgagaaaagttagaagcccagaaaactcagggctattcccaggtgcttagaaatgaagagtaacaatagctaatatatattaagtgcttaaatgtgttacctcatttaatctttataataatcatgtgtaaaatcatatgaggtatgtacagttaattccattttacagatgagaaaactgaggcagagagagattaaagattttgcccaacgctgcagtgaaagtcctcaagctgtgttccaactcaggcctgtttgactctggaaccccacactcctacccactgtctaagtggttattattatggccagattccaacttttaaaacctggtgggaaacaaaacctttggcctctaatcagactgacattttcctttgtgcagaccttggctttggaggcagtcatgggtagtgaatagtgggtagataatgttgaacaaagaatatggaatgaatagattttgtcctggggtcagggtcacccccaggtgagggagaagtgggagacagcggcagaacagggatggggtgcagggagttctcggccctcacctctgcctcctccagggctgactgcagctccagcttctccacctccagctgtttgcggaccttctccagctcatgcacattctttcctccttctcctagctgctcagtaaggtccgagatttcctctggggaccagagggccagaaagctcaaagcctatgttccccctgcccctgcatggccctccctcccaccaactcatctctggcctcttggacccccagcacaccctgaaggttcttgttctcccgcttgaaggtctctaggtgctccagggactcctcgtaggcgttcttgagcttgaagagctctgtgctgagggagcgagcctccttctgtgaggactccagctcagactgcgactcctcatacttctgcttccactcggccaggatctgcccggggacaaggctcactcttcagccccccagccttagctccccagccctcctgcttcccagtgccccagcccccagcctcagccgcatgtccaagatctgtccctggtcccgagcctgggcttagccctcctcctccacctccaaggaggttgcctttggcctctcactgaacccctcatgcccccttgccctgcatgctggctgcggcccccgcccatggtccaccttgtcaaagtttctctgcttcttgtccagggctgcagcagcagcattggagcgctctacgtccaccatcaagtcctctatctcattctgtagccggtgcttggtcttctccagtgaggagcacttggcattaacagcctccacggcctcctcggcatcctgcagccgctgggccagcttctttctgcccaggtgagggtggagggtgtgtgtgtgactctactgggcaacactggagccttgggtggacctccttccaccccctccctatatctccttgagacaccgtaagtccagcctagcaggagctgagcctgctcatgcctggaacagagtccgccagcacgggctgcccaggcgtcctccctacctgcagtggcatctgggtgtcagtgccccctgccctcaccccccacacaggctgatcgacggtagctcctctgaccaacaagctttttgctcgtcttatacgtgagcatcaggtataacccgggccaaaagctcgcccgtcacaggaagtgggtcagggccagccagagttcacagagcaaagagttcaggctttcttccaagcacttctgttgccctccgagttcctcctgtctcttccacttccgtctcatgaccactttgcctgtccccaccccaggtcctctcgccccttcctctctgagagtcaggttaagggggtatctggagctcacttggcctcttcgagctcctcagtccgctgaatggcgtccgtctcatacttggtcctccactgggccacctccgagttggccttggacaggacgcgctgcagctcggccttggcctctgtctcctcctcgtactgctcccgcagcaggtcgcagtcatgccgggccgactgcagtgcatgggccagggcgttcttcgcctggggaggggggggggcaccaggaggtgggagggactccctgtgccccattctctagattctcttcttatgtagtacttcaaccaagcccagccttattcaccatgtgggctgatgtggcacctcactgtttgaggagtttcccagtctgctcaccccatccccttacgaataagaaaagaggcattaaatgacgcttagctgcagggcagaacctagactggagggtctttcccttgcagaggactctttccagctccaggctccatttctggcactgagatgaattgccccagggctgccatcaagcctgcccaccctccccactgggcctcaccttgccctcctcctccagctgccttttgaggtcctccatttgctgggtataagagagcttcccccgggtcagctgcgagattagcgcctccttttcctctagctgccgggccaactctcctggaggtgaaatgaggggcttgtgggccatttcacaagtcatgtcctgccctaggcagggggttggttaggggcacccaccattctcggtctgcagcttggctcgctgggtggtgaaatcattgagggagcgttgggcctcttctagcttcacgcggtactcattggcctggtcctccagcgtccgagacactttctccaggtttgccttcaggaagcaagacaggaagggtgagtgtgggaggggctgagtcgaccagaggaaggaagagagggtcagagatggggaatgccagagggcaggagggggacacagaaggtgtgggagggcgcagtctgaagagagacttgaattaaagaaaggaggaacatgaagagatagagagggtgaggagagccagagaggggcaggggagacaggaagagagaccaaagggtgatgaagagaatgagaatgacaagggagatggcagacagagagagaaggcatgggggaggctccgctgtgcaggggagagggcgaggggaggccgagcagagcctgccttggccttgatgatctgctccatgttggaggtgacgtcatccagctccagcttgaactcgctcttctccttctccagcttctgcttcacccgctgcaggttgtcgatctgctcgcccagctcggccacgctgtcggcgtgcttcttgcgcagggccgcggcagtggcctcgtgctgcagcgtggcctcctccaggtcccgccgcatcttctggaactcggcctcgcgcttcttgttcatctcgatctgcacggacgtggccccgccggcctcttccagccgctcgctgatctcctccagctcccgagacaggtctgagcgcagcttctccaccttagccctggcggtgcgctcggcctccagctcctcctccagctcctcgatgcgtgcctgggtcagacacaaagggctcagacccaccgcctggacccctccactggaatccccccggctctgaaaagctaccaggaacttaggttcctctcaagcagtggttctcaactaggggcaattttgtgccccagggaacagttggcaatgtctgattgtcatgtcttggtggggcttgctactggcatctagagggtaggggccagggatgctactaaaca

SEQ ID NO: 1885649 - DNA, 4001 bp, Homo sapiens
gtggctgagctggatctccatctcattgaggtctccttccatcttcttcttcaccctcagggcctcgttgcggctgcgtgtctctgcgtccagggaggtctgcagcgagtccaccacccgcaggtggttgcgcttggcctgttccatctcctcgtccttctctgccagcttccgctcgatctctgccttgatctggttgaactccagctgggcccggaggatcttgccctcctcgtgctccagggaggcctgggaaggggttgggggaggggatgcaggcagacagtcagggcacagggcagggtgggggcctgctcactaatcatggatacgaagtgacttcaagagtggtgtaagtggttcaaagaagcagaaggtggaggaaaagagaatctaagagaaaataaaaataagcctaagagaaagtgattcaggccctcacaggggagagccagctatgaagacaaggaggaaaatgaagagaaaagtgttgccaaggaaacagaggcaatcaggtatagagtataaaagaaaacagagggaggcagaggtgggaaccgggaggtatgtggaaatgggaagctcagctaagatgcaatgggtaaaatgtttatgtgaagagagttcagtgactggtcattcattcactccacaaatcttcactgaatgcctactatgtgccaggctctgtcctaggctctggggatgggacagtgaacaaaacggacaaagcgggggatgagaacagggaccaaaagcctggagctcagctccctgcaccccgtgccctgcacacacacacacctcggcctcctccagggctgactgcagctccatcttctcggcctccagctgctttcggaccttctccagctcatggatagtctttccgctggaacccaactgctcagtcaagtcggagatctcctctgtgtggggaacacggtaactcggttgagggctgctgaggtccagtggagttggagggacacgcctctttgcccagacgcctcttggagcccttgggtggcaccatatgggaacactgccagtgcagcccctccccagcctcttgggcccccagcacaccctgcaggtttttgttctcccgcttgaaggtctccagatgttccagggactcctcataggcgttcttgagtttgaagagctctgtgctgagggagcgagcctccttctgcgaggactccagctccgactgcgactcctcatacttctgcttccactcggccaggatctgcccggggacaaggctcactcttcagccccccagcctcagccccatgtccagggtctgtctcaggacctgcctgggctcagccctcctcccccacctccaaggaggatggctctggcctctcactgaacccctcatgcccccttgccctgcatgctggctgcggcccccacccagggcccaccttgtcgaagttcctctgcttcttgtccagggctgcagcagcagcattggagcgctctacgtccaccatcaagtcctcgatctcattctgtagccggtgcttggtcttctccagcgaggagcacttggcattaacagcctccacggcctcctcagcttcctgcagccgctgggccagcttcttcctgcccaggggagggtggcagagggtggggaggatggagggtgtggatggggacaagaggaaacaacatgaaccttctcaaagacaatccttgaaacctcagaagtgtagctggagaagcctgaggacaggtcccaggggccgagaacatcaggcagaggatcccagcagggcgtggagacccaggcaccctctgaccctggcccagcctctgcgctatggacattgaggaggtatgggcttctgcagccctccccactgcctttccctgccacagtgccctgccccagacggaagcactctgccctcagacaaaccttttgttcgtcttatattcggatcagaaacataattcgagcaaaaagcttccctgagaggagaaggaggtggggccggggcagagtcctcctgtgttgtcaaacactagctaagcatcgcctgtgtgggatctgctgaggctggggctgggctgagtcctgcctgcaaaggggcctcagccagaagtcaggctgctcagaactcacttggcctcctcgagctcctcagtccgctgaatggcgtccgtctcatacttggtcctccactgggccacctccgagttggccttggaaaggacgcgctgcagctcggccttggcctccgtctcctcctcgtactgctcccgcagcaggtcgcagtcatgccgggccgactgcagtgcgtgggccagggcgttcttcgcctggggaggggtgggcaccaggaggtgggttcagctttctccataaagcaaccccacccttgcccttctcctcaccccaatctcaacatcatcccttggcctcatctatgtccaaacccccagtggacctgtcatggtttactgtttgctgataacaaagaatgccaatacagcagtgaactatttaagaaaagcttcatggccattggccctgagctcctccccacaccagacatggtcatcatcaccgccattttacctggctggggagagggaaacaggctcagaaaggttaggggacttccctaacctaagatcactgagctataagaggcaggttagtatgaaccctggagttttttaaaaatcatgttctttctcctttttcatgagtccagcaaagtgctaggaataggctccagttgaatttctttctccagttttcaggtggccctgcaaatcccaggacccatttgtgcagtccctacatcccctagccgtgcccgggcaaggccatctcgtgcctccctagttcattttctctcctccttctcacaccctgcctcccgtccagggatgcagcagaagcagagggcctcagcctggggagtagatggcatgtggcagggtttgggctgtgatttctttttagaattcttggagaactgttggtccacagccagccttattgctgggaagggaagtgatttgatgcaaggctagtcagtgtgctccttgcttgggccaggtggcccgagtctagcccttaccttaacctcctcctccagctgcctcttgaggtcctccagctgctgggtgtaggtgagcttgcctcgggtcagctgggagatcagtgcctccttctcatccagctgccgggacagctcacctggggaagcaccattctagatcagcactcctctctatccccacctcctcctctagccctcaggccccattttctggagagactctgtgtctgtgtgtgcgtgtattggcttgtgcccgaggctggagtggctcaggaggttggggagactgtggtgggaaccatggagcccctgctctaggctcaccattctcggtttgcaacttggcccgctggctggtgaggtcgttgacagaacgctgggtctcctccgccttgctccggtgctcattcatctggtcttccaaggtccggcacatcttctccaggttagcctgagaagggaaggagagttatatgatggatgttgggggcggggggaatgaaggggtgtaagaggtgcaactgaaggagaaaagaagagggaaggtgtgaaaagaaggaggggatctgagaaccaggcagaggaagggaagtgggaaaatgaaccatgaaggaagagacactacatggacagaaaggggaggtgggaggaggaagttggaggaggggaggccgagcagagcctgccttggccttgatgatctgctccatgttggaggtgacgtcatccagctccagcttgaactcgctcttctccttctccagcttctgcttcacccgctgcaggttgtcgatctgctcgcccagctcggccacgctgtcggcgtgcttcttgcgcagggccgcggcagtggcctcgtgctgcagcgtggcctcctccaggtcccgccgcatcttctggaactcg

SEQ ID NO: 1885650 - DNA, 4001 bp, Homo sapiens
caacaagggagctgagctgcacacctactgtgttcaggctgcactctgcatgcctctgcttagatgttagatggctagcttgctcagcccaggccctgagagtgagtgaacgctctccctgggaagatgaaatgagaagtaagacgctgtcatttaaccacaagagagagcccgtggaggtttgggatgcccaggaagagctggcacctctcacttcggtgggagcatcaggaatctgggcccatatcccctcccgagagtctggccttatgtacatttcccagaaattctcactgtttatactgaggggcctccccggagcagaagtcattcaaatcctgttttcagctgtaagtcacttcctgcctagcttagggcacaggcatctcagagcattgaatgtatggccacgtggccaccccagagatccaagcaaaactgtctggttgcccagcctcagctgttcctgaaaggcttgagtgtgcaatcccggtcccctgctttggagttacacaaagggccctcccgtaagccctgaacagcaggcatgactcaggcccagacttagggctggtttccacagcccataccggggccctaatttggagaaatctgagtggacctaggctgaagatcccccctgaggaggtcaggaagtggccaggggaccttatataagctgacctctcccaccaggctgggcaggaggctagggtgagtgtaggggcaggaggtagagggaggaagatgaggggagaaggtgaacgggctaaggtctccagcgctccctggtgagacctctccaactcccgtttcggtaaccgcttctctggcaggggtttccgcaggcctgccatcctgaccaaaggggaagagcacgtccacctggaatgggaaggctccctcctgcccatcccagggccacagaaatgtggacctggaaggggtaagaaggcaggcgctagctccatctcccacatcccaatcatagcatctcaaattatacatgtagcatcatggggcttgtttagaacataaggtagtacttcctggagggaaaggcttgaaataagcaaccccaaatgaacaaggcaaagatgtaacaagggcctggaacctggcagccatgctgactctgcgtgtgccatgtcctccctggtgagtgattgggccaggagaaatgggggtcctaggcctatgggtcagacaccccaatgagaaactattttggctccaaggagcccctagccacacagctccagaaacctgggagacgcagggcagcccacggtcactccggcttcatcccaagtccttgtgtattctgtgaattgggagcctgaaggcacaagaaccatgggagggtatgcgtttgaccagaaggtaggaaggaagcagcttagcctacaacccttctggggcacctcctgggccaccctctgctttacagcttagacctctggggaagggggttgggcactcggcggaaatcatcactcatttgcatagtgaagtctatgccgtacctaggtcccaaatccaggggaaggcaatgcacggcagaaacggggtttgaatgacttctaggagccctttgtgccaagtcgagatggcctcatccccacagcccacattcctggcaggctgggtcagggatccctgggccagagatctgagatcagcctggccagcaagcccccaagtaaaagtttatgctgaacagagcacagaagccgagctgtgttcccttaggtcaagattttcacacttgaactcacgttccctttaaataaagtggaaactccccatctctgccactctacaccaagattcaaatccccccagcatgaccgtgtgctgaggctgtgtttgctttaggccctcaccccgctcaggctagttcagttttgtgactatctagcacctctcacccccatcctacagcctggggtggctcgggagccacctggtctgaggaatggctggattgggagggaccatatcaaaatattcctgcgggactactgttagttccttaagataccattagaaggccaccccatcccacgaagcttctctcatcaactttacactatgtctgcagtctaactaggtgtgacttctcggttggcattctggcaatatgtacccagcatttcaatgcacacgagtctcagcccagacattcactcctagaaattgtccctgcagaaatacttgcacagcgcaaagagacacagagcgacaaggacatccggcacagcgttatcagtctgcaaactgagtacagcatttagcatgcacttagtatgtgccaggcagggtttgaagagctttttatccttattaatagctcatttaatcttcacccaagaggtaggtccttgaccatgcccgctttacagatgaggaaactgaggcacagatctacccagcaagaagcaggcctggcatctgcgccaggaggcatcaccctgctgaactggattcacaatccttccatcccctttgcctgctgggagggcagggacactggaaagttcaggatgttgaactgagttcttggccacacggataacagagaaccccaaaggaagctggggtgtcatctgcgcacaacctcccgattggaaagttagcattctcccttcagttgtgagaaggctcataagccccccccaaaacacacacacacacttgtcccaggttaggggcatcaccgtatcctagccgctctctggtgtacacggctcaatgcagaaatcacagttcgaggtgactctccgcagaggagctgggtcttgcagcctctcagtttccctaactcgggagaaagtcttgtggcagcttccattcaaactcttcatcaaacacccagggggagcatgccattccagacccactgccacaggaatcatggtgggacaccgcaaatcacagcacaaagatcatcaacatcaaccccacagtgagggccacagggtgcctgtgcactaccaaccatgggacctcggggccacggggcagcaatagtgaatcctgctgagccacaggagagcagactggcaggccccggtgcaccggccgtggcccaccgctggcttgaaatcactgataggtggtaaaaataaattttaagaggagtcccgaactagtagcacggggaaccctaaagagccctgctctccactggatggagagctgactcttcccaggtcccaggaggcaacaccgactttgctgagtcccaagcctatcatgggctttcccacccagcctggggcaagaagtggaatacgcttagcccaggcagtggatggaagcaaactcccccaaggaaggtggtattagtctccctggccattcccagttggagttgatttgttcctttaagaaggggaaggattctcgagcactggagttttcaggtcccctcccagtcttgaaagtttacatccccaagtccccttttcatttgctcaaagagtacatgtggctggcaagaagtgctcgagaggcttcaggcagtcttggagtggattctgcaggtgccaagcctcctcaagacccagagatcctaaagcccagtcttcagtcctcagagtcagaggatagagatggacaggacttcagcctcagccctcccgcaaaacagagtcatttgcaaactttcaagactgggaggggacctgaaaactccagtgctcgagaatccttccccttcttaaaggaacaaatcaactccaactgggaatggccagggagactaataccaccttccttgggggagtttgcttccatccattgcctgggctaagcgtattccactccttgccccaggctgggtgggaaagcccatgataggcttgggactcagcaaagtcggtgttgcctcctgggacctgggaagagccagctctccatccagtggagagcagggctctttagggttccctgtgctactagttcgggactcctcttaaaatttatttttactacca

SEQ ID NO: 1885651 - DNA, 4001 bp, Homo sapiens
accgtgtaatgtgcgccataaataaagcgaacgcgccacggaccacctctctccaagtaccaagcagcagccgtactgacaccaggacagtggctcttccgcaaagctgatatcacctcctggaagtcttccaaggcgagatgtgatattgagaagaagtagaccatgtgtcctacgtcacaaataaagcgtacacaccatggtcaaccgcatcttcaaataccaggaagtgacgctgacccctggctctcttcctttcacctgctatcacctccagaaagcctcacaatgcgcatcatgaactaccagccaccggcaatgtggcaatgaccacaaacccacatccaatgccactaccacctccaggatgccctgtaagggtgggaccggtactgagttcttggctggtggaccaaatggccaatgtaataaataaaggactgggtctgcagccaaccacccggtgacctgcactgcaccctggctaccactcaggcctggctctcaagtcggcatggcctccgggaagccccagggctggctgatactgagaatgagtggaccatgctacatctgtcattcaacaatgcatatgctttatgctctaccatctctccaagtactgtggaatggcgctgaagccagatcagtgtgtctcccacgaaggtgactttgcctctctctgggaagccctctatgactgaatttgatattgagaagatgtggaccatattacatacgacacagagatagcgcatgttctatggtcaaccatcttttcaggtaccttggagagggctgaggtcagagccggtgtctctttcctctcactagcatcacctccaggaagccctctgaggcctgatgtagtattgagaagaggccaccatgcaatgtctgccgcagatgcagtggacgcagcacaaaggagcccctcaagaatggagatgatgctggaactagtgctatgactgacactcgttcctgcctacagaaagccccccgaggtgcacgctgttataggaaggtggacgaagtaacatgcgttgtaagtaaaacatatgaagcatggccaacttctactaagtaccccgaggcagtacttgtaccagaactggtgctttgtctcctaagcttaacataacctccctggagactttccaggctgaatgggatacttcaaaagaagtagaccatgttacatacgtcatggggaaaagacatgcagtgtggctgaacccttttcaggtaccgtgaggtcagtgaagaggccagaaccagtgctctgtccctgaggctggcagcttcttcagcaagttctccaagcaagggttctgggatggagatagggaagaagtgggccatggaggcacttcctctgtaaacatacacgatggggtcgagcagctcttcatgaggatcagtgctgagtccagagctgggacatcttcccccgagatggctagacttgagatggaaaaaagatagactgtacacgcatcagcaaagacaaaaacgagtcagtgcgtcttcaagtacctggagtggcatcatctcctggacccatatctgctcctacatgggcgtactgtcctgaagtcatctgaggagggctctgaggatgagaggtgacctgtttcacatccctcgttcatgaacatttgcggcaccagccaccgtttcttcaattactccagagggatgtgccaacgtgggcagtaggacaccttcctggaggtcatccttgtcctgaggaagtcactggaggctgtgtttggcactgaggagaagaccgcatcacaagcattgacagagaaagcacacatctaagagtctaccattccaccaagtgccatggcatggcggatgccgagacccgtggctctcctctaactccaggctttctccagggaggtttggatggctgggctggataccaagaagcggtttaccatcccacatacatattcaaaatgtatgtgggacggtaaaccatttcttcaagtaccgcacgatggtggtggtggtggctggaagaaggctcatgtccacgaagttgcctgagggcgcttcttctaggctgcatttgacgctgagaagaagcaggtcacggtgtctactgaataagcgtagcgtagtcaaccacgtcattgagcaccatggaatggcactgattccgggaagaatcaaggtctcctccccagggatggcgcgatttcccaaggcagaacttgatttaagaggagcgagattatgccattttgcatcatgcagaaaaacacatgccatacagaaaatcatctcttcgggtgtcatggagaagtggtggtgggtccaaccgttcctccccgaagacagcgttgtttccaggagcctcggggatggatttgatactgagggttagtggaccgtgttacatacgtcacagataaagcgtacgctatacggtctactatctctccaagtaccacacagagatgccgaggacaaaggctcaggacacatccagaaagccctccaaggccttgagctgggtggaaccagaagggaggttgagcacagcacatgcatcatgcgacaagcacacacaggccaggagtctcgtcttcatggtcgggggttgacatgaatgctcgaagcagtggctcatccccaaaactggcaactcctccaggaagcccttcgaggccgaaagtcccactgagaagaagtggacgatgatatggatttcatcactccataaatactgattaagtgcctgctgtgtgccaggcgcactgtgctgggtctgaaggagtgggtagatgggagggaggacatggcacatggctaacagagctggttaggggagtggggagaaaatcagaaatacaaaatggcccacgtgcaaccaaagaacatccatctagttacactaaccaggccaaggaaacagtactgggcacctgaggcccagatcttacctattagtgagctctagtcttgggcattaaaaaaaaaaaaaaagtgccctaaggccatatctgcctcaataccaagggcatttccaggaggtcctcttaggttggattagattctgagcagtaaccaccatgccatcttcatgaacaaagcaggagttgttttggtcaaccacctccctaaggacagaaccactgtctcattcccagacttggcactgcctccggaaaaccctgagactgaatgtaagattgatcagaggtggacattggtataaacagaaaacttcaacacaggaaagcaactcttcaatgccacacagcggaatgaaggatggactggtgggtccccctgaaggtagtattggctccacgaagccctccaaagctggcaggctactgggaagtggtagcccatctcacacaaatccctcctttcgcacaggccacatggcaaatcatctcttccagaaccacggctgaggctggaaccggtgtcttgagcccaagttgcatcacttccagaaaactccccagagagtgcatttagtgcccagaagagccaggccttgttgcacaagtcagacatcaaccatgagccacagaaattgccgtggagcagtgctgaagctaaaccacgtgttctcttccctgaagttggcaacacctccaggaagccctccgaggatggattggatactgagagttagtggaccatgttacataggtcagaaatcataacgcctacgttccatagtctaccatctcttcaggaaccacggaatggtgctgaccccagaaccagggccttgcccctgaagttggcgtcacttccagaaagctttctgaggctggatttggcattggaagcaggcacatggtgaacataaacaacccctcctccaatgtggggcagtggcattgatgggggaaggggtgcctctaccctaagtggtaattcctccaggaaggccatgtcaacttggaaagactgcgacaaggcaaaatgtacaatactgaccatgctttggccattatgtg

SEQ ID NO: 1885652 - DNA, 4001 bp, Homo sapiens
ctggacgcaggaagccctctgggtatgacttggtatggagaagaggcagatccatgtgatttatccttaaaaaaagcaaaccaccattaaactcagtgcacacaaaaaggaccctcctctcccactgcctccagggagtccacaggaagaaccagcacagagagcgaaggcagaacccaagggctaggatcacagccaagctcacgttcccagacagggaagccaagccgtacctgagaggggctgacatccgaggctttgtcctggagacagcagggtctgagcgtcttcctcgacagagtttgatacgcaaataagagtctccccctgtatattcgccattaatcaagtgaacatacaaagggtatcctctcttcaagtaccaaagagtggctcaaagagcaggtgaggactatgccgggtcttcgccggagtggacatctcctcctgcgaggcctgagaccaagggggaggggccaggtgacaagcctcatctggctggccctggagctggggcctgccatacagttgactttacttcccagcatctcttcacgacaggattggttaccaaaagacaggcaatcctgtaccatttgaaataatgtaaatgtaaaatggctgaaatccctttagggcctgcaaaaacaccctgggagaagaacctctgcctctgcccaaagccactgcctccaggaagccctcctggtgaacactggctaagggaggttagaagatgcagtcacatgcatcattaaagaaaaaagagaaacagaaatccaacgcactccgtttgcaaatcacaaagcagcactatgacaagtgtcccttctcctgaatttggcattgtattcagaaagccatctgagcagttagttgttactcagaagtattcatctagggcaagattcgtcaaaggaaaatgagattctcatgggccaactctctctgaataaacacatgctaacaccaggaatccaagggtctttccattggcaagaatccctaaaggacaccaatggactaagagagcagtggggcttagaggtcccagcagcaagtcctgtagccacactgggtgctctggggcctccttcctgtggactggccttccctcaagtggacagtgaggtccaaaagtcactccaaggatgggctaggtatggagagtgggtagaccagatgacccacatctacattagacattgactttgctgacggtcattctttcatgtatctgggagatgcactgaccacgagacctcttctcagaggctggcatcatgctgggcagacctgccggagtagcagcccatggatgctttgtgataagtagggcccatcaagggaggccctttgttcttttcttttttttttaacctattgtgttgagacaggggtctctgtcagccaggctgaagtgcagtggcacaatcttggctcactacaacctcccaactcccgggctcaagtgatcctccagcctcaacctcctaagtactgggaccacaggcgcacaccatgacacccagctaatttttgtattttttgcagagatggggtttcgccaagttgcccacgctagtttcgaactcctgggcttaagccatccaccgtctcagcctcccaaagggctggggttacaagcgtgagccaccgtgcccggccaaggtaggccctttttgctaggcagaacaggtggtctgaagagaaaaccctatatcatctccaaagccagcatctcttccagaaagttcttggaaggaagcatgagatgaggagggtcagagaaccaggtcacaaacagcaagacagaggcacatgccctgtggtcaaccatccacaccccagggctatcctggccatctaacaggttgctggagtcagccttgttcccaagaaggcttcccaggcaggatttgctccccagagagagtctgcccttgtataatcattgcaagtaaagcaaatgcgtgaaggattacctctcttcaagtagcaaatgatggcagtgacaggaaggccatttcctctgtgactaagttgccaccagctccaggagcaagccttagagacacagatgggatctgcatggtgagagcagcacaccgaggtgtgaagtgcaggcccgtgggtgaatcacacatctattccttccatagcccctgaagcagtgccccttcctgaaattgacagcccactcaggtattctctaaggtacaactagtcacagtaaaagaggttcattccagaaaatgcattgcaatcatggtaaacatacagagaacaaacttcattcaaggtcaatgaggcaatactgagaacacagccttgtaacaacacattatgtgtgcaccaagggcagtgagcaaacagcagagaagctgacggcgtatttcatacaaagtacaattctgtgtctgtccgtcctgtacccaggaggggtacagataacatctcctcttccatggcgacttcacgtcctccgaggttttcaaagcagcatttgatactgaaaacgtggattttcctctatgattaatcataaataatgtactcatagaaggagaatctaccttttaaataccaaagaaggattccatccaggaaagcgtgcacctgtgcttgagtcatcagaaaagaaagtcacatgaggcagacgagcttccagggaagaactggcaccacgagacccacaatttaatcttcaccaagttggcgtctcgagatggttctcgggcataccccgttcattcagatacgacgtgcggcctaccatctttgcacctactcaggccctacggtctcttccagaaacatttccaaagcagcatttgatactgaaaacatggattttcctctatgattaaccaggaatcacgtaaacatagaaggaatatccacgttttaaataccaaagaaggactgggctctggaaaggacaaatctgaacacagttcatggaaaatggaagcaagacagtaaagcaaccgttttcagtcccgtagcatagctgtgacaacacaccacagcctgtgcaccaagctggctcctcagcgaaagggggcttctaaaggtgatggtcagcagacatatggcacgaactcagcacatgttctgcggcccaccatctttccacttaccctggagggctcagccccacctcacgtccctgatggtggcttcagtccagccatgatcccaaggcagcatttgatactgaaaacgtggattttcctctatgattaaccatcaaacacgtaaccatagaaggaaaatctaccttttaaataccaaagaaggtttcatcccggaaagcacgaacctaagtacaatccatcaaacacaaaagtaacatagcacagaggagagcattcggcctcatggagaaaatgacgacggagcccagccgcttggccgagcgggcagcttgcgagaggggtctcctcaaggcgggtgggtggtccgcagacatatggcacgaattcagcacatgttctgaggtccaccgactttccacttaccctggagtggggggggggactttattgtctcttccctgatggtggtttcagtccaggaatgtttccaagcagcatttgatactgaaaacgtggaatttcctctatgtttaaccataaataacataaacatagaaggaatatccaccttttaaataccaaagaaggattgagtcctggaaagcatgaacctaagcacaatctatcaaaattaaagacagcacaggataggtgcagtcggcaggggcctcccgggctagcggcagtgacatgggccctgcggaggacgcatgtcccaggacagaccttgctaacaagagcttaggttctgggattcaccttccatcactctccgcatgggggagggagctaaccttcctctcagaaatgttcagaaatgttttaaaagcagccttagatactgaaaatgcggattttcctctatgattcaccataaatcctgtaagcatagaaggaaca

SEQ ID NO: 1885653 - DNA, 4001 bp, Homo sapiens
cttattgttagaaaatatacactgaagtatttaggggtaaagagctatgatacatgtaacttattctcaaatggtacagaaaaagaatctacatgtagatacacacacacacacacacacacacacacacacacacacagctgataaagcaagtggggcaaaatgggtacagcacatatttttgtcctattattcttgcaacataaatctttttcttcattttctgctcaaatataaataaatacctcattcctttatgtattcaaaagcacaaggacaggtgattctggctagctctcaaatactccatttcctccacaggtaatagccatgctcaactcagcgtggtctcagtcaaacagtggctcactgatcaaggatccagtttctttttttcttttttttcaccaagactgagaatcactcgatcactcaggctgagtgcagtggtgcaatgatggctcactgcagcctcaacctcacaagtagctgggaccacaggtgtgcatcaccacgactggctaattttttaattttttgtagagacagggtctcactatgctgcctaggctctagtttcttattttctgccatctgccagtcacccaaacctaagctgatgggcatacaacttacccctggccagaggaattggttcatgctcatccaacagcaaaaaatttaggactttcatttgatggttgaagagaagcagttgtctttctttccctctaaagatgactcatgaaattattagtcccatttgctgctgcaattacactacacagacccatgaaaagatccagccttaggatgaaaccagcaccgcagatggcaaaaataaagaacctgggtcattgatgacatcaataaactgctggatcaaccaaactcaaagcccagcctaacaatggactttccaattaactgagccaacaaattccttaactatccaagctagcttgagttgaatattctgggataaaagcaaaccaaatgacactctctaaatcactattatcacttcctgtaaaaggtataagtagaaaagaggaaagcaaagaacagatatgaacagaaaggaaaggaaaaaaaggaaagaagggaaagaaggaaaggaggaaaaagggaaagcaagggaaaggggaaaaggaaagaaaagggaaaggaagaggaaggggaaggaaaaggggaaggagaaggaaaaggggaaggggaaaggaaaaagggaaggggaaaggaaaggggaagaggaagagaaaggggaaataaaaaggaaaatggaaaggggaaggggaagggaaaggcaaaagaaaaaggaaaagggaaaggggaagaggaaagggaaaggggaaggggaagggaaagaggaaggaaaagggaagggggaaggggaaggaaaaggtaaaggggaaagggaaagaaaaaggggaagggaataagaggaaggaaaaggggaagaggaaagggaaagaaaaaggggacaggaatggggatagggaaggggaagggaaaggggaaggggaaggaaaagggaaaggggaaagggaaagaaaaaggggaagggaatggagaaggggaagggaaaggggaaggggaaaggaaaaaagtcagggatcaaagcagaaagccatcaggccacaaatattgagataatgaacaagtactgcagccagaccccaagcaaggtgaaaagctttgtttgtaagggaaaagtcaagggtcttagactccaaaaaaccagggatgagctctaccaagaagcttctaagactttgaaaatgttctccttatttgtccttaggaatactttttttcactttctgctatcagtaaattctttttgaaactgcaaagccgcttgtttcggaaacaaattgaggaaaaatctggacagttcttcctcggcacaagagagggagagagatcgtttccctggcctgcctatttcctcctttgttctcataaaatcacaaaggagaaaacaggcagggcagggaagctggcccaagaccaacaaagactcaattctatctggaaaataagccctagacctccaatgtttctcaggcccggtttcacctcaagacaccaacctcactcaagtatgtggatcctattcctacaaaccagcaggtaaagagcttggaaaaggaggagttgcaaattcactcagtgtccaggttctgttcctggcatttcaaaggacagagattttttttttttcttagcaaacacaacatttctcataaatgccctaccccaccctaaaactttcacagggtttagaaaaaaatgataggtagctggtttctaagaatcaatctgagaaaaaaagtggaaaaaaaaaacagagaaatgaaaggttacatttatcaacatttaggctctaaataaagagaaaatagatacattatatagtaaaaataaatatcaaacaataaagaaatacagaaataacatctctaaccaaaaatacctgaaaagattaaggtttctatcagctctcacaaaaaaccatgtgtaagaaaataatacaaactactggaatggaattcattaaaaagttgatatttaaaaaggaaattaagcaaagcactacactctgtgatatctagtcccaaatgtactctgaaaagtactgcccccactcatgactgcctgacttctgccgacctgtaaccttacgttcagattattcacccagcttctcagtaaactatcgcaagaacaaaaaaccaaacaccgcatattctcactcataggtgggaattgaacaatgagatcacatggacacaggaaggggaatatcacactctggggactgtggtggggtcgggggaggggggagggatagcattgggagatatacctaatgctagatgacacattagtgggtgcagcgcaccagcatggcacatgtatacatatgtaactaacctgcacaatgtgcacatgtaccctaaaacttagagtataataaaaaaaataaaaataaataaaaaaataaaaaaaaaaaaaaaagaatgctatcctattgctgcctcatcaccattcaccagcaatttccacaacagaagagtaatccctgttggctgaaagcctatagcatattatgcatcctccctgactgaccaactgaaagtgtttaatcctgtatttcaatcctatgtgctcaatccaagtgatcctagcagttatactacagaggcttggggtatagtcttaatccataaaatgtacttctgtaattttatatgaattcttatttagaaaatttctcttaaaactctgttctcactaaaatatgaccaattagactagaatttccttggatataggagctgcatatcttacccttacctgtattacccactgtacagaaccacatccaggacatggtaaacaaaaactgcaggttgttagaatgaaaacaatgtccacctgagtgacattaaaacctcaaacagcttctatttgcctttcataatttctatcacagatttttagagctattcatagacacacatacacaacatacatgttattcttttactggagcacagctccataagaacaagacatgagtctcattctttgcacctcttaaatttcctgctacaatgttctgtatatacatttaagtaaatatttgacaaactgaattagagactcatgaatgtccacacaataatatacagaacagaatcatggatggatcaagatatatttctattcggtttggaaacacacatctatcccactcctaccagccctgagagatgagtgcaggagagaggatgtacaaggacataaagaacaacaatttaacccttccaattatattttccataaggttacaatgtttaaattaattttcattcatttagtggacaataactggccccagtaatgcactttctatttagggaaaacaaatccaagacttaaaattccaacaggtaatctgtaatataaaaacaggaaaacctataattttg

SEQ ID NO: 1885654 - DNA, 4001 bp, Homo sapiens
ggtctcaacctgggccaattccagggcccccaaggtctcctcttgacctcagaatcagcttttcttccctaaggtgtcattatatccaggacatcctttcagaataaactgcaggctaggggcaggcgtgcaggacacctgcactatctgtccagggcatgctggcattcccctgctgtgggctgggctcattcaagcccatcactgagtgtggcaaggacgaggcatccccctacagcagggtcagatgccgaaagagcctgaattacacacacgatccgttgggagcacaacgaaggcaaccacagacaactcacctgcatgttccgtgacactgtcgtggtgacactgtcttcccccaggctgccatcacattgaaaagtcctcctaagaagggataagacattgagggttagcgcaatcggtggcaaaattcagaaacatggggcacgcttagtgatcagccatttgctcgtgtctccttatttatgtccacagcaccccttccctgaagctgaggtctggaccagaaggcctccaagatgggatttgatactggaaaagaggttaaccaggtgtgtttcgtcctcaataaagaaacagaaacccagaaaacctctcttcaggtaccaccaagtaacactgacaagaacaccactgattccttccccaaacttgacattcagtcctggaagtcctgttaaatacggattggacactggggttagtagaacagatgacatcagtcaaaataatacagcacaggcttcgtggttaaccatagatttctgtccagtggactggagctgagagtaacgcccttccctgaagctgaggtctggaccagaaggcctccaagatgggatttgatactggaaaagaggttaaccaggtgtgtttcgtcctcattaaagaaacagaaacccagaaaacctctcttcaggtaccactgattaacactgacaagaacaccactgattcttccccagacttgacattcagtgctggaagtcctgttaaatatggaattgcacactgagcgttagttagttgatttgccggaagaagccaagagttggatgcatgctgcttgccaaccatctatccaagtaccccagtggagcagaccccacatcacgtctggaagttgacatcacagccagaggtggtgatgccataaaaaggctggtcacagcagctatcgcgtttagggttaacctccagggccatcttttctcagttactcaagagaggcacagatgccccaaagcaaggctgactccaccaaaggtcctgctaaggacccagtggagactgaggtgtgacgggccaggcgaccttggttgtaaattaaagtgcatacactcaggtcagctgatcactggaggactttgggatggtatagacagcatgccccttcccttgaacttggatgcctccacatctaggaagccctccaaggaaagagatcggagtgaaaatcagtccaactcagccacatttggcatacatgtcgcaaacgcctcgcagatgctctcttcagagtctaacagagtgcagctggccccagtttactgtctctttcccaaaaagttgacacctcttccaggaagttctccaagggggcattagatactgagggttagtggaccaggtcacaaacggcacaaataaagcgtgtgctctctggtcaaccatctcatgtatccaggcacgtgctgacaccacgctccttgtccgcaagttaaccctgctgccaagccagagcagtgtgctgagaagaaggctgccacacgtgagttatcgtcacacacaagacaaacacatcacaaaccccgctgggtcacactgagcgcagacctagtggcccccacccccgcagttgatgttagctccaggaaagcttgcaaggcgggattagatactgcaaagaggtcgaccgtgtaatgtgcgccataaataaagcgaacgcgccacggaccacctctctccaagtaccaagcagcagccgtactgacaccaggacagtggctcttccgcaaagctgatatcacctcctggaagtcttccaaggcgagatgtgatattgagaagaagtagaccatgtgtcctacgtcacaaataaagcgtacacaccatggtcaaccgcatcttcaaataccaggaagtgacgctgacccctggctctcttcctttcacctgctatcacctccagaaagcctcacaatgcgcatcatgaactaccagccaccggcaatgtggcaatgaccacaaacccacatccaatgccactaccacctccaggatgccctgtaagggtgggaccggtactgagttcttggctggtggaccaaatggccaatgtaataaataaaggactgggtctgcagccaaccacccggtgacctgcactgcaccctggctaccactcaggcctggctctcaagtcggcatggcctccgggaagccccagggctggctgatactgagaatgagtggaccatgctacatctgtcattcaacaatgcatatgctttatgctctaccatctctccaagtactgtggaatggcgctgaagccagatcagtgtgtctcccacgaaggtgactttgcctctctctgggaagccctctatgactgaatttgatattgagaagatgtggaccatattacatacgacacagagatagcgcatgttctatggtcaaccatcttttcaggtaccttggagagggctgaggtcagagccggtgtctctttcctctcactagcatcacctccaggaagccctctgaggcctgatgtagtattgagaagaggccaccatgcaatgtctgccgcagatgcagtggacgcagcacaaaggagcccctcaagaatggagatgatgctggaactagtgctatgactgacactcgttcctgcctacagaaagccccccgaggtgcacgctgttataggaaggtggacgaagtaacatgcgttgtaagtaaaacatatgaagcatggccaacttctactaagtaccccgaggcagtacttgtaccagaactggtgctttgtctcctaagcttaacataacctccctggagactttccaggctgaatgggatacttcaaaagaagtagaccatgttacatacgtcatggggaaaagacatgcagtgtggctgaacccttttcaggtaccgtgaggtcagtgaagaggccagaaccagtgctctgtccctgaggctggcagcttcttcagcaagttctccaagcaagggttctgggatggagatagggaagaagtgggccatggaggcacttcctctgtaaacatacacgatggggtcgagcagctcttcatgaggatcagtgctgagtccagagctgggacatcttcccccgagatggctagacttgagatggaaaaaagatagactgtacacgcatcagcaaagacaaaaacgagtcagtgcgtcttcaagtacctggagtggcatcatctcctggacccatatctgctcctacatgggcgtactgtcctgaagtcatctgaggagggctctgaggatgagaggtgacctgtttcacatccctcgttcatgaacatttgcggcaccagccaccgtttcttcaattactccagagggatgtgccaacgtgggcagtaggacaccttcctggaggtcatccttgtcctgaggaagtcactggaggctgtgtttggcactgaggagaagaccgcatcacaagcattgacagagaaagcacacatctaagagtctaccattccaccaagtgccatggcatggcggatgccgagacccgtggctctcctctaactccaggctttctccagggaggtttggatggctgggctggataccaagaagcggtttaccatcccacatacatattcaaaatgtatgtgggacggtaaaccatttcttcaagtaccgcacgatggtggtggtggtggctggaagaaggctcatgtccacgaagttgcctg

SEQ ID NO: 1885655 - DNA, 4001 bp, Homo sapiens
catttttagggagtggatagaatgaggtctcctgtgagataccaaaggttcaggacaaagatatggtgaggacttctgccagccatatgtctgggaatccttaagccaacaaaatgagttgaaaaactggtaccaactggtaaattccttggggtaccaggcagaaccaaatgcaaactcatgtgcatagggattgaaacaaaacagaaacacctaagtgctcaactgatgataacctcacaacacaaagctacaaaaaccatgaagaaaagcaccatcatgagagtcaatagattcaacaaagaaaggggcttgtatccctaaagctgaaagaaattatacaataaatatctttaaagtgactaaagaaattttaaaaacttgaaatcataaaggccaaatagaacagaatgaaaaaaaaatggacagatgggaaaaggtgtaagagcaatggtcagacattctcagagacgaaatacctcacagaacatagtacctcaaagtctttccaacaaggtttgtgaagatcgctagataaaatagtccaggtaagtaagagctacatggagaagccacattaagacagctagtgaaagcctcaatgcaaaaaacagtggacaatagctataaatttctgagaaaaaacaagtaggctgagacttttatacctagttaagctgtcccttgtgcataaagagatatatactctcaaatgcacaggaactcaagggtagtgtctatgagctattctcacagaaacaataagatcatttccattgagagataaattaaacttaaaaactaaagaacggagaaacctcagttaaaaaaaaacaaaccttgtggtcagaaatgaattcatttaaatatagaactatggcaaaacacctgcaagaattatagttctagaacaaattgcagatatttataatgtaaaattaaaatgtataattgagaaaaagcaggagatagtaagcaaaggaagaataagaatgctgacttctttatctttctgaactaggagtgaaattgaaatagttaaaaaccataacaatcctaaccacttaatttttacactctaatttttcttaattttacagggatcttttaggagttgctacctgtggtggtaaagcgagaaacatttatcaatcatttcaatctcctttagcttgttttttatgataaattcaaggaaaattatagttagcatttttaataaaatgattaggtacagtgtgatctcatattttccctgcgtctgtcttgtttttctatttgcatgtatgctcagacaggtgtatgaaatttctaaagcccttaatggttatttctgggtgccagagaattgggcaattttccttctttttcatttagatttttccacatcgcttgaattttattaagcatgtgtcattttcataaatatggtaataaggtagaataattatcctttttgaaaagaaaaacaagaaattgaaaatgcaactgtcttctgttcttaaatttgctgtggcctccagatcaacagatgtggtgagtcacccttccagtgagtccccaagaatgctgaaatcaacgccccttccctgaatttgtcaacatgtctaagaagtccttcctccatggtaagatttaatagtgaaagagaagagaactatacattgtttttctttaaaaaaaaacacaaaaccccagaagcatcatgggcaccaccacttcctcagtcacagaggggtcttgagcacagatcacatgcttcttccccaggaatgcactggctgaggattaggagtgctagcagcacctacccattggttccagggccacacacatgttcagttgcactggtgtggaaccaacatgagtatggtgtcccctaaatcggcatcaggtccaagaagacacctggtgagatctgataccgaaaagaggtcgaccgtgtattgggcatcattaaataatgcgaactcaccacggacaacctccctccgagtaccatgaggtggcactgctcgcagcattcctgcatcttctgcacagcctgggcagcttgggagtggcctctgagggtggatgggaccctgaggatgagtggaccaggtggctcaaacccatgctctccggccaaccccaggttcaccaagccaggattagtgtgcacagaaataccacttcttgtgctcagctggccatgcaggcaacatttaataatgcaaggatgtcagtggcacaggagtcattaaatatgaagcaaaccacacacaaatgtgtgtgcaaaagcaggctaagcactgcctccttggtaaacctgggattcccttacaggaattctctggagggtgtaaggctgctgtgggttagtaaaccaggggtcgcacagagtcctgttcctgttttcttctgtatcccgacggctgactaataaaagatgcttctagatgcccaagattcaactccaaggttgaatttgataggaataaaaaaagaagtcagccatgtgtatttcaatcttaacttttaaaaaattagggcatcccaacaacctctctcgattttcctaaagttggtagtgccccaggaagttgttttagggtcagcttggactctaaagttagtaggtcagttacatgcatcctcaggaaaatgcttgccatggggtcagccatccagaaacctaccttggaagcagcactggctcaggaagccctccgaggcagaatttgacactaaaagagaggagagccgtgtatgactcgctttgatgaatcgaattcatcacggccagcctctctccaagtaccacacatgaacactggtgagaaatccattgcctctctggcagaggtggccgcccttctcgggagtcctgttaggaatgggtgggatagtattgggtagtgggccgagccgagtgacatacacccacattaagtgcatgctcacccgaggcgcacttaccttaagggagtgctgagggcactgccttctccccagcagcaaggatgcagttcgtccttccagacaagacagggagcttttgcgtagctcactggtccctgacaggagaatcatggccgcttcccaaagccgcattatctccatggagcctcctagggagagacaggatgctgggtattagaggacgacgtgacagacctaacaaaggcagcacatgctctgggaagaaggattcagtcacacacccaggagaaaagctggcccacatcaggtccctcaacagaagacaacatggcgtcccacatcggaagtcaacacttcaaggaggctgtcacagtggtgaaggggctgccaaggctgactcattgcattttaagtaaacatacacccccaagagcacgtgtcatcgcagtccaccaagcagtcacagcaagtccatggccgcttccccagagttggtgggagctctggaaagtcttcctggagtgggagtgatgctgagggttggtgactaggtggcccacagggtgaacacagtgcatgcccctctggtcaaccagtcacacaccctggacggtgctgacaccaacatctcttctggaagtcggcctggggcccagggagcctctcttcaaagtcttgtgaggtgacgctggtgacagaaccacagctgattccccagagttggtgagacccatgggaagacctcctataggtgcatgggaggctcggattatcgggccaggtgacttacagctaggtcagcgcattgtccatggcccgccatccattcttggcttttccacatggttgacacaaagactatctttcctgaagctgccattgtgtccaggaagtccttagaggtagcatttggtactgaaaaaagtgttgtccgtgaatgattcgtcataagtaaagcgaatccaccacgaacaacttctcttcaagtaccacagaaaagcagagacaagacagacaaggagtccccttccacttctccaaggggagtggctgccaaccaccatcctgtggacaga

SEQ ID NO: 1885656 - DNA, 4001 bp, Homo sapiens
gctggggagaatcaggggtcagaaaacttcaggtttcctcttacaaagttgtaaaattgtgccctcttttcccccgaaggtggaccccggagcagaggtctgagaagaaaatcccagggccaggctgcggctctgcacccttgccacctgtcctttgacccctccgtagccagcagagcacccaatctacatggacccagcagccgcctaccctggataccccggaggcaacagcatactgcctgctgtcacatggccttgacacactctctctgccctctctttatgagggctcttttcggctggaaggaacggtgtttgggtatcagctaataggaaggattggtggcggaggtcattggtgctacctcatatgttctctctggttataaaaagcagggttgacatggaaatacctggcccttctccagaacctgaggccctcctccctcacagtcccatccccaaatgccacagatgagccgaggacccacagtcacagctaagtgccatcaaaacaaatgcagcaccagcaaaacctacttctgtgccttggctttagagctggcagggagccttttccttccccagaggctggcatcacctccaggaagtcctcctggaaaggatcgggcaccaagcattactgccagacaggacgcttagaacaggggaagcacccatctcggcccactcaccctggcctgggcctgacaactgtcttatccggaagccttccaaactggtgtttgatactgaagagtggtccacagaaatgatttatataaaagaaacagatatgccaaaggaaacctctccttgagcaccccaaagaaggaccatctgcagaaacacaaccctgagggtaggtcagatgtgctggtcagtggagcaggtgtgttcctggggaggtacatgccccgtggtgggccatccactcccttcccctggatcagggctggtgacaatgccctcccttcaagctggcatgacatcaaggattcctccagatttaaaggaagtcaactccacaattcctgtgagaaataaacaggtctcaacctgggccaattccagggcccccaaggtctcctcttgacctcagaatcagcttttcttccctaaggtgtcattatatccaggacatcctttcagaataaactgcaggctaggggcaggcgtgcaggacacctgcactatctgtccagggcatgctggcattcccctgctgtgggctgggctcattcaagcccatcactgagtgtggcaaggacgaggcatccccctacagcagggtcagatgccgaaagagcctgaattacacacacgatccgttgggagcacaacgaaggcaaccacagacaactcacctgcatgttccgtgacactgtcgtggtgacactgtcttcccccaggctgccatcacattgaaaagtcctcctaagaagggataagacattgagggttagcgcaatcggtggcaaaattcagaaacatggggcacgcttagtgatcagccatttgctcgtgtctccttatttatgtccacagcaccccttccctgaagctgaggtctggaccagaaggcctccaagatgggatttgatactggaaaagaggttaaccaggtgtgtttcgtcctcaataaagaaacagaaacccagaaaacctctcttcaggtaccaccaagtaacactgacaagaacaccactgattccttccccaaacttgacattcagtcctggaagtcctgttaaatacggattggacactggggttagtagaacagatgacatcagtcaaaataatacagcacaggcttcgtggttaaccatagatttctgtccagtggactggagctgagagtaacgcccttccctgaagctgaggtctggaccagaaggcctccaagatgggatttgatactggaaaagaggttaaccaggtgtgtttcgtcctcattaaagaaacagaaacccagaaaacctctcttcaggtaccactgattaacactgacaagaacaccactgattcttccccagacttgacattcagtgctggaagtcctgttaaatatggaattgcacactgagcgttagttagttgatttgccggaagaagccaagagttggatgcatgctgcttgccaaccatctatccaagtaccccagtggagcagaccccacatcacgtctggaagttgacatcacagccagaggtggtgatgccataaaaaggctggtcacagcagctatcgcgtttagggttaacctccagggccatcttttctcagttactcaagagaggcacagatgccccaaagcaaggctgactccaccaaaggtcctgctaaggacccagtggagactgaggtgtgacgggccaggcgaccttggttgtaaattaaagtgcatacactcaggtcagctgatcactggaggactttgggatggtatagacagcatgccccttcccttgaacttggatgcctccacatctaggaagccctccaaggaaagagatcggagtgaaaatcagtccaactcagccacatttggcatacatgtcgcaaacgcctcgcagatgctctcttcagagtctaacagagtgcagctggccccagtttactgtctctttcccaaaaagttgacacctcttccaggaagttctccaagggggcattagatactgagggttagtggaccaggtcacaaacggcacaaataaagcgtgtgctctctggtcaaccatctcatgtatccaggcacgtgctgacaccacgctccttgtccgcaagttaaccctgctgccaagccagagcagtgtgctgagaagaaggctgccacacgtgagttatcgtcacacacaagacaaacacatcacaaaccccgctgggtcacactgagcgcagacctagtggcccccacccccgcagttgatgttagctccaggaaagcttgcaaggcgggattagatactgcaaagaggtcgaccgtgtaatgtgcgccataaataaagcgaacgcgccacggaccacctctctccaagtaccaagcagcagccgtactgacaccaggacagtggctcttccgcaaagctgatatcacctcctggaagtcttccaaggcgagatgtgatattgagaagaagtagaccatgtgtcctacgtcacaaataaagcgtacacaccatggtcaaccgcatcttcaaataccaggaagtgacgctgacccctggctctcttcctttcacctgctatcacctccagaaagcctcacaatgcgcatcatgaactaccagccaccggcaatgtggcaatgaccacaaacccacatccaatgccactaccacctccaggatgccctgtaagggtgggaccggtactgagttcttggctggtggaccaaatggccaatgtaataaataaaggactgggtctgcagccaaccacccggtgacctgcactgcaccctggctaccactcaggcctggctctcaagtcggcatggcctccgggaagccccagggctggctgatactgagaatgagtggaccatgctacatctgtcattcaacaatgcatatgctttatgctctaccatctctccaagtactgtggaatggcgctgaagccagatcagtgtgtctcccacgaaggtgactttgcctctctctgggaagccctctatgactgaatttgatattgagaagatgtggaccatattacatacgacacagagatagcgcatgttctatggtcaaccatcttttcaggtaccttggagagggctgaggtcagagccggtgtctctttcctctcactagcatcacctccaggaagccctctgaggcctgatgtagtattgagaagaggccaccatgcaatgtctgccgcagatgcagtggacgcagcacaaaggagcccctcaagaatggagatgatgctggaactagtgctatgactgacactcgttcctgcctacagaaagccccccgaggtg

SEQ ID NO: 1885657 - DNA, 4001 bp, Homo sapiens
aagcaaagtgagtgcctgctacacacggctagggagggagggtcggggaagccaggagcaccgccaggccaccttcctccaggtcaaatcccacttaatgccttctgctgccttcaatccaattcagcagaatcaagaaataaaaacgaatctcatttcctgatgtgagctccccaaatgttttagccaattctgggccggattttctgtttgctataaaactcctttgacaataattgttttcatggtggggggagtactgttatctccagactcttttgcatctcaacagagagttagatcaatcctgacagggctggggagaatcaggggtcagaaaacttcaggtttcctcttacaaagttgtaaaattgtgccctcttttcccccgaaggtggaccccggagcagaggtctgagaagaaaatcccagggccaggctgcggctctgcacccttgccacctgtcctttgacccctccgtagccagcagagcacccaatctacatggacccagcagccgcctaccctggataccccggaggcaacagcatactgcctgctgtcacatggccttgacacactctctctgccctctctttatgagggctcttttcggctggaaggaacggtgtttgggtatcagctaataggaaggattggtggcggaggtcattggtgctacctcatatgttctctctggttataaaaagcagggttgacatggaaatacctggcccttctccagaacctgaggccctcctccctcacagtcccatccccaaatgccacagatgagccgaggacccacagtcacagctaagtgccatcaaaacaaatgcagcaccagcaaaacctacttctgtgccttggctttagagctggcagggagccttttccttccccagaggctggcatcacctccaggaagtcctcctggaaaggatcgggcaccaagcattactgccagacaggacgcttagaacaggggaagcacccatctcggcccactcaccctggcctgggcctgacaactgtcttatccggaagccttccaaactggtgtttgatactgaagagtggtccacagaaatgatttatataaaagaaacagatatgccaaaggaaacctctccttgagcaccccaaagaaggaccatctgcagaaacacaaccctgagggtaggtcagatgtgctggtcagtggagcaggtgtgttcctggggaggtacatgccccgtggtgggccatccactcccttcccctggatcagggctggtgacaatgccctcccttcaagctggcatgacatcaaggattcctccagatttaaaggaagtcaactccacaattcctgtgagaaataaacaggtctcaacctgggccaattccagggcccccaaggtctcctcttgacctcagaatcagcttttcttccctaaggtgtcattatatccaggacatcctttcagaataaactgcaggctaggggcaggcgtgcaggacacctgcactatctgtccagggcatgctggcattcccctgctgtgggctgggctcattcaagcccatcactgagtgtggcaaggacgaggcatccccctacagcagggtcagatgccgaaagagcctgaattacacacacgatccgttgggagcacaacgaaggcaaccacagacaactcacctgcatgttccgtgacactgtcgtggtgacactgtcttcccccaggctgccatcacattgaaaagtcctcctaagaagggataagacattgagggttagcgcaatcggtggcaaaattcagaaacatggggcacgcttagtgatcagccatttgctcgtgtctccttatttatgtccacagcaccccttccctgaagctgaggtctggaccagaaggcctccaagatgggatttgatactggaaaagaggttaaccaggtgtgtttcgtcctcaataaagaaacagaaacccagaaaacctctcttcaggtaccaccaagtaacactgacaagaacaccactgattccttccccaaacttgacattcagtcctggaagtcctgttaaatacggattggacactggggttagtagaacagatgacatcagtcaaaataatacagcacaggcttcgtggttaaccatagatttctgtccagtggactggagctgagagtaacgcccttccctgaagctgaggtctggaccagaaggcctccaagatgggatttgatactggaaaagaggttaaccaggtgtgtttcgtcctcattaaagaaacagaaacccagaaaacctctcttcaggtaccactgattaacactgacaagaacaccactgattcttccccagacttgacattcagtgctggaagtcctgttaaatatggaattgcacactgagcgttagttagttgatttgccggaagaagccaagagttggatgcatgctgcttgccaaccatctatccaagtaccccagtggagcagaccccacatcacgtctggaagttgacatcacagccagaggtggtgatgccataaaaaggctggtcacagcagctatcgcgtttagggttaacctccagggccatcttttctcagttactcaagagaggcacagatgccccaaagcaaggctgactccaccaaaggtcctgctaaggacccagtggagactgaggtgtgacgggccaggcgaccttggttgtaaattaaagtgcatacactcaggtcagctgatcactggaggactttgggatggtatagacagcatgccccttcccttgaacttggatgcctccacatctaggaagccctccaaggaaagagatcggagtgaaaatcagtccaactcagccacatttggcatacatgtcgcaaacgcctcgcagatgctctcttcagagtctaacagagtgcagctggccccagtttactgtctctttcccaaaaagttgacacctcttccaggaagttctccaagggggcattagatactgagggttagtggaccaggtcacaaacggcacaaataaagcgtgtgctctctggtcaaccatctcatgtatccaggcacgtgctgacaccacgctccttgtccgcaagttaaccctgctgccaagccagagcagtgtgctgagaagaaggctgccacacgtgagttatcgtcacacacaagacaaacacatcacaaaccccgctgggtcacactgagcgcagacctagtggcccccacccccgcagttgatgttagctccaggaaagcttgcaaggcgggattagatactgcaaagaggtcgaccgtgtaatgtgcgccataaataaagcgaacgcgccacggaccacctctctccaagtaccaagcagcagccgtactgacaccaggacagtggctcttccgcaaagctgatatcacctcctggaagtcttccaaggcgagatgtgatattgagaagaagtagaccatgtgtcctacgtcacaaataaagcgtacacaccatggtcaaccgcatcttcaaataccaggaagtgacgctgacccctggctctcttcctttcacctgctatcacctccagaaagcctcacaatgcgcatcatgaactaccagccaccggcaatgtggcaatgaccacaaacccacatccaatgccactaccacctccaggatgccctgtaagggtgggaccggtactgagttcttggctggtggaccaaatggccaatgtaataaataaaggactgggtctgcagccaaccacccggtgacctgcactgcaccctggctaccactcaggcctggctctcaagtcggcatggcctccgggaagccccagggctggctgatactgagaatgagtggaccatgctacatctgtcattcaacaatgcatatgctttatgctctaccatctctccaagtactgtggaatggcgctgaagccagatcagtgtgtctcccacgaaggtgactttgcctctctctgggaagccctc

SEQ ID NO: 1885658 - DNA, 4001 bp, Homo sapiens
catcatggccaccacaaaaaaaggtgaaaactcctctgaacagcagacagcacagcctggcgcggacactggcacacaggcccacgggacctggcgggccacaactaaatgcacccatcttccaccttctctgtccacccccaggtcactgatgtcaggggatggagggagccctgagctccactcctgctgagtcttgtccatcaacctcccttcccgacccagcccacccccatgagatgcccaacgtgccagcctccagccctggtgcacacagggccagtttctggaacactcaacagcacaccacccaggcagctgagggctactcaccgctcgggtccggactcgctcatccctcctgcaggcggccccaggtccagttagggccttggactcaggcccccgtgccaggagcttgaccagctcttaacaatctgcccagggcagagacgtgaggtcccctcctgcccacctggtgaccccggttgctcccaaagtgaaaaagagaaagacaacaaatagaagccatcacccccactcccaagctccacccacccgctcagagccctgctgcggggacgacaagacccttgtcatgccccaagcccatgagcactgacctcagacccaaacagtaagcctcgtccagacccctgtccacctgtctgagatcaacaaagacaagcatacccatcctgacaccacagaagctgaggggtagaccaggaagggagcgggtgcatgggggaagcgggggtgaggaaggggagacgggaggtgggaaggaagggcaggggagagggtgctccctcctgcaggaagggagggggtgcattggggaggaggggtgagaaagggaagatgggaggtgagtgggaagggcagaggtgagggtgctccctcctacaggaagaaggggtgcatggggaaggaggggtgaggaaggggagatgggatgtaagtgggaagggcagaggtgaggatgctccctcctgcaccctcttgtcctctctaatggcctcagctactgcaaggcctctctccccacactggctgccctgctgccccgatgctcatgcctgggctggctgtcgtggcttgttaatggggttaatgatgccaatatcacagggcttggtgcgggtcacctctgccatgcacaggacctgagttagtcagagaggcagaagacagaggtccaagaaccaggggccacggccgtgccccctgctcatgttgccattgggcaccctcaggtacccagcctgagcagggtacgcacaggggaagaagggagcccagctgacagcttctggggacccagagttgggaatccttggggagaggggaaatgtctccagaacaggtttaaggagagagtaagaagccgcctgtgaggggcctcagcctcctggtcatgaaagagtcctgggtagaggcagagacccctcgaggagaccctcctcttggggcacagaaagggccagccctggtccgccaaagccccaccccctccaccctgggcacaaaggggcaccatctctccaacgtctgtccatccatcctgtgggccgggtccctttggagggctctgtgtgggagcacagccccagcccctcagtgggagaagccccagggctacccaactccccctccggcctatctgcccttggctgtggagtcagcccagggggtgtcccaccaggggcatagttccctgccaaggaggggcctcagagatggcccagccccaggccctcccctccaggaagtcagagagctgcagaagagagagagaagagcccaaggagcatgccgggaagaggctggcaggacagcagcggacttgaggacgcgtccccgtgcagccaagggtgcagaggagggtccgggggctgcgcgtggttgaaggggatgaagaaaggcatcatataggagctggataactgtgcatcaactcctgtatgaagccgttcccaccccccaactactgactacgggccgcaaccctcctcccggaagcgcagtgcaagcgctcggatggcagaggggacgcctgctgctagtggttagagcagtgacagcaagggacagccagcctaggcagtgccacccactgctgggcacctgcagcgctggggtacctgtccaccctgcccagccttgccctacctgcctcctatggccagggcctgggcctcccttagccccacagagcccccaggtgactgtgcagccaggccaagggacggaggatggggaggtgaagggggagacaggcctgattctggcccaggtctgtgagtggacatcggggactcgaccccacccacccactgctttgactccctggtacttctccagccttgccttctacatctgtgaaatgggttgcaacaggcacctctggggacccagtgaggactcatgaagtccaggggcacttcaagaatttcccagagacagaaagtagatttttggttgctgagggctggggggtgtgcatggagggtgaaggtgacagctgaaggctctggagttcttttgggggtgatgaaaatgatcttaaattgattatggtgatagttgcagatatctgtgaataactaaaacacacttcgctgtgagctttaatgggcggattgtgtgtatgtggattacatctcaataaagttgtaccccaaaacaccttcctttgttctttgacatctttctcaaccaccatactgcctgcctcgtcctacactctccagccatccacaccaccaacacacatgcacagggacacgcagccaggcacgtggtaggtggtgcaaaaatatctgtgagtaaatgacctgataatataacattctctgaaagagcccatggagggaaacctttagggaaaggggttaaagattaagaagtaggggtggcaggagggtatggaggtgggaaagaggctcagagtgacacatgaatggaaaaggggctcagattgacagacacatggagggaggaggggctccctgtaacacatgggtggaggagggggctggtgtgacacacgggtgggggaagagctccatgggacacatgggtggaggagggggttggtgtgacccatgggtggaggagggggctggtgtgacacatgggtggggggggttagtgtgacacatgggtggaggagggggctggtgtgacacacgggtgggggaagagctccatgtgacgcatgggtggagagggggttggtgtgacacatcagtggagagagggttggtgtgacacatgggtgtggagaggggctccatgtcacataagtaagggaggggctcagggcaatgcatgagtggggggaaggtctctgggtgatgcatgggaaggggaggacttcaagtgacatgtgagagaagctcaggtgacacattagtagggaaaaggctcctcatgacacatgagtgaaggagaggtggaatgtgagacagaaaaggggctcagtgtgacgtgtgtgggaagagagtctctgtgtgacatatggggggaagggacttggagtaacacaagaaaggcgacttggtgtgacacgtgggtgggaagagtctctctgtgacatatgggggcagggacttggagtaacacaagaaagaggacttgatgtgacacgtgggtgggggaagatctcacgggacacaaggttgggaagagatgcccagtgagacacaagggtgcagggagggctccgcgtgtcagaaggagtccatgcaatacatcagtggaggaggagctcagtacgacacggggtgggagagcggctcagtgttatacatgcatgaggtgaggggtccattcgacaaacgggcagggggtgctgtgtgccttgtgagtagaggaggagcttcatgtgacatatgagcaggaaagaactcggtgtaacacatggacagggacaggggctccaggtgacacatgagtcagggaagggctctgagtaacacatgttgaagagaaac

SEQ ID NO: 1885659 - DNA, 4001 bp, Homo sapiens
gtggtggcacaccagaatgaaatgactctggctacgactgaggggtgagatcccagtatctagggattgggcactccaggaacaacttgcattcactgtgccatatgcttacaaatcacagtcccatctattttatcatttgagcctcatgacaactctgtgaggtggttgtcacacccattttaaagacaaggaaactggccgggcacggtggctcacacctgtaatcccagcactttgggaggccgaggtgggtggatcaccagaggtcaggagttcaagaccagcctggccaacatggtgaaaccctgtctctactaaaaatacaaaaattagccgggcgtggtggcgcatgcctgtagtcccagctacttgggaggctgaggcaggagaatcgcttgaacctgggaggcagaggttgcagtgagctgagtttgcaccactgcactccggcctgggcaacaagagctagactctatcacaaaaaaaaaaaaaaaaaaaaaaaaatgaggacactaaggcttagaatggtgaaatggcttgctcaaggtttcacagctgctccatgtgacagggtggagcgggtgcctggagctagggcatggtaccctgtcacctgcccccacaatctgtgccacttctgtcaaccactgtgctgaccatggcaggcacacctcagctggctgcttcctgagccctaccaggaggcgtcaggaaggtgctggtgaggcaaggctggggaatgaaccaccacctatctcaaaccctgactgggcacatggcgcctgggctgtatctacagaagactaaaactccaaaggaatctcgccattagcgttagggagataatcctgggactggtggaaggaggagacctctcttctctaggatgtaaactgcaataagccagcagctcttttgaggaggacaatggcagcagcaggatgcaggtgggatgctctgaaattaggggcacccgtgaggcatgcacagtactaccaatgtgccgagggagacccccagggtcagacagagcctcttctcagatcttgatttgaacttccaaaccaccaagatctgctggtgccgccgtcctcctcctcatcagatccccccattcacccccagccctgcagggcccaggttcaagccccgcttccctcagaaagtgttctctgaccatcaggatccaagaagcctggcttccctctgtgtcccaacgtgatggctgctggcaccacacaggagttgatattgttagttacctttttttttttttcctgagacagcgtcttgctctgttgcccaggctgaagtgcagtggtgtaaccatggctcactgcagcctcagactccagggctcaagcaattctgctaccccagcctcctgagtagctgggaccacaggcacacgccatcacacttagctaatttttaatgcttttgtagagacaagggtcttgctatgttgaccaggcaggtctcgaactctcacactgaagtgatcccctgacctcctaaagtgctgggattacaggcatgagccactgtgcacggctgatattgttagttacctttgcaaataatttttttaaaaagagtaacttcaaactgttatagtaatttagaggtgacaaagaatgtttacaaacatcatctcatggtaccctcacaacaaccctgtgaggtgagtctgattcagccatttcacagatggcgaaactgagtcttaggtcagtgacatgcccaagggcacactcctggcacagctggtactggaaccagatccgagttcacgtccgaagttccttccacagtatgcacacctcggggccacagcagctgaaggcccttccataggctgtggctggagaaggcgtgttcctctgtttggggtggtgataagtaggccaaggtgacgggtgcgatttctgtgtgagacaattccattaaccatgtccctcaatcacagatagcacccctcaccttgagcccagtttcacaggttggccagcaagcggtcttggttcaggaactccatcttagtctgcagagaaggatgcaatggcaggaagtgccaggctatgagaggcacacaatatgacatgggcgcaagctgggagcttgttcagtcaccagacacctctgatgtgtcagtctctcttcagggctcccgagacacagaaacagacacctgccctcgaggagctcacagtctagacaaacaaacccagggtccaaacaaatgggacaccaacagtgtgcgaggactgggaaggggtgcctgaggtcttctggggcactgggaaggcttcacaacagcagggcaaaggatgagcagaaggtgaccaggagtatggagagaacatgcatgagggcaggggcggggcccctttagacgcagcccagggaggacagactgaagaaggacaagagaaggtggatgggttacaaccccattacaacacttcaggggagagagtgtcaggggagagacggtgagaatatgcagtgcaggtggtgaaaatgggagccagtgagtcagagggaccaggggctcaggccaatgcacagccttcactgctggacatggtcccacaggacctcgatgctgagctggggcctgggctgagtcaggagacagggctccaggcacggcagcctctgggtcctggtgtgttcctgcagccagggatggatatactgagagcttataaggcagacgatgtgtgggtttttggggtccagagacaaagaggccactttctgaatttccaacctgactagattcatgcagtgggaatagcaggacaggccaagtggcagctgactgttaggacagaggcaaaaataaagccccgtgggagtgcaggagggagtgcaaagtcacagggagcggggcggctgggaaaggctccatctgtggagccacattctgacaggacgagtgagattttagaagtgtggggaaaagtgagaggggaagaagggccaggggcacaggagagcctgagtaagagtgtgactgacggtgcgacttgggtagctgttggcatggaggcgtacaaaggccctgcctgatacaacatctggagccctggggtgagaacaggggtgggtcagcaaagagacatatccggctttcagaaagtggccgccagagggcagctgggagcaggcaggaggccaggggcttgccgtcctgttcccctcaggcagggccatgctgggcctgctttctctcaggtggcacaaggtgtcaaatggcctcggcagccagggagatgaagacagtccagtacttccttctctttaggggagaaagaggtaatttccaatggaaagaggtttacaagaagcaaaattcagccccacctccaagagctatgaggtttaacaaccttccactcccctccaaagagcacatggagctgggcctgactcttcccgggaaggtctgcctgtaagtccctttccggggctctttctcaacactgtgctgaaggtgcagcccctgggccactgggcatcaatgaaggacataagaggttgaaaaactgggaaaacatttattatccagcaccaggagcttcatattttgaaatataccaatgatgttattacacgcaaaccaagtaggaaaaggacatacattatgctccaagagccaaagagaacaagcacttcatcctgtgttttaattcgcccggattcccactaagctatggggttttcctttttcttttcttcagagtcccactgtataaagtcgatgaagaactactctggttgcatcagggcgaggaccctggtataccttggtggacccctggaactcctcaaaatatccagtttgaaatccactgcattcaacccccaaactgcaaataaacttgcctttgaccacacatgcttctgtcccacccccacccaatccagcagcaggggcacgtctgacaagatttcattagtgagaaccaaatgcgaagaaacagtcaaaa

SEQ ID NO: 1885660 - DNA, 4001 bp, Homo sapiens
gcagccaccccccccaagtcctggcccaaacagctcctgcagggggtcattcagctccaagattccagggtggggacagagacttgcgtttcctttttactttctggcgtttctgatttctccacactgaacctgtcttgtgtgagaataaaagctgtacacagggaaaactccaacacaccctttccagtgagctggcttgaccctcggtgccccgtgacagtccctccggccttgctgtcctgtgctggccttgggtctgccctgccccttaaaaggctggggtcctcagggctgcacagagccctgcctcctctgggatgggaggtccagggctctgtggaacatgggagtttgagaaagcacattctgtgctgtaaccttatcctcaggaaatgaaataaaacaatagacactgaacccaagtgtccaagatgtaggcatacggattcatttacttggcaccaactttttcactcctcctttctggtctctcctcagccctgacatggaggtcagggatttgtgtctgtcttgtccccaacacagggcacagggcagtgcgccgactgagtgcatgattcccaggcagcagggaaacagggtgctcaggaagatgtggttttgcaaagtttagtaacccagcagcacacccgtgtggacgcatccctttccagtgcctgtcctcaccccctccccaatgtcccccacccagtgtcaactgtgcaggccctgggcacaccaagatgaaggggacagacctgggacctgccctcagggtacttccagctgaaggcagccccctgtcacccacaagggagctgaggctcccttggcgggtcaggtcaggcaaatctgtcccagagcccagtcctccactgtcccccacatgttgaccttagtccccaaatccaacagccctcccccgaccacacacacacacccagaaccctgccctctccttgcaaagtgcacagctaagggcccgcactcctcatctcccaggcctggcacgatcccactgctgccctcacacggcctgcctcagctctctcaacaaaggaccctccctgcaaggaggtttttctttttgaaatagggtcttgctctgtcatccaggctggtgcacaatggttcgatcatagctcactgcagccttgacctcctgggctcaagcgaccctcctgcctcggcctcctgagtagctaggactacaggcctgcaggcatgcgccaccacatcctgccgattttttttttttttagagatggggcctcactatgttgcccaggctggcctcaaactcctggcttcaagcgatcctcctgcctcagcctcccaaagtgcctggattacaggcatgagccactgaacccagcctcaaggaggtttctgaagctcaactatggaatacctactgtttaccaggctactaggccccttcccaaggaccccagggactgacagctcagtgcaacctgccccaagcataattttcaaggcatgtgcattctctcaataacaaagcaaaacaggtcatgcttgtctccttatccgtttccatcattttctcactactgccacatgctgtcaaggtactggatttccctcccaaacctcctcaaccaggaatggatgtgcagggatttgtgctttacctcatgagccctccagcatcccaaggacatcctgttcctaaggtaagtgactacatgtaggtagtccagtgtaatcactgtgtctgcaggaggcctccagccacctgagtagccccacagccagctcctgcccttttgggtctgggcttctcttggggcccccataccactgcttttctggcccatgggccactctcccccatccgcacacctgcctccctgaggcaaccaagtgggtcagagaggctgtcgatattcaaacccaggcctccagacccctcgttcagggcccaccagccatcacgagccctggactaggagtcagcagacctagggtttgggtctctgcttaacattctacttagactctaaaaggaaactaacatgagcactggggacccctgcccctagcaccaggctgcactactgacaacacctacctgtgtgtcctagtaccaaatacacagaacctttcgacctgcacctccaggaggtaggtacccactggaatttggataaaagaaccatgtgaccctaaacctggaaacgtggcacacggtgtggccttgcctgcctgcaggccctaaagaaggaagctgggcccggcctaaggctgatctgactcctacagcgaagagaaagcgcctggcccgtccctgctcccaggctccaacctgacagtctggacctccagaggcgctggggaagggctggtgggaagtcaccgaatgggacgctccacagggaccagggcagtcccttgccactgcgaatgtcagggactcctggggggccgagtcagactcggctctcattcatccccgcagcccatggataccctggtgacccagagccaagcaccctccgacttcagcgcctgagcgcggcccctaccgagcccctccggtctcgccccgtccggccgccgctgacggaggcgctgcgatctggcccgactccactctgcagcccagtccaggaacctccctctctccacaaccttccgcggctcccgcgacccgcagtcctcgggaaggagctgtggcccgaaggcctgctgcgccctttgcccatggcccctttcccttttaaggttccctgctctccgcccaaatcccagcctcaggctccgcaggaagcgcccgtgcgcgtccgacccccagaacccggcgggttcggccaggagtccggaagccccggaggccaccgccgccgcgggcgcgcaggcgggacgggcagaggctccccacgggcgattcccgctcgcggagtttcgcaactagcggcgtcccagtctgcgggcctcggaacgtcccggcgctccacggccgttttcgcggcagggtccgcacggcacagactagggcgctgaggttctgcggcggcgccggactccgaacccagggtccggttcccgacccggtccagaccagagccaccccgcgtactccgggtgggggagtcctcggctcaaccccgccaccccgcgcgtcccctcccgccggacctgcgcacccagcgcgctctttgtctgaggcgtccccgcgccccgcccgcgcgcccaccacgtcccccgcgccccgcctcccgcgcacgcccggccaatgaggcgcggcggcgaagcgcagtgcccggggtgttgtccgcgccgtgcccgcccattggcctcactcggcgcccccacccgggccctgccggcaggcacgaggggcggggcgcgcggcccgaggtgagggaccgcgggccggaggggatccagcgagtcagctgccgccgagggaccagcgcgggtctagctgctgccgccatccccaccatccctgaccgcgcctgcccgggctccgcgccaggaggagcggccaggcccagccccggcaccgcgcgctcggggaccccgacggcgcccagcccggcgaggggcctcagggggaggacgaggaggaaaggcggcctcgccggggacccggccatggcgctggacttcttggctggatgcgcggggggtaaggaggcggcgggccgggccgggccggggcgaggcgtccggggagggaggtcggcccaccagcacgccctggcctcgcggcttcccgctggcgggggtcgccgcgtctgtgaatggggaccacagttctcttgcctcgggcgggtctcgtgggcgtaaattgacttcaggcccgggctgtccgcgagggcaggtgtctttattctctctgggcacgctcggacgggaggtctggggcgccggggcagcaccgtggctgagcggaggccaggactgccgggaggatgccccactgccccccgcgccgaggtcccgggctcatctccttcccctccccc

SEQ ID NO: 1885661 - DNA, 4001 bp, Homo sapiens
gttaaacagctggactctgcacttggaaatgctctccctggcagagggaggggcactggagggagacccaagtgccacaggctggagggacctagcctgtggggcggcctctccagcagggctgtggcccaggggctggggaagaggggtgctgagggagagtgggagcaggcagcccagagggatggtgccagggatccccactcccatgctaggcatggagaggagcggtcccgaggaggaggacaagggggagggcaggcacaggctgtgacttccaaggcagcgacgtctcaactaggggatgacgggagcccagctcaggaagatctcccgagcccaggagctcactgatcaacaatgagtgataaaggacagccttagctcattctttggggtcactcctgaggtgctccttgccttcagccctggaccctgggcatgggcagcatgttctggagtcactaagtctccaggtcagctgcaaacaggcctctggtcatcttcctgtagtctgggcaggccaggggtgcaaatatgacataagcatcgggtagctgagagccagcccagcctgggggatgtgccaaccggaagcaagggcatggcgggtgctcccgctgacactggaattggggatgccattctgtcacacttccaaagccccccagaacagagtggagctggaaaattaacaggccaagtgacacaggtcctacacaaagtccacagggtcaaccagcgcagagccagctgctgcctggagttgacagcaaagaggaaggcatccaaggtgggattcgatatcggaaagaggttgactgtataatattcatcatatagaaagtgaacacctcacaggcaacctatttcaggtaccactgagcagcactgactccagggaggaggcttcttccacagggaagggccctgccacccacccgcctccaggatggaggccagcacagggctgcaggtggaagtcaagcgcgtgctcggccaccagccatgcctctgggggcccacagggcgcgcaaccggacctccccgacatcagcaggtgcaggaatcatgcaggtgggatctgatactgaagagaggccgctcgtgtcttgtgtgtcatgatttctgtgaatgcaacacaggccacctctcctcaggcaccacaaggagcagcacacgcacacggccacccaaggcaccagctcccacccagggtctcacagcactgagatgagcagaaggcagcccaggtgcagggaatgcatgcagccgcccccaacatcctggcgaggggtgggtggccttccagcaggatgccttccagcgggactagctcccccgtgtcctctgcctcgatgacactggccatgaaaaacagactgagccccgtcaccattgctcatcagcttcatgaccgccccccaccacagtgcacaaccctagcatcttccccaaagtccacatggccccccgaaagctctcccaaaatgattcaatggcgggggtcaggggaaaggatgacaaatgtcacaccagcccatgcattcacgtaccctggaaagtcccgcctcaggcgtggcgcccgcacaccaccgggcggtagcggtactgaaaacaggccatctgtgttatattcgtcattaataaaagcgaactcatcacagacaacctcttctcaggtacccagagtgccatcggctcaagaacgtggctgccgcgtcccgtggtgccagcgctgcccccgggaagcagtcctgaggacggatgggacatcaaaggtgagaagacacagagacaggaaagagacccctgcccggcccactctcggtgaccaggccccactgaggcagcgactccaaagcacccgtcctgctcctaccctcaaaagggcttcatctccaacgggtcctccaaggtgagatttgatactgagaaaagatcaaccatgtattattcgaagtcaataaagcgaatataacacggtcgatctcccttcaagtaccaggaaaggcgctgagctgaagcgcgatcggctccccggcccgcaggccccacaggctgcagcggatacggacggctagtggaccaggtgaagtacattagaaacaattactttccaactggtcgaccatccatccccgtaccccagaatggtgctgatgccggcgtccttccccgaggtgccccagcctccaagacggcctccctggtggaatttgataccgaaaaggggttcaccgagcaacattcgtcgtccagatgcaaagttgctcgggtaacctctccccgagtaccatggagaggctcagatgctcggactaaggtgaatgcttgcaggcggctgtgcttgcagaagaccctcccccaagggcagcacaaggtctgggcattcagagcccagagcctcacactctccaaggacgttcccaatcaccaagtccaacgattccaaccccttccagaatgaatctagagactcttcccagaagttgagtgcaagacccaggtaggatcttatactgaaaagacggcaaccttccttgggcaccttgctaaagatgaaaatgaaaccctgctcgcacccgcttttcattcccagaccctgagagggggtgaccctgtagggacccctgcacaagcacagagcctccctcccagcagaggattcctttggcgggagctcaacggggcacaacgctgaccccagacctgcggtctcaccagcaccatctccagcccacagaggcatcaccccaggatccctcaaagagtaacttcacagttatcaacagctggctgaccatctgattagcctcataaagcaagtgagacattcaaaataagggactggggggataaatgcagcagaagaaagcaggtgagtcacagatgtcttctcttcacaagggtcagggcagccctgacctcagaacccaaccttccccagactcagagaacacccagaaggtgcctcctggagcgggcagccagcaagcatcgggccagacgatggatgccacaagcagagtccagattctgtgcccaccacccattctgtgaactttggagtgggaccgacagcagaatcctttccctgacgttggcatgagctcagagagccctctgcgccttgctacaagtggagcaagaggccagccatgcgaggcctgctgtaaagaaagaaaagatgtcacagacgacttcccttcaggagccatgggcactgacctgcatcagagcctccttcctggggcaggcatcacctcccaaggtggtcccggaacgcaccggagtcagcaggagtggaacagatgacatgcaccgtgggtacaatcgggcctgtcccatgggcggccctcaggcacctgccctggagagggctccggctgcaggccgcctcctgagggtgctgttgcttctggaaattctccaggtagggtttgatctgaaaagaaagccatgtgcaatgctggtcaccaacaaagcaggccagcaaacaacgagctctttccacagccccagcaaggtttttgaccttggaaacatcaactccagaatgactttcagcctctatgaccaaatgacattcggcaccaacgaagggcacgtccttggggccagcatggaaccatgtaaggtatcaacagcagagtctgaggaaggactgaaccccagaatgttcctggatgcctgtgtgttcatcaatagccttggaagtgtgaaaggaaagttatctcgggcccctaaaatcactaaggaaaactcaagctggaagctgctcaggataaacctgcctctcattccattcaaagtcatccctctgctcactgagacagatgcgtatctgatttgcctcctttggaaaggctcatgagaaacgcgaaagaatgtaatcatttgtgtatcacctgtctgtgacctggaagctccctccttcctgccttcgcttcaagttgtcccacctttgcagacaaaaccaatgtacttcttacatgtgc

SEQ ID NO: 1885662 - DNA, 4001 bp, Homo sapiens
gacgcagacttggagtgacaatcatatttgattcctactcacccttttcaatgttttcatttatttttttaaatacaacaaacacagatgaacccaccactgacccagaccaaaaatattgattagtacatccaaatacttcttatccactgaggtcaaagtcttgttttattttatatagtccacaattgtacacaaatggataaatcttaatctttaggtcataaaacactgtctttgtggtccattcttgacattctttcatttcgtcacttttgtactcatctaattcatttttgactatgcagccactacacttgaagtcaccatttagcccaagaccagtgactattctgtatacctgttgatacacttcctaccctcagcctcaacagcctagaacctggcttttgttttggaataacctcacagaagcagagactagaaaggtagttactaggggtcaggagtgagaggaatctggagatcttagtgagaggatgcaaacttaggagtaagatgcagttaggagtaagttctggtaacccaatgcagagtacggtgactatagttaacaataatgtatttcatgcttgaaatttgctaaaagagtagaccttaagtattctcactgcacacatggaaaaacggaactacatgaggtgatgggtatgttaattcgcttgattatggtaatcatttcacaatatatatgtatatcaaaatgtcacactgtacaatttaaatacaatacaaatacatacaatactgatttatcaattatatatttataaagctggggagtgaggaacacattgccatcattggtacatgcttggctgtctctggttttatttacgcattcattcatttttaactgttcaatcaacacccacaaagccggcttttatttgtctgcactcaccttctctgggagagaaaccccagtgtgcccattctatggaacataaagccggttaaaaaaagaaaatagcctacgaggccttttttgtttgttaatatcaggttaccagacctggattagtcataatcctttgcccagaacacattctcagaattgttccattcgaggcctttattaccttatttctttattccttgattatttttaataacaaaattaatagccacgaaccactctgatttctttttttaatgcccctcagttgtgaagaattaatcaccatccctggtttacaacccactcccgtccttgctgctggcatgtctctctcttcttgtattgattgttaaaaccacccacgagaattaccactggtggtccccacctccatccctccccctctcatgcccctgcctccctctaccttaaacaatcactcccaaatctcctggatacaatccctttccagatatatatatatataaatttacaacatatatgtaatatatgtattcttaaatattttccatgggtcagtggcttgcaggagttttcagtgaaggctaaagagaagggtcgagggagagtgtgaaatacacaagcttgagttcagagtacacccactgctggggggattggtaaaagccctcaaacccagatcactgagccatctgcacctgcgcacacaccacgagccagtgggcccagtggttgcagcacatatgctcacacctcagtacccacctcccaaatccagcctcaatgccagacgagctgggtgacatcagcaaagcaaactaacgtctctgtgcctgtttccccatcagcaagatagttgcagtggggggtccccaagcaaagttatgttattattttcaagccaatggcaaccaggttaaaaaaaaatacaaaaaaaccctccatcccacctctgagccccctccctcacccaaatcttggctccctctgcagcagcgcccgagctctggtgttagacagacagacagaccaggttccaccccagcaggcactcgtgagctgtgtaactgcagagacgtgacctggcttctctgtcttgtgccccgacttgtacggtttgtagaatgaggaatgcagcgccctcgtgggtccaaccggagggtgacctgaactatcgcccatccctcaagtagcccgccttgcacacctgcgcacaccccaccctttccccgtcccatgacgcccagcccactgctcaaacagtccccagtttgatcaaagaaatgaattagttcaatgctcagatcaagccaagggtttgggactcgggcagggaattgttcgggcatgttcttttttggacatggcatcagagcttaaacaaatacactgaaaaacagaaatccaactaagggatgtgctttggaaaatgaaaattcattttgtgaagtgggactgcccttggggaagtctatgcagtgagattcttgatgttcaacttgattccaagaaaccaaaagaggcttcactatgggccttaccaaagatacacagccagtttccttcttacccctccccccagcttgtcctgggtgtgtaccacctgccacaactggcctcagagcaactcagggacctgaaaataattctatatattatatagagttatggtgtaggtgtataacgtcatttacacatcaatctgtccattgggggactgtcatgagggagtcgtgggaagaccaccagtgtggggacctgcccctgccttcttcatactgtgaggccttggagaaggcctgtcccctccctgagcctcaggtggcgatcgtcccaccagcctttcctccctcctaagtggtgtgaaaatgaaaagcataacattttaagtgcaagttccctccaagcagcagggatcattaatattgtacctcctgtacccagcacgtagtgttcacagcatgcctcagcatacattatctcgtttgattctcacaacagtcctgtgaattagacataataatcataattagccaatatttattgaatgcatactctgtaccaagcaccacactgcctactttgcatacattgacactcctctggggtggatacaattcaatagtatctcataaatttttccccaaaatttctgagcatgcactttgtattgttgctgggtctaagtgccagggatacagtagtgagcaaaacggacagatcccggttccatgagaattaacatccctgtgggtggagataggaacagaaaatcatcagaaaaggtaagcctaatgcatgggataaaagatggtggtaagaactagggaggaaaataaagcaggaagggggtagggagtgacaccagggaggaggcctcacggagatgatgatatttgagcaaagcattactagtcctattttatacctaaggaaactgagactcagggaagttaagtgacttataagtggtcacacagcaaggaaatgctgagccaggaggcaaacccgggcagtgtcgctccagagtcggccttaccacttcttccggaagcctcgttttggcagcaatgtcccactgccagcccgcaatgtgagtgtgagaataaatcacgtggcgggggctgggggggaggtgcgaaggtttttctgacctcccacacaggcagccccagaagcagagggaatccccaggatgtaccattggacctggatgaataaatagactgtccatcttggaggagatgcaggggcaacagttcttacaggactggcacagaatctgaagtcaggcaatgctgggatcacagcttatcctcaacacagcccagcaagtcagcaccaatgctaaacccatctcctcccgcctggctgttagggcatccgattgcaccccgccagaggcaccccatgtgatgtgcagccacatgccacctaggctccagttacagatgtgctgccccaggaaaaggaggaggcttcccagtcctcatgcccctcatggtaagagactcagaatttttccaactggccacctccaaaagagcaagtcaagaaacatttctcaagtgactgtttctcccccaaaaaataggaa

SEQ ID NO: 1885663 - DNA, 4001 bp, Homo sapiens
gcaatcctgtaccatttgaaataatgtaaatgtaaaatggctgaaatccctttagggcctgcaaaaacaccctgggagaagaacctctgcctctgcccaaagccactgcctccaggaagccctcctggtgaacactggctaagggaggttagaagatgcagtcacatgcatcattaaagaaaaaagagaaacagaaatccaacgcactccgtttgcaaatcacaaagcagcactatgacaagtgtcccttctcctgaatttggcattgtattcagaaagccatctgagcagttagttgttactcagaagtattcatctagggcaagattcgtcaaaggaaaatgagattctcatgggccaactctctctgaataaacacatgctaacaccaggaatccaagggtctttccattggcaagaatccctaaaggacaccaatggactaagagagcagtggggcttagaggtcccagcagcaagtcctgtagccacactgggtgctctggggcctccttcctgtggactggccttccctcaagtggacagtgaggtccaaaagtcactccaaggatgggctaggtatggagagtgggtagaccagatgacccacatctacattagacattgactttgctgacggtcattctttcatgtatctgggagatgcactgaccacgagacctcttctcagaggctggcatcatgctgggcagacctgccggagtagcagcccatggatgctttgtgataagtagggcccatcaagggaggccctttgttcttttcttttttttttaacctattgtgttgagacaggggtctctgtcagccaggctgaagtgcagtggcacaatcttggctcactacaacctcccaactcccgggctcaagtgatcctccagcctcaacctcctaagtactgggaccacaggcgcacaccatgacacccagctaatttttgtattttttgcagagatggggtttcgccaagttgcccacgctagtttcgaactcctgggcttaagccatccaccgtctcagcctcccaaagggctggggttacaagcgtgagccaccgtgcccggccaaggtaggccctttttgctaggcagaacaggtggtctgaagagaaaaccctatatcatctccaaagccagcatctcttccagaaagttcttggaaggaagcatgagatgaggagggtcagagaaccaggtcacaaacagcaagacagaggcacatgccctgtggtcaaccatccacaccccagggctatcctggccatctaacaggttgctggagtcagccttgttcccaagaaggcttcccaggcaggatttgctccccagagagagtctgcccttgtataatcattgcaagtaaagcaaatgcgtgaaggattacctctcttcaagtagcaaatgatggcagtgacaggaaggccatttcctctgtgactaagttgccaccagctccaggagcaagccttagagacacagatgggatctgcatggtgagagcagcacaccgaggtgtgaagtgcaggcccgtgggtgaatcacacatctattccttccatagcccctgaagcagtgccccttcctgaaattgacagcccactcaggtattctctaaggtacaactagtcacagtaaaagaggttcattccagaaaatgcattgcaatcatggtaaacatacagagaacaaacttcattcaaggtcaatgaggcaatactgagaacacagccttgtaacaacacattatgtgtgcaccaagggcagtgagcaaacagcagagaagctgacggcgtatttcatacaaagtacaattctgtgtctgtccgtcctgtacccaggaggggtacagataacatctcctcttccatggcgacttcacgtcctccgaggttttcaaagcagcatttgatactgaaaacgtggattttcctctatgattaatcataaataatgtactcatagaaggagaatctaccttttaaataccaaagaaggattccatccaggaaagcgtgcacctgtgcttgagtcatcagaaaagaaagtcacatgaggcagacgagcttccagggaagaactggcaccacgagacccacaatttaatcttcaccaagttggcgtctcgagatggttctcgggcataccccgttcattcagatacgacgtgcggcctaccatctttgcacctactcaggccctacggtctcttccagaaacatttccaaagcagcatttgatactgaaaacatggattttcctctatgattaaccaggaatcacgtaaacatagaaggaatatccacgttttaaataccaaagaaggactgggctctggaaaggacaaatctgaacacagttcatggaaaatggaagcaagacagtaaagcaaccgttttcagtcccgtagcatagctgtgacaacacaccacagcctgtgcaccaagctggctcctcagcgaaagggggcttctaaaggtgatggtcagcagacatatggcacgaactcagcacatgttctgcggcccaccatctttccacttaccctggagggctcagccccacctcacgtccctgatggtggcttcagtccagccatgatcccaaggcagcatttgatactgaaaacgtggattttcctctatgattaaccatcaaacacgtaaccatagaaggaaaatctaccttttaaataccaaagaaggtttcatcccggaaagcacgaacctaagtacaatccatcaaacacaaaagtaacatagcacagaggagagcattcggcctcatggagaaaatgacgacggagcccagccgcttggccgagcgggcagcttgcgagaggggtctcctcaaggcgggtgggtggtccgcagacatatggcacgaattcagcacatgttctgaggtccaccgactttccacttaccctggagtggggggggggactttattgtctcttccctgatggtggtttcagtccaggaatgtttccaagcagcatttgatactgaaaacgtggaatttcctctatgtttaaccataaataacataaacatagaaggaatatccaccttttaaataccaaagaaggattgagtcctggaaagcatgaacctaagcacaatctatcaaaattaaagacagcacaggataggtgcagtcggcaggggcctcccgggctagcggcagtgacatgggccctgcggaggacgcatgtcccaggacagaccttgctaacaagagcttaggttctgggattcaccttccatcactctccgcatgggggagggagctaaccttcctctcagaaatgttcagaaatgttttaaaagcagccttagatactgaaaatgcggattttcctctatgattcaccataaatcctgtaagcatagaaggaacatccaccttttagatgggaaaagtgggaacagccctggagagcacaaacgcaaacatgattcatgaaagacagaaggtaacagaagcaggtgagcactttgcgagtcccacgtgggaagcgcagggcccacccctggcctcttcacatccagagatggaactcctatgcaggcaaacgtaagtttggggtctgccctgctgtcactcgtctgggtgggggtaaccctaatgtctcttccctaatggaggcttcatggtcaagagcgtttccaaagtagcatttaattctgaaaaaaaaaaaaaaaaaaagtgaatgtacatcaaaaatttgccacaagtaaagcaggcaaagtagggattctatgctttgaattcgaaaaatatcaaaaacaaaaagaaaataagcctgtcaggttcctaaagtcacatcgcctccatgaagccctcccaaggcacctaatgaccaatgtcatgtaactgtgggctggagcatccttcacataccttggagggagaaggacacccaagaatcttccagagactgaagcttgtgtccagaaagtttcaatcggcaggactggt

SEQ ID NO: 1885664 - DNA, 4001 bp, Homo sapiens
acctgccggagtagcagcccatggatgctttgtgataagtagggcccatcaagggaggccctttgttcttttcttttttttttaacctattgtgttgagacaggggtctctgtcagccaggctgaagtgcagtggcacaatcttggctcactacaacctcccaactcccgggctcaagtgatcctccagcctcaacctcctaagtactgggaccacaggcgcacaccatgacacccagctaatttttgtattttttgcagagatggggtttcgccaagttgcccacgctagtttcgaactcctgggcttaagccatccaccgtctcagcctcccaaagggctggggttacaagcgtgagccaccgtgcccggccaaggtaggccctttttgctaggcagaacaggtggtctgaagagaaaaccctatatcatctccaaagccagcatctcttccagaaagttcttggaaggaagcatgagatgaggagggtcagagaaccaggtcacaaacagcaagacagaggcacatgccctgtggtcaaccatccacaccccagggctatcctggccatctaacaggttgctggagtcagccttgttcccaagaaggcttcccaggcaggatttgctccccagagagagtctgcccttgtataatcattgcaagtaaagcaaatgcgtgaaggattacctctcttcaagtagcaaatgatggcagtgacaggaaggccatttcctctgtgactaagttgccaccagctccaggagcaagccttagagacacagatgggatctgcatggtgagagcagcacaccgaggtgtgaagtgcaggcccgtgggtgaatcacacatctattccttccatagcccctgaagcagtgccccttcctgaaattgacagcccactcaggtattctctaaggtacaactagtcacagtaaaagaggttcattccagaaaatgcattgcaatcatggtaaacatacagagaacaaacttcattcaaggtcaatgaggcaatactgagaacacagccttgtaacaacacattatgtgtgcaccaagggcagtgagcaaacagcagagaagctgacggcgtatttcatacaaagtacaattctgtgtctgtccgtcctgtacccaggaggggtacagataacatctcctcttccatggcgacttcacgtcctccgaggttttcaaagcagcatttgatactgaaaacgtggattttcctctatgattaatcataaataatgtactcatagaaggagaatctaccttttaaataccaaagaaggattccatccaggaaagcgtgcacctgtgcttgagtcatcagaaaagaaagtcacatgaggcagacgagcttccagggaagaactggcaccacgagacccacaatttaatcttcaccaagttggcgtctcgagatggttctcgggcataccccgttcattcagatacgacgtgcggcctaccatctttgcacctactcaggccctacggtctcttccagaaacatttccaaagcagcatttgatactgaaaacatggattttcctctatgattaaccaggaatcacgtaaacatagaaggaatatccacgttttaaataccaaagaaggactgggctctggaaaggacaaatctgaacacagttcatggaaaatggaagcaagacagtaaagcaaccgttttcagtcccgtagcatagctgtgacaacacaccacagcctgtgcaccaagctggctcctcagcgaaagggggcttctaaaggtgatggtcagcagacatatggcacgaactcagcacatgttctgcggcccaccatctttccacttaccctggagggctcagccccacctcacgtccctgatggtggcttcagtccagccatgatcccaaggcagcatttgatactgaaaacgtggattttcctctatgattaaccatcaaacacgtaaccatagaaggaaaatctaccttttaaataccaaagaaggtttcatcccggaaagcacgaacctaagtacaatccatcaaacacaaaagtaacatagcacagaggagagcattcggcctcatggagaaaatgacgacggagcccagccgcttggccgagcgggcagcttgcgagaggggtctcctcaaggcgggtgggtggtccgcagacatatggcacgaattcagcacatgttctgaggtccaccgactttccacttaccctggagtggggggggggactttattgtctcttccctgatggtggtttcagtccaggaatgtttccaagcagcatttgatactgaaaacgtggaatttcctctatgtttaaccataaataacataaacatagaaggaatatccaccttttaaataccaaagaaggattgagtcctggaaagcatgaacctaagcacaatctatcaaaattaaagacagcacaggataggtgcagtcggcaggggcctcccgggctagcggcagtgacatgggccctgcggaggacgcatgtcccaggacagaccttgctaacaagagcttaggttctgggattcaccttccatcactctccgcatgggggagggagctaaccttcctctcagaaatgttcagaaatgttttaaaagcagccttagatactgaaaatgcggattttcctctatgattcaccataaatcctgtaagcatagaaggaacatccaccttttagatgggaaaagtgggaacagccctggagagcacaaacgcaaacatgattcatgaaagacagaaggtaacagaagcaggtgagcactttgcgagtcccacgtgggaagcgcagggcccacccctggcctcttcacatccagagatggaactcctatgcaggcaaacgtaagtttggggtctgccctgctgtcactcgtctgggtgggggtaaccctaatgtctcttccctaatggaggcttcatggtcaagagcgtttccaaagtagcatttaattctgaaaaaaaaaaaaaaaaaaagtgaatgtacatcaaaaatttgccacaagtaaagcaggcaaagtagggattctatgctttgaattcgaaaaatatcaaaaacaaaaagaaaataagcctgtcaggttcctaaagtcacatcgcctccatgaagccctcccaaggcacctaatgaccaatgtcatgtaactgtgggctggagcatccttcacataccttggagggagaaggacacccaagaatcttccagagactgaagcttgtgtccagaaagtttcaatcggcaggactggtcatgttggtgtgacagactgaggaataggcaaacaggtcaaaaacaatgtctctttaaatacaactgagagaggtagcaaaacatgatgctcaccagcccctaccaccaccaccctccaccaccaccaccaccaccaccaccaacaccaccaacaccaccaccaccaacaccaccaccaccaccaccaccagtaccaccaccaccaccaccaccaccaccaacaccaccaccaccaacaccaccaccaccatcagtaccaccaccaccaccaccaccaccaataccaccaataccaccaccaccaccaccatcacaaccaccaccaccaacaccaccaccaccaacaccaccaccaccaacaccaccagtaccaccaccatcacaaccaccaccaccaacaccaccaacaccaccaccaccaacaccaccaccaccaccaccatcagtaccaccaccaccaccaccaccaccaccaccaccaccaccaccaccatcagtaccaccaccaccaccaccaccaccaataccaccatcaccaccatcaccaccaccaccatcaccaccaccaccaccaccaccaccaccaccactaataccaccctccaaaaacaatgatcacagcttccagaaaaatcatttttggggtggagtggatgcagaggcttactaaaatagcgacaacacatgcctcccatagcaaaaaatgaaggac

SEQ ID NO: 1885665 - DNA, 4001 bp, Homo sapiens
attctcatgggccaactctctctgaataaacacatgctaacaccaggaatccaagggtctttccattggcaagaatccctaaaggacaccaatggactaagagagcagtggggcttagaggtcccagcagcaagtcctgtagccacactgggtgctctggggcctccttcctgtggactggccttccctcaagtggacagtgaggtccaaaagtcactccaaggatgggctaggtatggagagtgggtagaccagatgacccacatctacattagacattgactttgctgacggtcattctttcatgtatctgggagatgcactgaccacgagacctcttctcagaggctggcatcatgctgggcagacctgccggagtagcagcccatggatgctttgtgataagtagggcccatcaagggaggccctttgttcttttcttttttttttaacctattgtgttgagacaggggtctctgtcagccaggctgaagtgcagtggcacaatcttggctcactacaacctcccaactcccgggctcaagtgatcctccagcctcaacctcctaagtactgggaccacaggcgcacaccatgacacccagctaatttttgtattttttgcagagatggggtttcgccaagttgcccacgctagtttcgaactcctgggcttaagccatccaccgtctcagcctcccaaagggctggggttacaagcgtgagccaccgtgcccggccaaggtaggccctttttgctaggcagaacaggtggtctgaagagaaaaccctatatcatctccaaagccagcatctcttccagaaagttcttggaaggaagcatgagatgaggagggtcagagaaccaggtcacaaacagcaagacagaggcacatgccctgtggtcaaccatccacaccccagggctatcctggccatctaacaggttgctggagtcagccttgttcccaagaaggcttcccaggcaggatttgctccccagagagagtctgcccttgtataatcattgcaagtaaagcaaatgcgtgaaggattacctctcttcaagtagcaaatgatggcagtgacaggaaggccatttcctctgtgactaagttgccaccagctccaggagcaagccttagagacacagatgggatctgcatggtgagagcagcacaccgaggtgtgaagtgcaggcccgtgggtgaatcacacatctattccttccatagcccctgaagcagtgccccttcctgaaattgacagcccactcaggtattctctaaggtacaactagtcacagtaaaagaggttcattccagaaaatgcattgcaatcatggtaaacatacagagaacaaacttcattcaaggtcaatgaggcaatactgagaacacagccttgtaacaacacattatgtgtgcaccaagggcagtgagcaaacagcagagaagctgacggcgtatttcatacaaagtacaattctgtgtctgtccgtcctgtacccaggaggggtacagataacatctcctcttccatggcgacttcacgtcctccgaggttttcaaagcagcatttgatactgaaaacgtggattttcctctatgattaatcataaataatgtactcatagaaggagaatctaccttttaaataccaaagaaggattccatccaggaaagcgtgcacctgtgcttgagtcatcagaaaagaaagtcacatgaggcagacgagcttccagggaagaactggcaccacgagacccacaatttaatcttcaccaagttggcgtctcgagatggttctcgggcataccccgttcattcagatacgacgtgcggcctaccatctttgcacctactcaggccctacggtctcttccagaaacatttccaaagcagcatttgatactgaaaacatggattttcctctatgattaaccaggaatcacgtaaacatagaaggaatatccacgttttaaataccaaagaaggactgggctctggaaaggacaaatctgaacacagttcatggaaaatggaagcaagacagtaaagcaaccgttttcagtcccgtagcatagctgtgacaacacaccacagcctgtgcaccaagctggctcctcagcgaaagggggcttctaaaggtgatggtcagcagacatatggcacgaactcagcacatgttctgcggcccaccatctttccacttaccctggagggctcagccccacctcacgtccctgatggtggcttcagtccagccatgatcccaaggcagcatttgatactgaaaacgtggattttcctctatgattaaccatcaaacacgtaaccatagaaggaaaatctaccttttaaataccaaagaaggtttcatcccggaaagcacgaacctaagtacaatccatcaaacacaaaagtaacatagcacagaggagagcattcggcctcatggagaaaatgacgacggagcccagccgcttggccgagcgggcagcttgcgagaggggtctcctcaaggcgggtgggtggtccgcagacatatggcacgaattcagcacatgttctgaggtccaccgactttccacttaccctggagtggggggggggactttattgtctcttccctgatggtggtttcagtccaggaatgtttccaagcagcatttgatactgaaaacgtggaatttcctctatgtttaaccataaataacataaacatagaaggaatatccaccttttaaataccaaagaaggattgagtcctggaaagcatgaacctaagcacaatctatcaaaattaaagacagcacaggataggtgcagtcggcaggggcctcccgggctagcggcagtgacatgggccctgcggaggacgcatgtcccaggacagaccttgctaacaagagcttaggttctgggattcaccttccatcactctccgcatgggggagggagctaaccttcctctcagaaatgttcagaaatgttttaaaagcagccttagatactgaaaatgcggattttcctctatgattcaccataaatcctgtaagcatagaaggaacatccaccttttagatgggaaaagtgggaacagccctggagagcacaaacgcaaacatgattcatgaaagacagaaggtaacagaagcaggtgagcactttgcgagtcccacgtgggaagcgcagggcccacccctggcctcttcacatccagagatggaactcctatgcaggcaaacgtaagtttggggtctgccctgctgtcactcgtctgggtgggggtaaccctaatgtctcttccctaatggaggcttcatggtcaagagcgtttccaaagtagcatttaattctgaaaaaaaaaaaaaaaaaaagtgaatgtacatcaaaaatttgccacaagtaaagcaggcaaagtagggattctatgctttgaattcgaaaaatatcaaaaacaaaaagaaaataagcctgtcaggttcctaaagtcacatcgcctccatgaagccctcccaaggcacctaatgaccaatgtcatgtaactgtgggctggagcatccttcacataccttggagggagaaggacacccaagaatcttccagagactgaagcttgtgtccagaaagtttcaatcggcaggactggtcatgttggtgtgacagactgaggaataggcaaacaggtcaaaaacaatgtctctttaaatacaactgagagaggtagcaaaacatgatgctcaccagcccctaccaccaccaccctccaccaccaccaccaccaccaccaccaacaccaccaacaccaccaccaccaacaccaccaccaccaccaccaccagtaccaccaccaccaccaccaccaccaccaacaccaccaccaccaacaccaccaccaccatcagtaccaccaccaccaccaccaccaccaataccaccaataccaccaccaccaccaccatcacaaccaccaccaccaacaccaccaccaccaac

SEQ ID NO: 1885666 - DNA, 4001 bp, Homo sapiens
aggccctttttgctaggcagaacaggtggtctgaagagaaaaccctatatcatctccaaagccagcatctcttccagaaagttcttggaaggaagcatgagatgaggagggtcagagaaccaggtcacaaacagcaagacagaggcacatgccctgtggtcaaccatccacaccccagggctatcctggccatctaacaggttgctggagtcagccttgttcccaagaaggcttcccaggcaggatttgctccccagagagagtctgcccttgtataatcattgcaagtaaagcaaatgcgtgaaggattacctctcttcaagtagcaaatgatggcagtgacaggaaggccatttcctctgtgactaagttgccaccagctccaggagcaagccttagagacacagatgggatctgcatggtgagagcagcacaccgaggtgtgaagtgcaggcccgtgggtgaatcacacatctattccttccatagcccctgaagcagtgccccttcctgaaattgacagcccactcaggtattctctaaggtacaactagtcacagtaaaagaggttcattccagaaaatgcattgcaatcatggtaaacatacagagaacaaacttcattcaaggtcaatgaggcaatactgagaacacagccttgtaacaacacattatgtgtgcaccaagggcagtgagcaaacagcagagaagctgacggcgtatttcatacaaagtacaattctgtgtctgtccgtcctgtacccaggaggggtacagataacatctcctcttccatggcgacttcacgtcctccgaggttttcaaagcagcatttgatactgaaaacgtggattttcctctatgattaatcataaataatgtactcatagaaggagaatctaccttttaaataccaaagaaggattccatccaggaaagcgtgcacctgtgcttgagtcatcagaaaagaaagtcacatgaggcagacgagcttccagggaagaactggcaccacgagacccacaatttaatcttcaccaagttggcgtctcgagatggttctcgggcataccccgttcattcagatacgacgtgcggcctaccatctttgcacctactcaggccctacggtctcttccagaaacatttccaaagcagcatttgatactgaaaacatggattttcctctatgattaaccaggaatcacgtaaacatagaaggaatatccacgttttaaataccaaagaaggactgggctctggaaaggacaaatctgaacacagttcatggaaaatggaagcaagacagtaaagcaaccgttttcagtcccgtagcatagctgtgacaacacaccacagcctgtgcaccaagctggctcctcagcgaaagggggcttctaaaggtgatggtcagcagacatatggcacgaactcagcacatgttctgcggcccaccatctttccacttaccctggagggctcagccccacctcacgtccctgatggtggcttcagtccagccatgatcccaaggcagcatttgatactgaaaacgtggattttcctctatgattaaccatcaaacacgtaaccatagaaggaaaatctaccttttaaataccaaagaaggtttcatcccggaaagcacgaacctaagtacaatccatcaaacacaaaagtaacatagcacagaggagagcattcggcctcatggagaaaatgacgacggagcccagccgcttggccgagcgggcagcttgcgagaggggtctcctcaaggcgggtgggtggtccgcagacatatggcacgaattcagcacatgttctgaggtccaccgactttccacttaccctggagtggggggggggactttattgtctcttccctgatggtggtttcagtccaggaatgtttccaagcagcatttgatactgaaaacgtggaatttcctctatgtttaaccataaataacataaacatagaaggaatatccaccttttaaataccaaagaaggattgagtcctggaaagcatgaacctaagcacaatctatcaaaattaaagacagcacaggataggtgcagtcggcaggggcctcccgggctagcggcagtgacatgggccctgcggaggacgcatgtcccaggacagaccttgctaacaagagcttaggttctgggattcaccttccatcactctccgcatgggggagggagctaaccttcctctcagaaatgttcagaaatgttttaaaagcagccttagatactgaaaatgcggattttcctctatgattcaccataaatcctgtaagcatagaaggaacatccaccttttagatgggaaaagtgggaacagccctggagagcacaaacgcaaacatgattcatgaaagacagaaggtaacagaagcaggtgagcactttgcgagtcccacgtgggaagcgcagggcccacccctggcctcttcacatccagagatggaactcctatgcaggcaaacgtaagtttggggtctgccctgctgtcactcgtctgggtgggggtaaccctaatgtctcttccctaatggaggcttcatggtcaagagcgtttccaaagtagcatttaattctgaaaaaaaaaaaaaaaaaaagtgaatgtacatcaaaaatttgccacaagtaaagcaggcaaagtagggattctatgctttgaattcgaaaaatatcaaaaacaaaaagaaaataagcctgtcaggttcctaaagtcacatcgcctccatgaagccctcccaaggcacctaatgaccaatgtcatgtaactgtgggctggagcatccttcacataccttggagggagaaggacacccaagaatcttccagagactgaagcttgtgtccagaaagtttcaatcggcaggactggtcatgttggtgtgacagactgaggaataggcaaacaggtcaaaaacaatgtctctttaaatacaactgagagaggtagcaaaacatgatgctcaccagcccctaccaccaccaccctccaccaccaccaccaccaccaccaccaacaccaccaacaccaccaccaccaacaccaccaccaccaccaccaccagtaccaccaccaccaccaccaccaccaccaacaccaccaccaccaacaccaccaccaccatcagtaccaccaccaccaccaccaccaccaataccaccaataccaccaccaccaccaccatcacaaccaccaccaccaacaccaccaccaccaacaccaccaccaccaacaccaccagtaccaccaccatcacaaccaccaccaccaacaccaccaacaccaccaccaccaacaccaccaccaccaccaccatcagtaccaccaccaccaccaccaccaccaccaccaccaccaccaccaccatcagtaccaccaccaccaccaccaccaccaataccaccatcaccaccatcaccaccaccaccatcaccaccaccaccaccaccaccaccaccaccactaataccaccctccaaaaacaatgatcacagcttccagaaaaatcatttttggggtggagtggatgcagaggcttactaaaatagcgacaacacatgcctcccatagcaaaaaatgaaggaccaataatcccagactcaaaccctatctcgcaagggtgccatcactccaggaagtgccgctaaaacggcttcagttctgaggaccaggagacattttccacaagcaaagcgtatgctccatgtcccaccctccattcacattccacacacggacaacctacaccaatctcacttctctaaagctggaactggttcaaaaaagtcttgtacttgaaaaccactacttctcacacatgcagagttagacattcctcctactggcgaatggatcagtgagtggaccagataacacccattgtctgctattagccagtccctcccctgcagtcacagcttgttgaggaagcaagtctgatcccccgaagcccccaagcacgatt

SEQ ID NO: 1885667 - DNA, 4001 bp, Homo sapiens
tcaactccagaatgactttcagcctctatgaccaaatgacattcggcaccaacgaagggcacgtccttggggccagcatggaaccatgtaaggtatcaacagcagagtctgaggaaggactgaaccccagaatgttcctggatgcctgtgtgttcatcaatagccttggaagtgtgaaaggaaagttatctcgggcccctaaaatcactaaggaaaactcaagctggaagctgctcaggataaacctgcctctcattccattcaaagtcatccctctgctcactgagacagatgcgtatctgatttgcctcctttggaaaggctcatgagaaacgcgaaagaatgtaatcatttgtgtatcacctgtctgtgacctggaagctccctccttcctgccttcgcttcaagttgtcccacctttgcagacaaaaccaatgtacttcttacatgtgctgaatgatgtctcatgtctccctaaaatgtataaagccaagctgtgccttgaccacagtacttcctgaagctgtgttacgggtgtatcctcaaccttgtcaaaataaactttctaaattaactaagagctgtctcagattttctgagttcacagaagcaactgtcctgaaagaccagaccccactgaccgtagaacttctgcttccctccggagtcagcgtctcacccagaaccctccgtggggatggagggagaccaggtgatgcctgtcacttacgtatgaatgctctggggacaacatgcacccagatccccgggaggacgccttaccagtgtgtcacgcctgaagtcagcacacctttccgggaagctctcgggaaggtttggggcagcaagaaaagatcaactgcataaagggggagactgtatcccattttttgaccctaggttcctactgaccccaccaactccactgtaaacacgcacaaatgtaaccaccttcacaagaattgtaccaacactgatattcatagaaacgtgtttttcagagccaatgccattatactaatccaattccctgtttagctttcctgaccgcgctgttgagctgttttcatttctcttatttcccttgttattttccccaaatcattttcattaggatcaattttttccatttaaaaatctgcatgaagatttgattcctcaatgtgttcttgtctacatcaaatatcactgtttatcaccgccgccaccgtgaatttccttccatggctgccacgtcggcagcttgctatttccccaggtcaaatgtcacagctgaaatgttgtcaagaaaattggattcctctgccaatttgtagtcaactgaacacatttagcactgtgccgtttcagctgtttttagttttattttgtgttgattatttttatcagtattatttaatacaaatgggatgagatactgatagcctctatttgtttcataacccaggagaaaattgggaacaatgtttggttgggggatagaaagagaaagatagagacaaggaaaggtgcagaaagaagcacagtgcttgtgagctagacgggggtctggggctgcagactcgtcacagaccctgccaagtgtgagctctttgtgtatccgcgaggtcaaataccttccgaaaaaaaaatggtggagtcaaaatgtctttgggatcaacacagccaaaatggtgatgtaaagagacagggtccagggtaagagctaaagccgacgcgacaccaacgccatcctccccgggccgcgagccccgcccccatcatgaatgaagcttgtgttctctgagcgacatctgttctcatccaccgcagaggaccgcagagggcagaccacccacgtctaccccgtccattcttgctcacgggaggggtgtagatgcccctgagcttgccactgggtcccggaagccatcccaagcaggatttgatactcaaacaaaagttgcctttgtgtgattcaacataaataaagcgaattcaccaagggcaacctctgctcaagggtcaaacatcagcacgggcaagaacacaccgagatgcctcttcaccaaaggcggcattgcctgcgggacctccctgctgactccagctgcaggctcgctggcttgctggctcgctctctcccctcttgctctctctctctctctacctccgagaagccccccaggcagtggtcagaacatggttggtcatggaccagcttctgtagccctggagcaggcagtgggggcgaggctatgcacacacacatcacaggtcagcccgagctagagtcagcccctggtcacctaccctagaggggctggaacaccaaggtccacctccagagccggtatctcctctggaagtctctgaagcaggatttcacacagagaagggggctgccaatgaaccatgtgaccgtgttcagtccagcctacaggggtttgagggaggacccgacctgaaggctggcgactcctcgtccagcgcagcatcctcagagggtgggtggggctgcgtcacagggacagcacaggctcaggtgactgtactccatgcactccattccaggaggcctcaaagagagttcaaccaagaaaacaggtcacgctgcctattcattcattcagcatcacacctactgtgcacatctggcgacacagcaccaggcaaaacagacaaggactctgccctcagggagcttccattctagtggcgagaggacaatgagtgcagatgacataacattcatataatgaccatcctcagaaacaatgcttatcctacagccacgtgccagacgctgtctagacacttcacaaagagcacgtttccactccgctgttaaccctgctttacagaggaagagactgaggcccagagagctgataggtgaagggattttccaagggcacacagctggcaacataaggtagtaataaatgctattaacaattctcgtcttgcagtaggaataaccgagtcgtgccatggaaatgtgtctttaaacaacattaattctcactgctgaggaaacccccttcaccccttgcttcccagaggtcacccagaagataaggtatttgagggcgtaatgtggatgtcttccattcagccaggagttcctttccctaaagtgtgccacacagccaagatgatttcacacctaaaaaggttgactaaatgtggtttattcactgacgagtcttcaaggatgcgactagaagaccaccatgtcaactaaaacgtcagcatcatttcggggaattcctcctaatgatggccgggatatgagccaagtgatgtaagtcacacagagagcacctgtcatgcggaggtgatccacttccttaccctgcgcaggtgccggctgggctttcccctcgtgacgtttcccaagaagaattgagtaccgaaaggagattggccatgtaatactcatcataaataaaatgaacacaccatggacaacctccattcgagtacctgacttgggtgctcgcttccagcgcgtcccagcagcaggcctgaggacggacgggatactgagagtcaggaaggtggcaacacaccacccacgaaataagctctgcggtccgggccgcactccatcccttacttgcaattagcacctcttgcaggaagccattcagggagggaagtgccacagcagagaggtctgcagagcaccatctgtgatacatgaagagagggcagcagggaagacagcaagacggtgtcttgtcaaacatgcagtgagccgatgagggaactgccgcctctttcgaggaaactgccatggtaagcaagcaggacgcctgcaggtgcacgacccaccaagaagagtgtgcacactgtcagcttcgccgtgcgttcaggcattcagacaccagttctagttcctaaactcggcaccacccgagggtgctttaaggctagatttaatgctttcaaaagagtccactatgtaggattggtcaaaaaataaatcgaatgcatcatggaagacctctccacca

SEQ ID NO: 1885668 - DNA, 4001 bp, Homo sapiens
ttcctggaggtcatccttgtcctgaggaagtcactggaggctgtgtttggcactgaggagaagaccgcatcacaagcattgacagagaaagcacacatctaagagtctaccattccaccaagtgccatggcatggcggatgccgagacccgtggctctcctctaactccaggctttctccagggaggtttggatggctgggctggataccaagaagcggtttaccatcccacatacatattcaaaatgtatgtgggacggtaaaccatttcttcaagtaccgcacgatggtggtggtggtggctggaagaaggctcatgtccacgaagttgcctgagggcgcttcttctaggctgcatttgacgctgagaagaagcaggtcacggtgtctactgaataagcgtagcgtagtcaaccacgtcattgagcaccatggaatggcactgattccgggaagaatcaaggtctcctccccagggatggcgcgatttcccaaggcagaacttgatttaagaggagcgagattatgccattttgcatcatgcagaaaaacacatgccatacagaaaatcatctcttcgggtgtcatggagaagtggtggtgggtccaaccgttcctccccgaagacagcgttgtttccaggagcctcggggatggatttgatactgagggttagtggaccgtgttacatacgtcacagataaagcgtacgctatacggtctactatctctccaagtaccacacagagatgccgaggacaaaggctcaggacacatccagaaagccctccaaggccttgagctgggtggaaccagaagggaggttgagcacagcacatgcatcatgcgacaagcacacacaggccaggagtctcgtcttcatggtcgggggttgacatgaatgctcgaagcagtggctcatccccaaaactggcaactcctccaggaagcccttcgaggccgaaagtcccactgagaagaagtggacgatgatatggatttcatcactccataaatactgattaagtgcctgctgtgtgccaggcgcactgtgctgggtctgaaggagtgggtagatgggagggaggacatggcacatggctaacagagctggttaggggagtggggagaaaatcagaaatacaaaatggcccacgtgcaaccaaagaacatccatctagttacactaaccaggccaaggaaacagtactgggcacctgaggcccagatcttacctattagtgagctctagtcttgggcattaaaaaaaaaaaaaaagtgccctaaggccatatctgcctcaataccaagggcatttccaggaggtcctcttaggttggattagattctgagcagtaaccaccatgccatcttcatgaacaaagcaggagttgttttggtcaaccacctccctaaggacagaaccactgtctcattcccagacttggcactgcctccggaaaaccctgagactgaatgtaagattgatcagaggtggacattggtataaacagaaaacttcaacacaggaaagcaactcttcaatgccacacagcggaatgaaggatggactggtgggtccccctgaaggtagtattggctccacgaagccctccaaagctggcaggctactgggaagtggtagcccatctcacacaaatccctcctttcgcacaggccacatggcaaatcatctcttccagaaccacggctgaggctggaaccggtgtcttgagcccaagttgcatcacttccagaaaactccccagagagtgcatttagtgcccagaagagccaggccttgttgcacaagtcagacatcaaccatgagccacagaaattgccgtggagcagtgctgaagctaaaccacgtgttctcttccctgaagttggcaacacctccaggaagccctccgaggatggattggatactgagagttagtggaccatgttacataggtcagaaatcataacgcctacgttccatagtctaccatctcttcaggaaccacggaatggtgctgaccccagaaccagggccttgcccctgaagttggcgtcacttccagaaagctttctgaggctggatttggcattggaagcaggcacatggtgaacataaacaacccctcctccaatgtggggcagtggcattgatgggggaaggggtgcctctaccctaagtggtaattcctccaggaaggccatgtcaacttggaaagactgcgacaaggcaaaatgtacaatactgaccatgctttggccattatgtggtcaactatctcttcatcaagataaagggcagtgttttgttctgcatggcaaatgggacactccaagagcacagttcatcatataaaaggggaccctcaacctctaggtaaaaacttccctagctcacccaagttccgatggtcctcgccatgctctagaccacctttggagactcaaaccacagagctgagtgggcagtgcgttcctccagctcctgattaacctctccacctccttcaggaggtcttccttgattttctccatcccctttcatggcacaactatcccatgtgaatggaatgcaaagcaatgatttgttagcctccagggaaaggacaagggcagaaccctcagcagccctgcaggacagctcggttgtcctctaaagtcctgaaccccagtgtagacggggccctgcaactcagttgttgaagtcctaactccttaggaagtcattcaaggcatcatgctcccctgctccctccaagtgtgagctagtctagtctaagagattaccctccataccccgtgcattgtccacatgcctttgctggcactactcctccacccagaccccgtgtctgcttacatctctctgaagcccaaccaaatggcagttcttccacgagcccgaccccacctcagccaactcaggcctttgcatccctgaccctccacagcaccctgcctgcacctctcctccagcccactcacattttccatgtggtcactcgtagaaataaacttgtgtttactgaacatctgtgaggtgctggagctagaccagtaaataagacacagtctctgccttcctgcagctgctagcgttgtggggaaaaccaacattaaagtagttattgcagagaattggtttcaaaatgtgaggaggccaaagtgttgtgaaggagcagagagcatttaacaagaggctctcgccaatcaggaaaacttctcagaagtttagattagaagataaaggatgaggggactaagccaagaagagagaggacaagagtggacactgtagggtaaaagcagaggaccagatggagcatggactggatggagcatgggtcagatgaacatggtcggggtggacagtggactggatggagtatggactggatgcagtatgaactggatggagtagtggtcgaggtggggcgtggattggatggagcgtggtctgtgtggggcatgaactggatggaacatggactggatggggtgttgacttgggggagtgtgaactacatggggtgtggtctggatggagtagtggtctggatggggtgtggactggatgcagtgtgactggatggggtgtggtctgggtgaggtgtggtctggatggggtatggtctggatggggcgtggatggtctgggtgaggtgtggtctggatggggtatggtctgtatggggcgtggactggatacagtgtggtctggatggggtgtggactggatggggtgtggactggatggggtgtggtctgggtgaggtgtggtctggatggggtgtggactggatgcaacgtggactgaatggggtgtggtctggatggagtgtagactagaaggggtgtgtactggatggggtgtgtactggatggggtgtggtctggatggggtgtggactggatggggtgtgtactggacagggtgtggactggacggggtgtggactggatggggtgtagacaggatggagtgtggactggatgga

SEQ ID NO: 1885669 - DNA, 4001 bp, Homo sapiens
acactggggttagtagaacagatgacatcagtcaaaataatacagcacaggcttcgtggttaaccatagatttctgtccagtggactggagctgagagtaacgcccttccctgaagctgaggtctggaccagaaggcctccaagatgggatttgatactggaaaagaggttaaccaggtgtgtttcgtcctcattaaagaaacagaaacccagaaaacctctcttcaggtaccactgattaacactgacaagaacaccactgattcttccccagacttgacattcagtgctggaagtcctgttaaatatggaattgcacactgagcgttagttagttgatttgccggaagaagccaagagttggatgcatgctgcttgccaaccatctatccaagtaccccagtggagcagaccccacatcacgtctggaagttgacatcacagccagaggtggtgatgccataaaaaggctggtcacagcagctatcgcgtttagggttaacctccagggccatcttttctcagttactcaagagaggcacagatgccccaaagcaaggctgactccaccaaaggtcctgctaaggacccagtggagactgaggtgtgacgggccaggcgaccttggttgtaaattaaagtgcatacactcaggtcagctgatcactggaggactttgggatggtatagacagcatgccccttcccttgaacttggatgcctccacatctaggaagccctccaaggaaagagatcggagtgaaaatcagtccaactcagccacatttggcatacatgtcgcaaacgcctcgcagatgctctcttcagagtctaacagagtgcagctggccccagtttactgtctctttcccaaaaagttgacacctcttccaggaagttctccaagggggcattagatactgagggttagtggaccaggtcacaaacggcacaaataaagcgtgtgctctctggtcaaccatctcatgtatccaggcacgtgctgacaccacgctccttgtccgcaagttaaccctgctgccaagccagagcagtgtgctgagaagaaggctgccacacgtgagttatcgtcacacacaagacaaacacatcacaaaccccgctgggtcacactgagcgcagacctagtggcccccacccccgcagttgatgttagctccaggaaagcttgcaaggcgggattagatactgcaaagaggtcgaccgtgtaatgtgcgccataaataaagcgaacgcgccacggaccacctctctccaagtaccaagcagcagccgtactgacaccaggacagtggctcttccgcaaagctgatatcacctcctggaagtcttccaaggcgagatgtgatattgagaagaagtagaccatgtgtcctacgtcacaaataaagcgtacacaccatggtcaaccgcatcttcaaataccaggaagtgacgctgacccctggctctcttcctttcacctgctatcacctccagaaagcctcacaatgcgcatcatgaactaccagccaccggcaatgtggcaatgaccacaaacccacatccaatgccactaccacctccaggatgccctgtaagggtgggaccggtactgagttcttggctggtggaccaaatggccaatgtaataaataaaggactgggtctgcagccaaccacccggtgacctgcactgcaccctggctaccactcaggcctggctctcaagtcggcatggcctccgggaagccccagggctggctgatactgagaatgagtggaccatgctacatctgtcattcaacaatgcatatgctttatgctctaccatctctccaagtactgtggaatggcgctgaagccagatcagtgtgtctcccacgaaggtgactttgcctctctctgggaagccctctatgactgaatttgatattgagaagatgtggaccatattacatacgacacagagatagcgcatgttctatggtcaaccatcttttcaggtaccttggagagggctgaggtcagagccggtgtctctttcctctcactagcatcacctccaggaagccctctgaggcctgatgtagtattgagaagaggccaccatgcaatgtctgccgcagatgcagtggacgcagcacaaaggagcccctcaagaatggagatgatgctggaactagtgctatgactgacactcgttcctgcctacagaaagccccccgaggtgcacgctgttataggaaggtggacgaagtaacatgcgttgtaagtaaaacatatgaagcatggccaacttctactaagtaccccgaggcagtacttgtaccagaactggtgctttgtctcctaagcttaacataacctccctggagactttccaggctgaatgggatacttcaaaagaagtagaccatgttacatacgtcatggggaaaagacatgcagtgtggctgaacccttttcaggtaccgtgaggtcagtgaagaggccagaaccagtgctctgtccctgaggctggcagcttcttcagcaagttctccaagcaagggttctgggatggagatagggaagaagtgggccatggaggcacttcctctgtaaacatacacgatggggtcgagcagctcttcatgaggatcagtgctgagtccagagctgggacatcttcccccgagatggctagacttgagatggaaaaaagatagactgtacacgcatcagcaaagacaaaaacgagtcagtgcgtcttcaagtacctggagtggcatcatctcctggacccatatctgctcctacatgggcgtactgtcctgaagtcatctgaggagggctctgaggatgagaggtgacctgtttcacatccctcgttcatgaacatttgcggcaccagccaccgtttcttcaattactccagagggatgtgccaacgtgggcagtaggacaccttcctggaggtcatccttgtcctgaggaagtcactggaggctgtgtttggcactgaggagaagaccgcatcacaagcattgacagagaaagcacacatctaagagtctaccattccaccaagtgccatggcatggcggatgccgagacccgtggctctcctctaactccaggctttctccagggaggtttggatggctgggctggataccaagaagcggtttaccatcccacatacatattcaaaatgtatgtgggacggtaaaccatttcttcaagtaccgcacgatggtggtggtggtggctggaagaaggctcatgtccacgaagttgcctgagggcgcttcttctaggctgcatttgacgctgagaagaagcaggtcacggtgtctactgaataagcgtagcgtagtcaaccacgtcattgagcaccatggaatggcactgattccgggaagaatcaaggtctcctccccagggatggcgcgatttcccaaggcagaacttgatttaagaggagcgagattatgccattttgcatcatgcagaaaaacacatgccatacagaaaatcatctcttcgggtgtcatggagaagtggtggtgggtccaaccgttcctccccgaagacagcgttgtttccaggagcctcggggatggatttgatactgagggttagtggaccgtgttacatacgtcacagataaagcgtacgctatacggtctactatctctccaagtaccacacagagatgccgaggacaaaggctcaggacacatccagaaagccctccaaggccttgagctgggtggaaccagaagggaggttgagcacagcacatgcatcatgcgacaagcacacacaggccaggagtctcgtcttcatggtcgggggttgacatgaatgctcgaagcagtggctcatccccaaaactggcaactcctccaggaagcccttcgaggccgaaagtcccactgagaagaagtggacgatgatatggatttcatcactccataaatactgattaagtgcctgctgtgtgccaggcgcac

SEQ ID NO: 1885670 - DNA, 4001 bp, Homo sapiens
gacagccattctttaagcaccaaagaactgtgccatcaagaagagctgggcatcttctccaaagttggtgtctcttccagaaagttcttctcaggtagtccaaacaatgaggattagcaggtcagcttcacacattgagagtcaagcccatgcctgggggtcagtcacactcttgggcaggggaagggggtctggccccaatgatcggtccctaaggtttgcttcatgtccaagaagtgcctccaagaagcaggatttgataagtagcttgaatgctgcgtcacccacaacacacacccatggccaatgcaaatccctgatagcaccaaggagtcccgtggccccctgccaagcgtggccccgcctccagggttctgaggttagggcacaagtgtccccaccacaaaccaactgcatgcgccctcatccccacccaggcgtgagcccctgggaagggctgatgcgtgcatccctttacagaacttgtcatggcgtccaggaagtctgccgaggcaagatttgatactcaaaaagaaattgtccttgtatgattcatcataaataaagcgaacacaccaaggataatttctcctcaagtatgaaacagcagcacggaccaccacctccaggtctttggctcaaggttagatggtgactgcttcgtggcaaacccagtcacacactcgctcatgcacacacaccacgcacacacaggcatgcacaatgcatgcaccaagtttgacctctctttaagcaccagggaagcaagatgccatagaatcctcactcagcttggcatcctcgctcaagactccttcaaagcgtagatagtggccgaggtcaagaacccagggactgtctctcttaagtggagcaaatgttctcggcacccctgctgacccccactgcatgtggcattctgtatcaaaagccactgtgtgaatggcttagctgccaagcatcaagagcatcactagcccccattgtaaacaccgtgtatgctctgggcttcctagtccattccatacccgatgaaggacttgacttccatgttttgacactgttccaaaaacccatggagagattttagtcataaaaccaccaccaccaccaccaccaccaccaccaatgatagtttcacagcacacaagggtcctggctaccacctacgaagtgccgaccacggggctctgctctgagccgtgtacaagtcttaactcgttcagccccagcagccccaagaaatggacgccaatgtgattcccctttgacatgtgagacaatgggcacagcacgatgagatccttgcccaaggttggacggttagtaaatgtcagaggtgggatccaaacacaggaaatcgagctccagagtctgcgctcttgatactgaaaaagtggatgaccctgtacgattcgacatgagcaaaacgaacaggacagggataaccactctccaagtaccaaaggttagcacggaaaagaaagccactgccttgggtggacttggtacgtcttcaaggcgcggtcctggggatgaattagatgctgagggttagtggaccgggtcacataccccaagcagaacatgcacactcacggaccgagtaacagcagggaccacaaagccactaccccacacgagcgccaccccagccatcggcccgggctgatgacttcccgctcaggaagcagggacccagaccacacacatcgtgcatgcttttggccccgcccacactgcaccaggagaggggatgtcccagaggccactgccttccctaaagtcatccaggtgcccgtgaagtcctctctgtgaagtggggacccgtgaacgatttgccacacacaaaacggatacacacggtcatgcacacacataccgcatcccttgctgagtgtggactgggtccaagacaaggtttgatactcacagagagcttgcccttgtatattccatgtcaataaaccgaatatacaaagggcaacctcgctttaagtaccaaacaatagcactgggcaggttcctcactatcattcacggggccggcctcctctcccggggttcatcctggcgggggagggggtgggagatgcgggatcagcagaccaggtggcaaacaccacctgccagctgtgtgcccataggtcagctctccatcccaaaggggccaggaaggggcagacgccagtgccccttcaccagaatcagcctcttttccaggcatcactccagattagaacttgttcctgaaaaggagatccaccccacgggccttcctgggcacacgcagagctcagcttctcactttctataggaattccctggggtgggaccaccatctccttcccagtgtgggcacctctccaggaagttttcctaaggatgcactcagcaccgaggtcccaggcactggatgaatttacaccttagacaaagcaaaggccctgtggtcaccatcccttcatccatctcacagagccgttgacaccagtgtcattctccatgccagcccttgccccacccctgccagaggctggcatcgtggccatgaagccatgctaagaaagagcacagggtcaacagtagtaaaccccacgtacccccaagtaactgaggaagcagacccacagcccattccccacagtggtctctccttcaagaaggggagaggagcgggagccgcctggtccaggtggcaggttatgtgactcattacccaggcgtggtgctcacctctcttcagctggacgttcgctttccttgggctgaggatgctgcgaatgtccttcctgaagctggcttcgggtccagatgacccccatggcagtcggggtgtaaaaagccggcagtcacacggcccaaggagtgtctccacaaacacagaacaagagtcccattctcaggcagccatcctaggtgtgagcagaaagccagcagtcagagacggggcacagacatcgaggcagaagcaggcgccctctgacctcccacatgcacgcacctggtgcggggctgacagctcccacggctcatccccagcgctgccttcatgggcaatcacaaatgacaaatagaagcaaaccattcttacagattcagcctggggactgcgagctggatcatgaacacccaagcatcaaaaaaaaaaagcgctgatgagcacacctcagccccttccccaaggtcaataccacctccaggaagccctcctggggctggcctaccaggctcgaaaacagcatagacagagccagtgctccgtggtccaccatcactgctgtctgtgttccccttgaaatgatccaacatccaggtcccccttctaaggctgatgctgggaacaggaagccttctgtgtatgacttggtaccaagaagaggcagatcaatgtgtgatttatccttaaaaaagcaaaccaccattaaacttggagcacacaaaaaggtccctcctctcccactgcttccagggagtccacaggaagaaccagcatagagggcgaaggcagaacccaggggcagcgtcacagccaacctcacgttcccggacatggaagccaggccatacctgagaggggctgacatccgaggctttgtcctggagacaagcagggtatgagtgtcttctccgacagtttgatacgcaaatgagagtctccccctgtatattcgccattaatcaagtgaacatacaaagggtatcctctctttaagtaccaaagggtggctcaaagagcaggtgaggaccatgccgggtctttgccggagtggacatctcctcctgcgaggcctgagaccaagggggaggggcccggtgacaagcctcatctggctgaccctggagctgggcctgcaccttgcacattgtggcctggccccgaaaggtggcacatccaggactccctgcaggcgagactggcttctaaacaagggaacaggtaggcatgactatcagtgtgctcagcatgcatgggtgaacctgcttcaaatacccacaag

SEQ ID NO: 1885671 - DNA, 4001 bp, Homo sapiens
agcaagatgccatagaatcctcactcagcttggcatcctcgctcaagactccttcaaagcgtagatagtggccgaggtcaagaacccagggactgtctctcttaagtggagcaaatgttctcggcacccctgctgacccccactgcatgtggcattctgtatcaaaagccactgtgtgaatggcttagctgccaagcatcaagagcatcactagcccccattgtaaacaccgtgtatgctctgggcttcctagtccattccatacccgatgaaggacttgacttccatgttttgacactgttccaaaaacccatggagagattttagtcataaaaccaccaccaccaccaccaccaccaccaccaatgatagtttcacagcacacaagggtcctggctaccacctacgaagtgccgaccacggggctctgctctgagccgtgtacaagtcttaactcgttcagccccagcagccccaagaaatggacgccaatgtgattcccctttgacatgtgagacaatgggcacagcacgatgagatccttgcccaaggttggacggttagtaaatgtcagaggtgggatccaaacacaggaaatcgagctccagagtctgcgctcttgatactgaaaaagtggatgaccctgtacgattcgacatgagcaaaacgaacaggacagggataaccactctccaagtaccaaaggttagcacggaaaagaaagccactgccttgggtggacttggtacgtcttcaaggcgcggtcctggggatgaattagatgctgagggttagtggaccgggtcacataccccaagcagaacatgcacactcacggaccgagtaacagcagggaccacaaagccactaccccacacgagcgccaccccagccatcggcccgggctgatgacttcccgctcaggaagcagggacccagaccacacacatcgtgcatgcttttggccccgcccacactgcaccaggagaggggatgtcccagaggccactgccttccctaaagtcatccaggtgcccgtgaagtcctctctgtgaagtggggacccgtgaacgatttgccacacacaaaacggatacacacggtcatgcacacacataccgcatcccttgctgagtgtggactgggtccaagacaaggtttgatactcacagagagcttgcccttgtatattccatgtcaataaaccgaatatacaaagggcaacctcgctttaagtaccaaacaatagcactgggcaggttcctcactatcattcacggggccggcctcctctcccggggttcatcctggcgggggagggggtgggagatgcgggatcagcagaccaggtggcaaacaccacctgccagctgtgtgcccataggtcagctctccatcccaaaggggccaggaaggggcagacgccagtgccccttcaccagaatcagcctcttttccaggcatcactccagattagaacttgttcctgaaaaggagatccaccccacgggccttcctgggcacacgcagagctcagcttctcactttctataggaattccctggggtgggaccaccatctccttcccagtgtgggcacctctccaggaagttttcctaaggatgcactcagcaccgaggtcccaggcactggatgaatttacaccttagacaaagcaaaggccctgtggtcaccatcccttcatccatctcacagagccgttgacaccagtgtcattctccatgccagcccttgccccacccctgccagaggctggcatcgtggccatgaagccatgctaagaaagagcacagggtcaacagtagtaaaccccacgtacccccaagtaactgaggaagcagacccacagcccattccccacagtggtctctccttcaagaaggggagaggagcgggagccgcctggtccaggtggcaggttatgtgactcattacccaggcgtggtgctcacctctcttcagctggacgttcgctttccttgggctgaggatgctgcgaatgtccttcctgaagctggcttcgggtccagatgacccccatggcagtcggggtgtaaaaagccggcagtcacacggcccaaggagtgtctccacaaacacagaacaagagtcccattctcaggcagccatcctaggtgtgagcagaaagccagcagtcagagacggggcacagacatcgaggcagaagcaggcgccctctgacctcccacatgcacgcacctggtgcggggctgacagctcccacggctcatccccagcgctgccttcatgggcaatcacaaatgacaaatagaagcaaaccattcttacagattcagcctggggactgcgagctggatcatgaacacccaagcatcaaaaaaaaaaagcgctgatgagcacacctcagccccttccccaaggtcaataccacctccaggaagccctcctggggctggcctaccaggctcgaaaacagcatagacagagccagtgctccgtggtccaccatcactgctgtctgtgttccccttgaaatgatccaacatccaggtcccccttctaaggctgatgctgggaacaggaagccttctgtgtatgacttggtaccaagaagaggcagatcaatgtgtgatttatccttaaaaaagcaaaccaccattaaacttggagcacacaaaaaggtccctcctctcccactgcttccagggagtccacaggaagaaccagcatagagggcgaaggcagaacccaggggcagcgtcacagccaacctcacgttcccggacatggaagccaggccatacctgagaggggctgacatccgaggctttgtcctggagacaagcagggtatgagtgtcttctccgacagtttgatacgcaaatgagagtctccccctgtatattcgccattaatcaagtgaacatacaaagggtatcctctctttaagtaccaaagggtggctcaaagagcaggtgaggaccatgccgggtctttgccggagtggacatctcctcctgcgaggcctgagaccaagggggaggggcccggtgacaagcctcatctggctgaccctggagctgggcctgcaccttgcacattgtggcctggccccgaaaggtggcacatccaggactccctgcaggcgagactggcttctaaacaagggaacaggtaggcatgactatcagtgtgctcagcatgcatgggtgaacctgcttcaaatacccacaagctacatggacaatggaaccatcacctttctccaaaggggcacagggtgtgagggctcagcccggcaagacatggagttatcagagaagaaggcatctgcaggcattctcagagctggagagcgctgagacaatgtctctcctctgaggctggttgtcctagagatgaccagatccaagaatgtgtcacctgtacctacctcgaaacaaacaaaaagagggccccagcgtcagactctagcgacaaaggagtcctgaagaccagacacacctgcccaaggcacactcaggtgcaatcactggacaatgtgctccgaggactggccattggagtccagcgacagtcccagagggcacaggcaggctcagggagctccaccagtaacttgccttagaacaacctgacatccatgtgcttccctcaaggctgacactctctcaaggatggagaccaccagggagtggcaggtcaggggagtagcaggtgagaagcagcatcagctctgcgctccaccatccaccacccattcgtgtgtccggagaggtgcgaggttagtgctggacgcaggaagccctctgggtatgacttggtatggagaagaggcagatccatgtgatttatccttaaaaaaagcaaaccaccattaaactcagtgcacacaaaaaggaccctcctctcccactgcctccagggagtccacaggaagaaccagcacagagagcgaaggcagaacccaagggctaggatcacagccaagctcacgt

SEQ ID NO: 1885672 - DNA, 4001 bp, Homo sapiens
gagatctgataccgaaaagaggtcgaccgtgtattgggcatcattaaataatgcgaactcaccacggacaacctccctccgagtaccatgaggtggcactgctcgcagcattcctgcatcttctgcacagcctgggcagcttgggagtggcctctgagggtggatgggaccctgaggatgagtggaccaggtggctcaaacccatgctctccggccaaccccaggttcaccaagccaggattagtgtgcacagaaataccacttcttgtgctcagctggccatgcaggcaacatttaataatgcaaggatgtcagtggcacaggagtcattaaatatgaagcaaaccacacacaaatgtgtgtgcaaaagcaggctaagcactgcctccttggtaaacctgggattcccttacaggaattctctggagggtgtaaggctgctgtgggttagtaaaccaggggtcgcacagagtcctgttcctgttttcttctgtatcccgacggctgactaataaaagatgcttctagatgcccaagattcaactccaaggttgaatttgataggaataaaaaaagaagtcagccatgtgtatttcaatcttaacttttaaaaaattagggcatcccaacaacctctctcgattttcctaaagttggtagtgccccaggaagttgttttagggtcagcttggactctaaagttagtaggtcagttacatgcatcctcaggaaaatgcttgccatggggtcagccatccagaaacctaccttggaagcagcactggctcaggaagccctccgaggcagaatttgacactaaaagagaggagagccgtgtatgactcgctttgatgaatcgaattcatcacggccagcctctctccaagtaccacacatgaacactggtgagaaatccattgcctctctggcagaggtggccgcccttctcgggagtcctgttaggaatgggtgggatagtattgggtagtgggccgagccgagtgacatacacccacattaagtgcatgctcacccgaggcgcacttaccttaagggagtgctgagggcactgccttctccccagcagcaaggatgcagttcgtccttccagacaagacagggagcttttgcgtagctcactggtccctgacaggagaatcatggccgcttcccaaagccgcattatctccatggagcctcctagggagagacaggatgctgggtattagaggacgacgtgacagacctaacaaaggcagcacatgctctgggaagaaggattcagtcacacacccaggagaaaagctggcccacatcaggtccctcaacagaagacaacatggcgtcccacatcggaagtcaacacttcaaggaggctgtcacagtggtgaaggggctgccaaggctgactcattgcattttaagtaaacatacacccccaagagcacgtgtcatcgcagtccaccaagcagtcacagcaagtccatggccgcttccccagagttggtgggagctctggaaagtcttcctggagtgggagtgatgctgagggttggtgactaggtggcccacagggtgaacacagtgcatgcccctctggtcaaccagtcacacaccctggacggtgctgacaccaacatctcttctggaagtcggcctggggcccagggagcctctcttcaaagtcttgtgaggtgacgctggtgacagaaccacagctgattccccagagttggtgagacccatgggaagacctcctataggtgcatgggaggctcggattatcgggccaggtgacttacagctaggtcagcgcattgtccatggcccgccatccattcttggcttttccacatggttgacacaaagactatctttcctgaagctgccattgtgtccaggaagtccttagaggtagcatttggtactgaaaaaagtgttgtccgtgaatgattcgtcataagtaaagcgaatccaccacgaacaacttctcttcaagtaccacagaaaagcagagacaagacagacaaggagtccccttccacttctccaaggggagtggctgccaaccaccatcctgtggacagagtggacaccgagcattagtgaggcagcttacgggtgtcctaggaacacactggagtttgggcaacccttcactcacctcccttggagtggtgctggcacagtcccccttccctggagttgaaattgtggtcctgaatccacacgcacaaggtttagaaataagaagagggaagccacttgtcacacgccaggagcactccgcagtgtgtagaccccagggtttctgaacagggccttggacttctcaacagagcacactgagttatccatcaagcacatcaaggtgccagccaggctcccgcagggcccactgaactagggaggtccagagggggcccccttttgccactgcaggtgcccctagagaaactgcccagctcaggcacgccaggctcctggtaggttccccatcactgccctgggtagattctctatcaatgcccttgtggtcagagtgatctttccaacacagaccacgcatcccccctgctcacaacccttccaaatcccccatctcactcagaataaaacctggagtcctgcctctcccagctcagacccagcgactcccagcagctcggttcaatcccactggccttcttgctttttcttaaagatgccagggggctttccatgggccttgccctcctcctgaaatgctcctaccccagaccttcctctggtccaccccactccattcccacccacatcctcagagagagctttccagacccctgtatttaacacaaaggtccacctgcttttacctctttctgtcactgtaacccgctttccctttccccataaaacctagcagtggacaaaattacgcttcctaattcatgtgttctcatccgtctcttccaccagaatgtaaagtccacatgagcaagaacttgatttcattcactgctctctgctaaggtccagaatcacctagaacacagtgtgcactccatcactatttatggaatgaccaagtcattccttgttatttgatcaactcatgaaccatgtagttatgctataaacaaaagaatctgatttttttaaaaagagagaactttatcgaaacaaaatcatggtggccaaagtcaccaaccctctcaatagccattatggccatgggcaggacacagctctggcaggagagtgagctcagggagacgcctcagaaacaaagctcagactgctcaactaactctccacaaactccaacagatgtggatgccaagtctccccagagggcggtgctgcttccagaaacccttccctggcaagatttggcactcaaaaattctgccctggaacaaaagcaataatgatgaccaattacctatcagtcagtccggctgatgacagtaacactaccgagccagcatgtctccagagattcatcttaccaagggtgagggtcacttggagcaggtgacagacgtcttgtgtgaatgggcctctcactggtcaacttcccccaataatgtagtgcagacaccaaagccccttccagaaaatcacagccttagaagtaaccatcttcctcagagattcgattctggtcatggctgtggcacatgaagaagctagtgcactgcgatggcccgttcacatacataccttgggtgggaggtgaagccaagaccccttgcctgaaggcgggacgctgtccgggaagccttccaaagcagtatttgatactgaaaaactggatgtccctgtatgattcgtcataaattaagcgaacacagcagggataaccactcttcaagtaccgaaggctgacggtgacggcccacgtcttcaccagagtctgccttccttccagctagtccgcctgaggatgaattggggacagagggttaggagagttgaggggtgcacaatgtcaatcaagcccttgctttccagccaac

SEQ ID NO: 1885673 - DNA, 4001 bp, Homo sapiens
taggggatgacgggagcccagctcaggaagatctcccgagcccaggagctcactgatcaacaatgagtgataaaggacagccttagctcattctttggggtcactcctgaggtgctccttgccttcagccctggaccctgggcatgggcagcatgttctggagtcactaagtctccaggtcagctgcaaacaggcctctggtcatcttcctgtagtctgggcaggccaggggtgcaaatatgacataagcatcgggtagctgagagccagcccagcctgggggatgtgccaaccggaagcaagggcatggcgggtgctcccgctgacactggaattggggatgccattctgtcacacttccaaagccccccagaacagagtggagctggaaaattaacaggccaagtgacacaggtcctacacaaagtccacagggtcaaccagcgcagagccagctgctgcctggagttgacagcaaagaggaaggcatccaaggtgggattcgatatcggaaagaggttgactgtataatattcatcatatagaaagtgaacacctcacaggcaacctatttcaggtaccactgagcagcactgactccagggaggaggcttcttccacagggaagggccctgccacccacccgcctccaggatggaggccagcacagggctgcaggtggaagtcaagcgcgtgctcggccaccagccatgcctctgggggcccacagggcgcgcaaccggacctccccgacatcagcaggtgcaggaatcatgcaggtgggatctgatactgaagagaggccgctcgtgtcttgtgtgtcatgatttctgtgaatgcaacacaggccacctctcctcaggcaccacaaggagcagcacacgcacacggccacccaaggcaccagctcccacccagggtctcacagcactgagatgagcagaaggcagcccaggtgcagggaatgcatgcagccgcccccaacatcctggcgaggggtgggtggccttccagcaggatgccttccagcgggactagctcccccgtgtcctctgcctcgatgacactggccatgaaaaacagactgagccccgtcaccattgctcatcagcttcatgaccgccccccaccacagtgcacaaccctagcatcttccccaaagtccacatggccccccgaaagctctcccaaaatgattcaatggcgggggtcaggggaaaggatgacaaatgtcacaccagcccatgcattcacgtaccctggaaagtcccgcctcaggcgtggcgcccgcacaccaccgggcggtagcggtactgaaaacaggccatctgtgttatattcgtcattaataaaagcgaactcatcacagacaacctcttctcaggtacccagagtgccatcggctcaagaacgtggctgccgcgtcccgtggtgccagcgctgcccccgggaagcagtcctgaggacggatgggacatcaaaggtgagaagacacagagacaggaaagagacccctgcccggcccactctcggtgaccaggccccactgaggcagcgactccaaagcacccgtcctgctcctaccctcaaaagggcttcatctccaacgggtcctccaaggtgagatttgatactgagaaaagatcaaccatgtattattcgaagtcaataaagcgaatataacacggtcgatctcccttcaagtaccaggaaaggcgctgagctgaagcgcgatcggctccccggcccgcaggccccacaggctgcagcggatacggacggctagtggaccaggtgaagtacattagaaacaattactttccaactggtcgaccatccatccccgtaccccagaatggtgctgatgccggcgtccttccccgaggtgccccagcctccaagacggcctccctggtggaatttgataccgaaaaggggttcaccgagcaacattcgtcgtccagatgcaaagttgctcgggtaacctctccccgagtaccatggagaggctcagatgctcggactaaggtgaatgcttgcaggcggctgtgcttgcagaagaccctcccccaagggcagcacaaggtctgggcattcagagcccagagcctcacactctccaaggacgttcccaatcaccaagtccaacgattccaaccccttccagaatgaatctagagactcttcccagaagttgagtgcaagacccaggtaggatcttatactgaaaagacggcaaccttccttgggcaccttgctaaagatgaaaatgaaaccctgctcgcacccgcttttcattcccagaccctgagagggggtgaccctgtagggacccctgcacaagcacagagcctccctcccagcagaggattcctttggcgggagctcaacggggcacaacgctgaccccagacctgcggtctcaccagcaccatctccagcccacagaggcatcaccccaggatccctcaaagagtaacttcacagttatcaacagctggctgaccatctgattagcctcataaagcaagtgagacattcaaaataagggactggggggataaatgcagcagaagaaagcaggtgagtcacagatgtcttctcttcacaagggtcagggcagccctgacctcagaacccaaccttccccagactcagagaacacccagaaggtgcctcctggagcgggcagccagcaagcatcgggccagacgatggatgccacaagcagagtccagattctgtgcccaccacccattctgtgaactttggagtgggaccgacagcagaatcctttccctgacgttggcatgagctcagagagccctctgcgccttgctacaagtggagcaagaggccagccatgcgaggcctgctgtaaagaaagaaaagatgtcacagacgacttcccttcaggagccatgggcactgacctgcatcagagcctccttcctggggcaggcatcacctcccaaggtggtcccggaacgcaccggagtcagcaggagtggaacagatgacatgcaccgtgggtacaatcgggcctgtcccatgggcggccctcaggcacctgccctggagagggctccggctgcaggccgcctcctgagggtgctgttgcttctggaaattctccaggtagggtttgatctgaaaagaaagccatgtgcaatgctggtcaccaacaaagcaggccagcaaacaacgagctctttccacagccccagcaaggtttttgaccttggaaacatcaactccagaatgactttcagcctctatgaccaaatgacattcggcaccaacgaagggcacgtccttggggccagcatggaaccatgtaaggtatcaacagcagagtctgaggaaggactgaaccccagaatgttcctggatgcctgtgtgttcatcaatagccttggaagtgtgaaaggaaagttatctcgggcccctaaaatcactaaggaaaactcaagctggaagctgctcaggataaacctgcctctcattccattcaaagtcatccctctgctcactgagacagatgcgtatctgatttgcctcctttggaaaggctcatgagaaacgcgaaagaatgtaatcatttgtgtatcacctgtctgtgacctggaagctccctccttcctgccttcgcttcaagttgtcccacctttgcagacaaaaccaatgtacttcttacatgtgctgaatgatgtctcatgtctccctaaaatgtataaagccaagctgtgccttgaccacagtacttcctgaagctgtgttacgggtgtatcctcaaccttgtcaaaataaactttctaaattaactaagagctgtctcagattttctgagttcacagaagcaactgtcctgaaagaccagaccccactgaccgtagaacttctgcttccctccggagtcagcgtctcacccagaaccctccgtggggatggagggagaccaggtgatgcctgtcacttacgtatgaatgctctggggacaa

SEQ ID NO: 1885674 - DNA, 4001 bp, Homo sapiens
tgaacaagagccattccatccccttgggaattgtgaacccctgggaaaggaaaatgcaaaggatgtgggcctttaaggaaggaagggccagagcctggacaggaggcagccgagggcagagcagggcggcccaggacccagctccggaaggaggggcatgtgcaaggccagaatgaaggatgaaaacacgtgggggataggctgtggctccaaaagaagaggggggctgccactctgagggcctggggggtcctcggatcattttggtaccaagcccaagggaaggggcctgcagaggtgccctgggcagcggagttaaacagctggactctgcacttggaaatgctctccctggcagagggaggggcactggagggagacccaagtgccacaggctggagggacctagcctgtggggcggcctctccagcagggctgtggcccaggggctggggaagaggggtgctgagggagagtgggagcaggcagcccagagggatggtgccagggatccccactcccatgctaggcatggagaggagcggtcccgaggaggaggacaagggggagggcaggcacaggctgtgacttccaaggcagcgacgtctcaactaggggatgacgggagcccagctcaggaagatctcccgagcccaggagctcactgatcaacaatgagtgataaaggacagccttagctcattctttggggtcactcctgaggtgctccttgccttcagccctggaccctgggcatgggcagcatgttctggagtcactaagtctccaggtcagctgcaaacaggcctctggtcatcttcctgtagtctgggcaggccaggggtgcaaatatgacataagcatcgggtagctgagagccagcccagcctgggggatgtgccaaccggaagcaagggcatggcgggtgctcccgctgacactggaattggggatgccattctgtcacacttccaaagccccccagaacagagtggagctggaaaattaacaggccaagtgacacaggtcctacacaaagtccacagggtcaaccagcgcagagccagctgctgcctggagttgacagcaaagaggaaggcatccaaggtgggattcgatatcggaaagaggttgactgtataatattcatcatatagaaagtgaacacctcacaggcaacctatttcaggtaccactgagcagcactgactccagggaggaggcttcttccacagggaagggccctgccacccacccgcctccaggatggaggccagcacagggctgcaggtggaagtcaagcgcgtgctcggccaccagccatgcctctgggggcccacagggcgcgcaaccggacctccccgacatcagcaggtgcaggaatcatgcaggtgggatctgatactgaagagaggccgctcgtgtcttgtgtgtcatgatttctgtgaatgcaacacaggccacctctcctcaggcaccacaaggagcagcacacgcacacggccacccaaggcaccagctcccacccagggtctcacagcactgagatgagcagaaggcagcccaggtgcagggaatgcatgcagccgcccccaacatcctggcgaggggtgggtggccttccagcaggatgccttccagcgggactagctcccccgtgtcctctgcctcgatgacactggccatgaaaaacagactgagccccgtcaccattgctcatcagcttcatgaccgccccccaccacagtgcacaaccctagcatcttccccaaagtccacatggccccccgaaagctctcccaaaatgattcaatggcgggggtcaggggaaaggatgacaaatgtcacaccagcccatgcattcacgtaccctggaaagtcccgcctcaggcgtggcgcccgcacaccaccgggcggtagcggtactgaaaacaggccatctgtgttatattcgtcattaataaaagcgaactcatcacagacaacctcttctcaggtacccagagtgccatcggctcaagaacgtggctgccgcgtcccgtggtgccagcgctgcccccgggaagcagtcctgaggacggatgggacatcaaaggtgagaagacacagagacaggaaagagacccctgcccggcccactctcggtgaccaggccccactgaggcagcgactccaaagcacccgtcctgctcctaccctcaaaagggcttcatctccaacgggtcctccaaggtgagatttgatactgagaaaagatcaaccatgtattattcgaagtcaataaagcgaatataacacggtcgatctcccttcaagtaccaggaaaggcgctgagctgaagcgcgatcggctccccggcccgcaggccccacaggctgcagcggatacggacggctagtggaccaggtgaagtacattagaaacaattactttccaactggtcgaccatccatccccgtaccccagaatggtgctgatgccggcgtccttccccgaggtgccccagcctccaagacggcctccctggtggaatttgataccgaaaaggggttcaccgagcaacattcgtcgtccagatgcaaagttgctcgggtaacctctccccgagtaccatggagaggctcagatgctcggactaaggtgaatgcttgcaggcggctgtgcttgcagaagaccctcccccaagggcagcacaaggtctgggcattcagagcccagagcctcacactctccaaggacgttcccaatcaccaagtccaacgattccaaccccttccagaatgaatctagagactcttcccagaagttgagtgcaagacccaggtaggatcttatactgaaaagacggcaaccttccttgggcaccttgctaaagatgaaaatgaaaccctgctcgcacccgcttttcattcccagaccctgagagggggtgaccctgtagggacccctgcacaagcacagagcctccctcccagcagaggattcctttggcgggagctcaacggggcacaacgctgaccccagacctgcggtctcaccagcaccatctccagcccacagaggcatcaccccaggatccctcaaagagtaacttcacagttatcaacagctggctgaccatctgattagcctcataaagcaagtgagacattcaaaataagggactggggggataaatgcagcagaagaaagcaggtgagtcacagatgtcttctcttcacaagggtcagggcagccctgacctcagaacccaaccttccccagactcagagaacacccagaaggtgcctcctggagcgggcagccagcaagcatcgggccagacgatggatgccacaagcagagtccagattctgtgcccaccacccattctgtgaactttggagtgggaccgacagcagaatcctttccctgacgttggcatgagctcagagagccctctgcgccttgctacaagtggagcaagaggccagccatgcgaggcctgctgtaaagaaagaaaagatgtcacagacgacttcccttcaggagccatgggcactgacctgcatcagagcctccttcctggggcaggcatcacctcccaaggtggtcccggaacgcaccggagtcagcaggagtggaacagatgacatgcaccgtgggtacaatcgggcctgtcccatgggcggccctcaggcacctgccctggagagggctccggctgcaggccgcctcctgagggtgctgttgcttctggaaattctccaggtagggtttgatctgaaaagaaagccatgtgcaatgctggtcaccaacaaagcaggccagcaaacaacgagctctttccacagccccagcaaggtttttgaccttggaaacatcaactccagaatgactttcagcctctatgaccaaatgacattcggcaccaacgaagggcacgtccttggggccagcatggaaccatgtaaggtatcaacagcagagtctgaggaaggactgaaccccagaatgttcct

SEQ ID NO: 1885675 - DNA, 4001 bp, Homo sapiens
tgcactgcaccctggctaccactcaggcctggctctcaagtcggcatggcctccgggaagccccagggctggctgatactgagaatgagtggaccatgctacatctgtcattcaacaatgcatatgctttatgctctaccatctctccaagtactgtggaatggcgctgaagccagatcagtgtgtctcccacgaaggtgactttgcctctctctgggaagccctctatgactgaatttgatattgagaagatgtggaccatattacatacgacacagagatagcgcatgttctatggtcaaccatcttttcaggtaccttggagagggctgaggtcagagccggtgtctctttcctctcactagcatcacctccaggaagccctctgaggcctgatgtagtattgagaagaggccaccatgcaatgtctgccgcagatgcagtggacgcagcacaaaggagcccctcaagaatggagatgatgctggaactagtgctatgactgacactcgttcctgcctacagaaagccccccgaggtgcacgctgttataggaaggtggacgaagtaacatgcgttgtaagtaaaacatatgaagcatggccaacttctactaagtaccccgaggcagtacttgtaccagaactggtgctttgtctcctaagcttaacataacctccctggagactttccaggctgaatgggatacttcaaaagaagtagaccatgttacatacgtcatggggaaaagacatgcagtgtggctgaacccttttcaggtaccgtgaggtcagtgaagaggccagaaccagtgctctgtccctgaggctggcagcttcttcagcaagttctccaagcaagggttctgggatggagatagggaagaagtgggccatggaggcacttcctctgtaaacatacacgatggggtcgagcagctcttcatgaggatcagtgctgagtccagagctgggacatcttcccccgagatggctagacttgagatggaaaaaagatagactgtacacgcatcagcaaagacaaaaacgagtcagtgcgtcttcaagtacctggagtggcatcatctcctggacccatatctgctcctacatgggcgtactgtcctgaagtcatctgaggagggctctgaggatgagaggtgacctgtttcacatccctcgttcatgaacatttgcggcaccagccaccgtttcttcaattactccagagggatgtgccaacgtgggcagtaggacaccttcctggaggtcatccttgtcctgaggaagtcactggaggctgtgtttggcactgaggagaagaccgcatcacaagcattgacagagaaagcacacatctaagagtctaccattccaccaagtgccatggcatggcggatgccgagacccgtggctctcctctaactccaggctttctccagggaggtttggatggctgggctggataccaagaagcggtttaccatcccacatacatattcaaaatgtatgtgggacggtaaaccatttcttcaagtaccgcacgatggtggtggtggtggctggaagaaggctcatgtccacgaagttgcctgagggcgcttcttctaggctgcatttgacgctgagaagaagcaggtcacggtgtctactgaataagcgtagcgtagtcaaccacgtcattgagcaccatggaatggcactgattccgggaagaatcaaggtctcctccccagggatggcgcgatttcccaaggcagaacttgatttaagaggagcgagattatgccattttgcatcatgcagaaaaacacatgccatacagaaaatcatctcttcgggtgtcatggagaagtggtggtgggtccaaccgttcctccccgaagacagcgttgtttccaggagcctcggggatggatttgatactgagggttagtggaccgtgttacatacgtcacagataaagcgtacgctatacggtctactatctctccaagtaccacacagagatgccgaggacaaaggctcaggacacatccagaaagccctccaaggccttgagctgggtggaaccagaagggaggttgagcacagcacatgcatcatgcgacaagcacacacaggccaggagtctcgtcttcatggtcgggggttgacatgaatgctcgaagcagtggctcatccccaaaactggcaactcctccaggaagcccttcgaggccgaaagtcccactgagaagaagtggacgatgatatggatttcatcactccataaatactgattaagtgcctgctgtgtgccaggcgcactgtgctgggtctgaaggagtgggtagatgggagggaggacatggcacatggctaacagagctggttaggggagtggggagaaaatcagaaatacaaaatggcccacgtgcaaccaaagaacatccatctagttacactaaccaggccaaggaaacagtactgggcacctgaggcccagatcttacctattagtgagctctagtcttgggcattaaaaaaaaaaaaaaagtgccctaaggccatatctgcctcaataccaagggcatttccaggaggtcctcttaggttggattagattctgagcagtaaccaccatgccatcttcatgaacaaagcaggagttgttttggtcaaccacctccctaaggacagaaccactgtctcattcccagacttggcactgcctccggaaaaccctgagactgaatgtaagattgatcagaggtggacattggtataaacagaaaacttcaacacaggaaagcaactcttcaatgccacacagcggaatgaaggatggactggtgggtccccctgaaggtagtattggctccacgaagccctccaaagctggcaggctactgggaagtggtagcccatctcacacaaatccctcctttcgcacaggccacatggcaaatcatctcttccagaaccacggctgaggctggaaccggtgtcttgagcccaagttgcatcacttccagaaaactccccagagagtgcatttagtgcccagaagagccaggccttgttgcacaagtcagacatcaaccatgagccacagaaattgccgtggagcagtgctgaagctaaaccacgtgttctcttccctgaagttggcaacacctccaggaagccctccgaggatggattggatactgagagttagtggaccatgttacataggtcagaaatcataacgcctacgttccatagtctaccatctcttcaggaaccacggaatggtgctgaccccagaaccagggccttgcccctgaagttggcgtcacttccagaaagctttctgaggctggatttggcattggaagcaggcacatggtgaacataaacaacccctcctccaatgtggggcagtggcattgatgggggaaggggtgcctctaccctaagtggtaattcctccaggaaggccatgtcaacttggaaagactgcgacaaggcaaaatgtacaatactgaccatgctttggccattatgtggtcaactatctcttcatcaagataaagggcagtgttttgttctgcatggcaaatgggacactccaagagcacagttcatcatataaaaggggaccctcaacctctaggtaaaaacttccctagctcacccaagttccgatggtcctcgccatgctctagaccacctttggagactcaaaccacagagctgagtgggcagtgcgttcctccagctcctgattaacctctccacctccttcaggaggtcttccttgattttctccatcccctttcatggcacaactatcccatgtgaatggaatgcaaagcaatgatttgttagcctccagggaaaggacaagggcagaaccctcagcagccctgcaggacagctcggttgtcctctaaagtcctgaaccccagtgtagacggggccctgcaactcagttgttgaagtcctaactccttaggaagtcattcaaggcatcat

SEQ ID NO: 1885676 - DNA, 4001 bp, Homo sapiens
ctgagggagagtgggagcaggcagcccagagggatggtgccagggatccccactcccatgctaggcatggagaggagcggtcccgaggaggaggacaagggggagggcaggcacaggctgtgacttccaaggcagcgacgtctcaactaggggatgacgggagcccagctcaggaagatctcccgagcccaggagctcactgatcaacaatgagtgataaaggacagccttagctcattctttggggtcactcctgaggtgctccttgccttcagccctggaccctgggcatgggcagcatgttctggagtcactaagtctccaggtcagctgcaaacaggcctctggtcatcttcctgtagtctgggcaggccaggggtgcaaatatgacataagcatcgggtagctgagagccagcccagcctgggggatgtgccaaccggaagcaagggcatggcgggtgctcccgctgacactggaattggggatgccattctgtcacacttccaaagccccccagaacagagtggagctggaaaattaacaggccaagtgacacaggtcctacacaaagtccacagggtcaaccagcgcagagccagctgctgcctggagttgacagcaaagaggaaggcatccaaggtgggattcgatatcggaaagaggttgactgtataatattcatcatatagaaagtgaacacctcacaggcaacctatttcaggtaccactgagcagcactgactccagggaggaggcttcttccacagggaagggccctgccacccacccgcctccaggatggaggccagcacagggctgcaggtggaagtcaagcgcgtgctcggccaccagccatgcctctgggggcccacagggcgcgcaaccggacctccccgacatcagcaggtgcaggaatcatgcaggtgggatctgatactgaagagaggccgctcgtgtcttgtgtgtcatgatttctgtgaatgcaacacaggccacctctcctcaggcaccacaaggagcagcacacgcacacggccacccaaggcaccagctcccacccagggtctcacagcactgagatgagcagaaggcagcccaggtgcagggaatgcatgcagccgcccccaacatcctggcgaggggtgggtggccttccagcaggatgccttccagcgggactagctcccccgtgtcctctgcctcgatgacactggccatgaaaaacagactgagccccgtcaccattgctcatcagcttcatgaccgccccccaccacagtgcacaaccctagcatcttccccaaagtccacatggccccccgaaagctctcccaaaatgattcaatggcgggggtcaggggaaaggatgacaaatgtcacaccagcccatgcattcacgtaccctggaaagtcccgcctcaggcgtggcgcccgcacaccaccgggcggtagcggtactgaaaacaggccatctgtgttatattcgtcattaataaaagcgaactcatcacagacaacctcttctcaggtacccagagtgccatcggctcaagaacgtggctgccgcgtcccgtggtgccagcgctgcccccgggaagcagtcctgaggacggatgggacatcaaaggtgagaagacacagagacaggaaagagacccctgcccggcccactctcggtgaccaggccccactgaggcagcgactccaaagcacccgtcctgctcctaccctcaaaagggcttcatctccaacgggtcctccaaggtgagatttgatactgagaaaagatcaaccatgtattattcgaagtcaataaagcgaatataacacggtcgatctcccttcaagtaccaggaaaggcgctgagctgaagcgcgatcggctccccggcccgcaggccccacaggctgcagcggatacggacggctagtggaccaggtgaagtacattagaaacaattactttccaactggtcgaccatccatccccgtaccccagaatggtgctgatgccggcgtccttccccgaggtgccccagcctccaagacggcctccctggtggaatttgataccgaaaaggggttcaccgagcaacattcgtcgtccagatgcaaagttgctcgggtaacctctccccgagtaccatggagaggctcagatgctcggactaaggtgaatgcttgcaggcggctgtgcttgcagaagaccctcccccaagggcagcacaaggtctgggcattcagagcccagagcctcacactctccaaggacgttcccaatcaccaagtccaacgattccaaccccttccagaatgaatctagagactcttcccagaagttgagtgcaagacccaggtaggatcttatactgaaaagacggcaaccttccttgggcaccttgctaaagatgaaaatgaaaccctgctcgcacccgcttttcattcccagaccctgagagggggtgaccctgtagggacccctgcacaagcacagagcctccctcccagcagaggattcctttggcgggagctcaacggggcacaacgctgaccccagacctgcggtctcaccagcaccatctccagcccacagaggcatcaccccaggatccctcaaagagtaacttcacagttatcaacagctggctgaccatctgattagcctcataaagcaagtgagacattcaaaataagggactggggggataaatgcagcagaagaaagcaggtgagtcacagatgtcttctcttcacaagggtcagggcagccctgacctcagaacccaaccttccccagactcagagaacacccagaaggtgcctcctggagcgggcagccagcaagcatcgggccagacgatggatgccacaagcagagtccagattctgtgcccaccacccattctgtgaactttggagtgggaccgacagcagaatcctttccctgacgttggcatgagctcagagagccctctgcgccttgctacaagtggagcaagaggccagccatgcgaggcctgctgtaaagaaagaaaagatgtcacagacgacttcccttcaggagccatgggcactgacctgcatcagagcctccttcctggggcaggcatcacctcccaaggtggtcccggaacgcaccggagtcagcaggagtggaacagatgacatgcaccgtgggtacaatcgggcctgtcccatgggcggccctcaggcacctgccctggagagggctccggctgcaggccgcctcctgagggtgctgttgcttctggaaattctccaggtagggtttgatctgaaaagaaagccatgtgcaatgctggtcaccaacaaagcaggccagcaaacaacgagctctttccacagccccagcaaggtttttgaccttggaaacatcaactccagaatgactttcagcctctatgaccaaatgacattcggcaccaacgaagggcacgtccttggggccagcatggaaccatgtaaggtatcaacagcagagtctgaggaaggactgaaccccagaatgttcctggatgcctgtgtgttcatcaatagccttggaagtgtgaaaggaaagttatctcgggcccctaaaatcactaaggaaaactcaagctggaagctgctcaggataaacctgcctctcattccattcaaagtcatccctctgctcactgagacagatgcgtatctgatttgcctcctttggaaaggctcatgagaaacgcgaaagaatgtaatcatttgtgtatcacctgtctgtgacctggaagctccctccttcctgccttcgcttcaagttgtcccacctttgcagacaaaaccaatgtacttcttacatgtgctgaatgatgtctcatgtctccctaaaatgtataaagccaagctgtgccttgaccacagtacttcctgaagctgtgttacgggtgtatcctcaaccttgtcaaaataaactttctaaattaactaagagctgtctcagattttctgagttca

SEQ ID NO: 1885677 - DNA, 4001 bp, Homo sapiens
acgagtagatacttcatactcaatggtcagggaaaaacttttctgaggagataacaatgaagctgagacctaaatttttaaaaaatgttttgtgctaatgctgtaagttcttctcgtctttatatcacttttttggcattgttactcatctaggattttatgattaatgttgtcactgttattattattcacttttcaaattcacataaattttactttttgatgtaccaccctgtcaaatttgataaatgcttacagtcatataaaaccatgaccacaatcaaactgcaaaatagttcatcaccccccaaataacccctgttgctgcactttatagtcaacacctcctgcccgcccagcccatagcaaacactaatgtgctttccgttcctatattttacttttccagaatgtcattagatagaaacataccatataaaattttttctctctgcctcttgttacttagcacatgcatttgagattcatccatgttgtgtgtatattattaatcaggtttttctattgctgactagtatttcattggatgtatatgtcactatttatccattaaccaatgaaggatgtttaggttttcccagtttttgacaataataaataagaccattataaacctttccatacaagtttttgtatgaacctaagtcttcatttaccttggttaaatactgtgagtaggattactgagtcatgggcttatgtttaactttataagaaatttctaatttattttcacaaatggtatatcacgtttattcttgcaaacaacctatggtatctcatggtttcaattagtatttccctaatgactactgattttgagactcttattatgcatatttatcatccatatatgtttggtgaaatacctgtcaaatcctttcctcattttctatttggttgtttgttttcttaaaattagtcttattaagggtgggtgcacacctataatcccagcactttaggagaccgaggtgggcaaatcaattgagcctaggaattctagaccagcctgaggaacacagcaaaaccccatctctacagaaaatacaaaaaattagctgggcatggtggcacacgcctatagtcccagacacttgagaggctgaggtaggaggatcacctgagccaggaagttgaggctgcagtgagccaaaatggtgccactgtattccagcctgggttacaacgtgagactctgtctcaaaaatatatatattcatattaagtatttcagattctttttacattgtaaatacaagtctgtattagttacctgttttgcacatattaatccagtctgcagtttctttcttttcttaacattgtgtttgcagaacaaatactcttgtttttataaaataaaatttatcaaagtttcttgtgttcttttgttgtcatatttaaaaaatatatttaacaagaccatctattgagaaaagagggttcacatactctccaataaagtacttatattattaagaaaaagttcaagtgcctatctgagagggaaattttcatctttgtagatgattgctagaaaaatgttctacctatattttcatatctcaagttaagctaagacagccaaccacttgtcaaaaatgaggtttactgtaaagaagaaagaattgtaaaattggtatatactttgaaaagtaaagtacaccaaccttttcattcaaatctaataaatgtatctaagtaaactatttaaaacttttcaacagatgcagaaaaaaaaaaaaaagccttcctagagctttctttatctgagtaaaagtagaaacttatgggaaataaggctgctataaattgcacttcagggtagatctaatcccagaagggaaaatgtaaataaaacctacctcaaaccccttctccaggggagtattatggccctgaaggaaacaggaaaaaacattcataactatatagacaaacattatcacaaactttatctcctgttttttcttctgaaagcccatttatctttccaaaaagtcatctgttttccctaggtgcctttctctctctccctttcacctattaaaattgtattatctataagctccaaattctaattacttcttttgagtcactcatcattgagttcttccatgtatatgggtgccgcaagcacaaataaattctattgttttctgctgtgtataatatgggctaaatttattggttgggttttggaggctatctagaagaatgtcagcaaactatttccatatggtagagcaggtggaaaaacatgtatgtacacatgcatatccagaaagaacaacaataaaaaagccctctgctgatcaaaaatattctaataaactcaatatacatacaataaaaataatacaagtaaaaagataataaagcataacaattatttacatagcatgtacattgtattaagtattgtaagtattctagagaggatttaaagtatacgggaggatattgataagttacatgtaagtaatatgccattttaaatcagggacttgagcattcatggattctgttttagtgggagtgatcctggaaccaattatctccagggataatgagggacaactggatagcttttccatcacccacgcagatgtaaataaccacaagatcatcaatagcattaaaatatggtggaataattagaaagtaatgaatattgagtatatattgcatgtttttattataatatatggaagatatggaagtatagatttattttgtagattttttaaaaactgatatgtgcatttaaaacctgtcttgcaaaattcctaaaaatttaatagctggcttttaatagaccgtagaaggcagctccagcacaccactggtcttatgcctttggaagcttcccacagcagaaaataaagcctgagagtgcaacaaagctgagcttattctaactccatatcttggttagccataaagaggaaaaaataactataaaacaatgacagatctccttactctactggtagtaaatttctgtatgctgtactgaactctttattgccaggcaaaattctatgtcagttccagcagcaaacaagaccaatgaaacccctgctctcatggatttacatttcagtagcccatttttgttgccccatgacacattccttttcttttaatttgtggatttagaacctggagcttcttcttggctccttggacaaaaccatgtttattcttgggatataccctatcaactctgatttctctttaaagatgtactcattctcctttactgggaattctccatttttgtggcctctcactacctcctttctttctttttttttatcattaatttgttcttataattttgtttttgttacttaaaaaaaagactgtgagaaaacattgacaagtgtattttctgttcatcttaaaccagaaaatattatctgataatttgaaatcagattgttaatctaaatagaatgaatttaaaaagttctattttttttttttttttatgggagttttgctattgttgcccaggctggagtgcaatggtatgatctcaactcattgcaacctccgcttcccaggttcaagcaattctcctgcctcagcctcccaagtagctgggattacaggcatgtgccaccatgcctgggtaattttgtatttatttttatttttattttttagtagagtcagggtttctccatgttggtcaggctgatctcgaactcccgacctcaggtgttccgcccgcctcagcctccgaaagtgcttggattacaggcgtgagccactgcgcccagccagttcaatccatttctgaaagtatcgtggaagcctggaagatttatttagtggcccttcagattaacgtattaattttttaaaataaacataagataaaagaaatataacatcagagtgaaaggaaaattgggacctcattgagtacaattattccatagcctctctataattggccaaaatac

SEQ ID NO: 1885678 - DNA, 4001 bp, Homo sapiens
gtagagacatggatgaagctggaagccatcattctcagcaaactattgcaaggacaaaaagcaccgcatgttctcactcataggtgggaattgaacaatgagaacacttggacacaggaaggggaacatcacacaccggggcctgttgtggggtgcggggagaggggagggatagcattaggagatatacctaatgttaaatgacgagttaatgggtgcagcacaccaacatggcacatgtatacatatgtaacaaacctgcacattgtgcacatgtaccctaaaacttaaagtataataataaaaaaaaaattataaagtactgcatggtgatatgtgcctatagtcctagctattcaggcggctgaagcaggaggatcccttgaacccaggataggagtttgaggctgcagtgagctatgattacaccactgcattccagcctgggtgacagaacaagtccctgtctctaaaaatcataataataataataatttttaaaattgtagtatagtatgtagccttttgtgtaatgaaagtggaaggaggagctatgaacatatgacatatacatatgaatgtatatgcttatctgcaaaaagaaacactggaaggataaattcagaagctagtaaaaatgattacctgcaaagcagtaagagaagagacagaagggatatggatgaaagggaagcatctttgaatataatttgttacacagttttgaccttggaatcatgtaaatgttttacatactcaaaattaaatcaaagagaaaaaaaatctagtgatcctcatacagctaaatgcttcatgtgataatggaacactgatatgttgcctatgccccattttattaaaatgaaccagactataaccttgacctagccaaatcatttttcttcagtaataaagtttccctgctatatttacttatgttttgctccaacatatctaaaagctaccatctgtaggtaataagaacagaacactatcacatattgttttaatttcctgcctgttatcagcagcaagaaggtaaccctggaaacagggatttatggcattctgtttcctacggttggtcacaaccacaaacaaaatgaaagcagcctccacaagttaaaggtttgtctacaacaacaccacacaatgtcagttttcaggtatacctttctcatgtcattcataattaagcaatgtcaacaaataacactgctgggtaacatccctcaagtatttagtctgccagacccttttctgaaagtatagtaagacaggcccacaatacaagcccaagtgcttttttttttctctcgagacagggtctccctctgttgcccaggctggaatgcagcggcacaatctcagctcactgcaacctccacctcctaggctcaggtgatcctcccacctcagcctcctgagtagctgggattacaggcgcaagccaccatgcctggctaatttttgtatttttttgtagagatggggtttcgtcatgttgcccaggctggtctcaaattcctgagctcaagggatctgcctgtcttggcctcccaaagtgctgtgattacaggcatgagccaccatgcctggcccccaagtgcttatttaagcatacttcgaaacaggggttcccagactcccgctgtgggcctgttaagacacaaatctctaggccccacccctagggcttctgtttcaggtgatctgagcagacctgagaatttgcatttctaacaagttcccagaagatcctgaagctcccggtctgagaaccagagtgcccctggtttgaactatttcatgttttgtgctgctacacagaaacttcatctcttcaaaatgctcctactcaaatatataggtaaatatttaaggacaaacagacctgtttctgctgtggagaaagtgagggaaaaaggtaagaagaaactccagggaaagatttcctcaaaaggaaatttctgtccaatggagttccctctgaacccatagtataggaattagtgccgtctggagtatctggtgatcagcaccaacaactccagctctctgaggaagccggacacctgacgcatctccctggaaggacagagttaaaagacagtggaagatgacttggaacatctgagtgagcatccatcctaaaggataggaaagagctaatggagtctgcctactggttttaaaattaagagaagagacagagagaagtgcctagggcatcacacctctgcttttggctggaattaaatcaactcaaggtgctaacaaagataagcctatcctgatttggtggagaatggtccagaccctcatagttccatctaatatcagagctacctccaccagcatacagcgcttatctcatcatgcctcgtagtaccatggttatttgtgcccacgtcccacagacacactgggctataagtttctgagttaagcattatatctgaaggctttggagcttctacacacttccctgtaacaccatgcacaaagctggagttaaacatagatcttctgtgtttattcaattaatatgtctgtctttactctatgattcacttttttttctttttgagacaaggtctcgtcctgtcacccaggctggagtgcagcagtgcaatcaccactcattgtagcctccatctcccagactcaagcaatcctcccaccttggcctccccagtagctgggactagaggtatgccaccatatccagttaattttttatttttttgtagagacagagtctcattatgttgcccaggctgatcttgaactcctgggctcaagctcctcctacctcagcctcccaaagtgctcgaattacaggtgtgagccaccacgctggaccaattcacttccttaaaatacatttttaaatgaagggactccaaagaaattcatgcagccaagggaacataagaattttcagctgggcacagtggttcacgcctgtaatcccagcactttgggaggccaaggcaggtggatcaattgaggtcaggagttcaaaaccagcctggccaacatagtgaaaacccatctcttctaaaaatacaaaaattagccggatgtggtgccatgcacccgtagtcccagctacttgggaggctgaggcacgagaatcacttgaacctgggaggcgaaggttgcagtgacttcagatcacaccactgcactccagcctgggcaacagagcaagtccctgtctcaaaaaaaaaaaaaaaaaaaaaaaaaaaatcactgccatcttgttggtaatagcaaaaatagagaagagtgaatcagaagaacaattacacagtttgggtaaactcacaataaaatatgacccagcaatgaaagtcagtaaatttgggctgcatttataaatccttgaaaggatattcagtgtaaaaagcgtgtagcagaaggatatgtagagtatgagccatttaaattaagtaaaaacaatgttacatgttgtttgtaaacatatacagaaaatgaaagtataaaaatagacatgaggccggtcgcagtggctcacgcctgtaatcccagcacgttcggaggccgatgagggcaggagtacaagaccagcctggctaacatggtgaaaccccatctctactaaaaatacaaaaattagctgggtgtggtggcacatgcctgtaatcccaggtactcaggaggctgaggcaggagaatcgtttgattctgggaggcggaggttgccgtgagccaacattgcaccacagcactccagcctgggtgacagagtaaggctctgtctcaaaaaaaaaaaaaaaaaaaaaaaaagacatgaaagcaatcccagctactcaggagtctgagacagaagaactgcttgaacccggaggcggaggttgcagtgagccaagatcatgccactgcactccagtctgggcaacagagcaagactccatctcaaaaaaaaaaagaaagttagggaccaaattcagtatagtggttacctctgtagt

SEQ ID NO: 1885679 - DNA, 4001 bp, Homo sapiens
tgaaaccccgtctctactaaaaataaaaaaattagctggtcgtggtggcaggtgcctggactcccagctactcgggaggctgaggcaggagaatcgctggaacccaggaggtggaggttgcagcaacttgagatcacgccactgcactccagcctgggtgacagtgctagactccgtctcaaaacaaaacaaaaaaaaaaagaccagcctggataacatggcgaaaccccatctctacaaaaacttaaaaaattagccgggtgtggtggtgcacacctgtagtagtctcagctacttgggaggctgaggtgggaggatcgcttgagctgaggaggtcgaggctacagtgagctgtgattgtgccactacactccagcctgggtgacagagcgagactgtggctcatgcgtataatcccagcaccttgggaggccgaggcaggcagaccacctgaggtcaggagttcaagaccagcctggccaacgtggtgaaaccccgacggaggctctgtccacagagctgtctggcaggtccttgcaactgtacagcgcagccagcccagcctccaggcctagtgcctgggttagtcatggcccctccatcacaggcaacgcgtggctctaccgggaaggtgctcaggtggaggaatttcacacaaggtgacgggggccagggcatgcttccggcaggaagtcagccctggagatctcaatactcacatgtgtgtctcagtcacactgtgtgtttgtgtgtgcggaacgtagagagctgatcacctcaagggacatcccagcccatagccccccaccgcacacacacccccaacgcacacacacaaacatgttcccaatgcaaagcatgcagtgttgcccaatgcgctcatcccggaggcaggtgtccgcttcgacaccgtgtggtgacacatgcacgacgggggcagatccccagcacccgccttctcattgtgagccgcctttgttttgcattcagacacgtggagccccgggaaccaagctgcagggccagtgccttccagccttccaggcccgaagcctccagtccctcaggagctcctcaggccttcaggagccccggcaagcaccctccggctcccaagcccttccgggcctgccagcggcctgctgtagagtggggtgggaagccgttgggagggaggagcagaggagttctggtctcccctagccgggcctcctgccgggacacctgccagctgctccccacccccggccttggctcctggcctggcagcccccgattcctccccttcacacactcaggactgcaaagaaggccgggggaggccccactaaagcacagcctccaaggtacacctggagactcggggaccttgggggccctcaatccctctgggcctcagtttcccccagaaagacaggcccagaatcaagagggatctatgacaatgggggtgggattaggcgtgtgtgtgcttcctgcgcatcctggcaggctgtgggcgttcttggcaggcatccaccagtccccaggctctggaggaggaggccggatgggggtgggaggctgggagccccgggggaatgagctgcaccgcccacaccgccataggagcggcctccacacacccagcccagagaggctggacccacagggcagtggcctcagaggagatgctgggctcccttgctggtgttggggagggtcgtcttgggtggtcttccccctacctttcgcccaaaggtgctctgggacagacccctgaccacctccaaagacttgggcctcagtctccatagaacgaggggtttctggaccacctgccagctgcctgggcagggctgagcaccagcactttaggtccattgaactttgggggctgcccagtccaccccactgctttcacctctgtcctgggttacaagaggggcttcaaaccgcagaccctacaacccaagacctcaaaacccagatcctggaatcctagactccagaacccccagacaggaacccggaccaagaatgttccccagagctgctcaggggccacgtagggcctttctgtccttctgtgacaaagacacttgtcactcgcgctccagggatggggcatggagtgcctgccttcagaatctgaaaggccttctccagaaactcccggtctccacccccggcccgccaaggggcgggtgcatcccacctgctgtgggctgaacctagtcctggtggctcttatcagtgccctgagaggtccccgggagggagccgcatcccaccaatggatgaggacacaggagccccatggagctcacccccagcctggccttcccagaacagaaagatggcggcccccaggaggccctcctggccctggcccgggtcggctgagggcagggcctggtgacagtttccggtgtgtcctccgcaacagccttctcaggctctcaccctcaccccaccccagagtctctgtacacccctgcttggacagctggggggcacatagagcatgactccggcccaccagggccagggtgggggctgcaccccaaatgcctttggcctgagtcctctagcggttgggaggagccaccctgacaggggcatcaggtgatgtcctaattgcatccagttaggatccagtaggcctcagtgggccccaatagcagctggggccaggcctggaggaggggatctgagccctgggccggccgggcagctacgcaggactctgcggggccgggcatggcctggcgtttcacacgacccagtcccatccctgggcctcagtcttctgtgtgtggaacaggaacacccccttgagggctgtggtgaggacccgatgatactggcgaagtgccctgggcccagctggccctcctgtcttggtcccggggcatggtgggaagggagctggggggcagagtgtggcagggtcatccccctcctgacttcctggcgtggcattgagttgggaaaggttgcaaaggggtgagctctcctgaactggtggcccaggcagctggggaggggcagcacagcgcagagtgcccctgctgggtgctgggtggggcaccagtgtccagaacgctcaacacagccctccccttggggctgcaaggcccccaccccatattagcctggcagcactggggatgtggcaccaacaccttccagtggaagtgtctgtgacgggaggtgaaggctgggtatttaaacatctggaaccagctctgaaggccaggcccgctgtggggggtttgggttccagccagccgcgcagcgtgggaaggatcacagcagtgtgggccagtggagagcggtggctggctccaagtacagattctgcctcagtttctccatgggtgtcttgggggctggtcttcctcagccccagctgcctgcccttctcgcccccccacagctcatttctgcaggtggccctccctccagccccggctgggccccttccctgtggctgagttacccccggcctgcccctgccagtggggctcctgctcccacgggggcatccttcacacattttttcccaaaccgcccctctcccgcgtcatcacagctccttggatttacatcggccagagcagcaggcctgggcctcctgttcaccagccatccctgtcactgaagctggtgtgccctggggcagggtcagggatgtggcacagaaggctgcccggcaagtgcctgaggaaagagggaaagtctgaatgcacagaaacaaacacatcaacagatgctattcacagctcacgagaatcccatgatatccccatttacagaagtagtgggcacagagaggttaagcaacttgcctggagtcacacagcctggaagtggcagagctgggatttgaagtcagatgagtgacagccttcagcagcaggccctttccctgaaaaatgggacctcctggaggctggataaggcctcagtggagacactgtggccctcacagcaagtctgacagacacacaaacaga

SEQ ID NO: 1885680 - DNA, 4001 bp, Homo sapiens
gcttcagcaggctggagacagtgatcacagcgagaccttttacgagtgtccctccaccgcgccttgggaacctgtgggtgccaggatgcaagaaagagccaggctacaggaggaatactgggacctgcaggacatgctgaccaacagacaggactacatacagatgattccggaactgtttgaccagttacacggagccgagtggttcacaaaactggagctgcgtgggaccattgtggaggaaagcgtgaacgggcaccgcaccgaagatgtgtggaaagcagcgtttggtttggagcttgaagagatgaagagctaccagccgtttgcgctctccccagaccctatcatacctcagaacgtgattcacttcatcctaaaggacatgctagggttctttgtgctttcttatggccaggaagtcctgatctactcaatgagtcaggaggagcacctccaccacgtccgccaagtcctggtccgcttccgccatcacaacgtctactgctccctggacaagagccagttccaccgccaaaccgtggaattcctgggcttcgtcgtcacccccaaaggggtgaaactgaacaagaacgtcatgaccatcataacagggtaccctacccctggctccaagctatctctgcgaaacttcatcgaattcgtcttcccctaccgccacttcgtggagcgcttcagcatcatcgcagagcccctggtgcggcagctgctgagctcctaccagttctactggggagtcgaggagcaagaggccttcgagtgcctgaagagggctttccgcaaggcgcctctcctccaccaccccaagccccagaacccattctacttggaaaccggcgtcaccggcacggccctgcacgcctccctgatccaaatcgacgaccaaaccggcaagagagcctgctgcgctttctactcccgcaacatctcccctatcgaggttgagtactctcaagcggagatgaagattcttccaatacgggctgccttcatggtgtggtgccgctacctggagaacaccgaggagcccatcatgatccttctcaacacagaggatctagcctctctgaataatgacaggctcaccgtacttctccccgggcattgggtcttcttcttctcccacttcaactttgacgtcatggagctgccagaacaagacggcggccgagctctgccacctgtgagaaacctccggtggaggagagccttccagaggaacactgccgccaggcaaaccctgctgctggcctcaaggggattccccagggatccatcgacggaatccggggaagaagagaatgaagaacaggatgagctcaatgaacagatcctacggcaagagctgctggccatgatacccatcgaccagatcctcaacagcttcctcgcccacttcagcatggcccagatcagggccgtcattctgcacttcttccgaggcctcctgtactggaagaacaccctagccctggcagccatcctcgtgctactgcgcgtgaggcaatgcctctcgctgcggccggcacccgccatgcgggtggctcggccccagccccagcgctccctacgactcatcctggattcgtccctcatcgcaggcagcagcatcacgacagccatcacccagctgctcacccagatgcccgctctcgtaggtgcaaacaccatcccagcccaggagctggctgagctgttcctgggccctggccgctggcagcgaaatgctctgcactcccaggcccaccgaggcctgcagttcacccctggcttctggctgacgctgtgtgagttcttcggtgtcagagtcaccccccaggagggccacctccctgccctgcgtcagaaccgctacctggagctgcacgtcgttggtgatgaggatgtcgtcttgcgagaagccctgcaagacgacctgcaacgttaccgtcagtgtggcctgcatgacggcctgcaagacacctcgcaggacaagcaggacaacgacgtgcaggaggccccacccagccacacagcagccacccacccaccccgcccacgccacctgatggatccccaggtcctggaattccttggtagccgcctgctccacatccacagtgcagatggccagctgcacctgctcagccgggagcaggcagccagggccctgagccagttcctgaccctgatctacaggcgggccctgcccatccccgcctgggagagccagcccagggagcaggcaaggctagaagagctgcctgatgaggacgaagatgctaacctcgactgaagacgcctccctgtctccagcaaagagtcccctctatttctcaccccaacacctcccgacgtcccctggcctccccgcgcctcagcctgcttcgcttcccttcctgccactcctgacccaagaggaacccacttgtgaagggcaacaacttcttcaactcatcaaccagcaatgccacctgtgctaacggactacccagtcctcagagacccagcgccagccctgggctacgagttctccgttctccaggtcccaagcccatgcccgggagtgacatccatgagggagaaagcagtggtgagcaggaagtgaccccatgacgcgtggccagatgaagaagcaggcacagcaggcgcagccaagcaagcaggtgacggggccccccacccggcctggtgatggccaccctgggacactgacctcgggtgctccactgacttcttctacctccactgccggtgctcctgctcccctgagctcccgcccccgccccccaacccccatcccccaacctcccgacatctgatgatgtggtgcctccctcacccccatcacaccctgcaagcaaacccacccccacccccaccacatctgcttcagcttttttgaccccgccttcctcttgccctgagctctggacttacctggacaaagccgctctttggggcatccggacgtaccagtgccacttaccagacttgcacagcaaagagggcccctgcatgccttggggcgcctttccctcccaacactgaacactggacagtgcaggggtgcaggggcccctcatacagggatggagtcccagaaggcacacagacacccaggggaccatgccgagtcacagagaggctctggccacaccaccgctttgcaaggggagtagacccttccccaccccccgagctttctcaccccccaatctttttgcactcctcaaataaagcaaactaaaagactgtctgactttggggtttgttctaaaagtggaggtggtgggaggataggcgggggaggggacacgcatgggaggagggagggagtaggtggggtggacgagggggcaagtggactgggcaggaagggtgggggcaggaaacgctctgccctgaaacagcccctgggggcctggcacatgggcagcaggcctcccccaaccttcctgaaggcgtccccaccaagactctgggcacttctttctgccatgagaaggcacccacccccactgaggccaccagggacgtgcaccccccacaggctcatgtcaaagagaggacagaagaggtgccttagggcagtgggaggcgggggagtgggggctgtctctcctaagggttccagaaaagggagccccgaaacccagttcccacctctggccttggcctcctcgccatgtgattaacgaggtgcggtctgagccccacactgcagggtccacaagccctggtctcaagcagtccctaacccccactccgagaggaaaagtcctgggtcccatttcagagggtcatgctgtccccaaagtggcaaaatggctgttgtgagggtgagggtgcactgccctgggtaggggagctgccaggggtcccacagggagttggggaggtagggcaggtggcactcacccactctgagttccccctccacagtccaggacatgctgacccctcttcctggccatgggtcacacctatccaggagtggc

SEQ ID NO: 1885681 - DNA, 4001 bp, Homo sapiens
cccttacattttaaccagagaatagttttggtgagtttacatgtcagatatgtttacgctagaaggtttggatttaatattgcagacagtaaataaacagtggaaggctttaatcagagagactgcatgatcaaatttaagtgtcatgctaacaagggtgtacttaattttgagaaacagcagatctgaattttgtatcctgttggaaagcttggattttagccaatgagtttcacgtaagggggaacgcagtttttttttttttttttacggatgggtccagtggcttagaagaaaactcagaagtaacaaaaggtgttaaatttataaagagcagtagctttacagttaatctatcagataatcaaagcttaatttgctctgccccagcagagaagaaatgtgcaaataaccccaaccaagacattccctttcaattctgtctcagcccactaaaaccacccaacactagatttccaaaaatccactctgggaccgtcagattccaaagatgtcacatgttccccccaacccccacactcaatgtcccaactctgccagatacatgtctgttgggagggctcaaccagcaacagagagaaaaagatatttgctagaaagaggagaccagacccactggcgttaagaaggggacctgggaggataagattggagaggcgtgcagatatgcttgcactggtgaaattgaggccagatgtgtgaagttccagaagcctcacaaagagggcagtcctgggagagtggagattgtaggaagagaaggagattatttgaagatctcctcaacagctcagaggtcgggagaacatagcattggaaggagaccaaatcgagaaagagaaattggccaaaagtctgagttagaatcaagtaacaaatatgcagttatccagcacatagtaggtatgttataaaatttatggaaaaaaaaaaaaaaaacccagacctgtacacaccccctgaaatttctattttgaacatggggaaggaaataagaactattttgggctgctgacccaactgacgggacagtggccaagtgcccattttctcctcttccactgcactggtgaaacagtaggcatctttgctagagattcccgctccacaaccaaggtggctgggcttgctccagagccctgagcctgccaggggtggctttggatggtgctgagatgtgacctctgtgattctcaggtgaccaaagcaggaaaagaggattgaccaggtgcatgtgccaggggggaatggagcagcctgtgcaccctgccaggtacccgcctgccacggtggctgctcccagccacagaatttatgggctgtgaatttctcacatctatggaggaaaaggacaggacaggcagactgaataagcctgggaggcaggtcaggggttgacagatcttccctccctgggggcaccccaagtgaccagccaaagaggctggctcgatacaagaaggctttcccccatttctctctgctctgattagttgggcatctgatttgtccttgagaccctgatactgccacttcacaagatcctaaactactgcctttactccccacactccccttccaccaccaggttctgatctccacggtcccagctactgactggacgccatcacaaccttaccaatcttcagaatacactcctttccatccgacgaaatgatagaaccctctgaagactcatttgagacgatgatggagcataagaatccatcatcaaaacaaatggagtcctccgagggctcatccaacaccaccgaggcgacgtcgggcagtggagtgcggggagaggcagggccagccagcggcccagcccaggaaaagaaggagccccccagtggcccactccaggaaatggaagagctgcccactgatctactccaagacatggaggagccatccagtggcccacgtaaggaaatagaggatccacccaatgacctactccaagacctggaggagtcatgcaacggttcacaccaggcaaggggggatccactcagtggagcatctgataggatgaaagaagcatcagtcaacccatcgggagcccgagaagaacaagaggctcacactgacctgaaggaatcgggaagggaggagactcctcaagagcaaaaccagaccgagcactcaaccgcagaacttatggccatggtgaggtccatcatctcgctgtacttccgaatgcaagacctcaaagagcaacagagagtagcagaagagatcttgatcaaagggatcaatgcaggccaactgcccgccccaaagcacttctctggcgatcgcagagaattccacgagttcatcgtactctgccaactgaccttacagagctacccaagaatgttctataacgaccgtctgagagttggctatgtcatcaatcacctgtccggcttggcattagaatgggccaaagctctactgcaggaaaacagccccctgatcggagacttcccagccttcctggaggccatgtccgaagtgtttgagtaccgccaggcactgcgtgtggcagaagaggccatgttcaccatcaggcagggcggccgctctgccactgagtacatcgatgagttccagagcctggtacccatcttgggctggccagatgaagtcctgcaggcccacttgtgccaggggctcaacgaggagatcaggcactatctattccgggtccctcagccggattccctagacagtctgattgtgctcatcctgcaaatagaagagaagctggcagagagaagagctatgctcaggctgccccccgaggcccgcccccggaacctgacctggatcgactcacctgctccagagaggtggatggtcagcagctggttgcccagcgaagtccatccggacatcaatcgcgcccacctcttcctgctgctcatggtgagagtgaacccctaccacagcgtcgcggtccaggccctggtggattcgggagctgacggcaacttcatggatgagaagttcgcccaagagcactacgtcgagctctacgagaagccgtacccacagccggtccaatccgtggacggctcgctgattggcaacgagcctgtctggctctacacggagcccctggtgtgtatccaccagaaccaccaggagtccatcgaatttgacatcgtaccttcaccgaacttctctgtggtcctaggcatccgctggctccgagtccacgcccccgaagtcgactggatcaaaggccgctgcaccttccactctccctactgcctgaagaactgcttccgcccgcccccgccatgcattgccctagagaggcacggcatgagcctgctacccggactgccacacccatactcagacctggccgacgtgtttaacccgaaggaagcagatgatgagacttccgaccagccaagctcagacggatccgatgatctttctgaatcagagccctctgagcttcagcaggctggagacagtgatcacagcgagaccttttacgagtgtccctccaccgcgccttgggaacctgtgggtgccaggatgcaagaaagagccaggctacaggaggaatactgggacctgcaggacatgctgaccaacagacaggactacatacagatgattccggaactgtttgaccagttacacggagccgagtggttcacaaaactggagctgcgtgggaccattgtggaggaaagcgtgaacgggcaccgcaccgaagatgtgtggaaagcagcgtttggtttggagcttgaagagatgaagagctaccagccgtttgcgctctccccagaccctatcatacctcagaacgtgattcacttcatcctaaaggacatgctagggttctttgtgctttcttatggccaggaagtcctgatctactcaatgagtcaggaggagcacctccaccacgtccgccaagtcctggtccgcttccgccatcacaacgtctactgctccctggacaagagcca

SEQ ID NO: 1885682 - DNA, 4001 bp, Homo sapiens
cactgagtacatcgatgagttccagagcctggtacccatcttgggctggccagatgaagtcctgcaggcccacttgtgccaggggctcaacgaggagatcaggcactatctattccgggtccctcagccggattccctagacagtctgattgtgctcatcctgcaaatagaagagaagctggcagagagaagagctatgctcaggctgccccccgaggcccgcccccggaacctgacctggatcgactcacctgctccagagaggtggatggtcagcagctggttgcccagcgaagtccatccggacatcaatcgcgcccacctcttcctgctgctcatggtgagagtgaacccctaccacagcgtcgcggtccaggccctggtggattcgggagctgacggcaacttcatggatgagaagttcgcccaagagcactacgtcgagctctacgagaagccgtacccacagccggtccaatccgtggacggctcgctgattggcaacgagcctgtctggctctacacggagcccctggtgtgtatccaccagaaccaccaggagtccatcgaatttgacatcgtaccttcaccgaacttctctgtggtcctaggcatccgctggctccgagtccacgcccccgaagtcgactggatcaaaggccgctgcaccttccactctccctactgcctgaagaactgcttccgcccgcccccgccatgcattgccctagagaggcacggcatgagcctgctacccggactgccacacccatactcagacctggccgacgtgtttaacccgaaggaagcagatgatgagacttccgaccagccaagctcagacggatccgatgatctttctgaatcagagccctctgagcttcagcaggctggagacagtgatcacagcgagaccttttacgagtgtccctccaccgcgccttgggaacctgtgggtgccaggatgcaagaaagagccaggctacaggaggaatactgggacctgcaggacatgctgaccaacagacaggactacatacagatgattccggaactgtttgaccagttacacggagccgagtggttcacaaaactggagctgcgtgggaccattgtggaggaaagcgtgaacgggcaccgcaccgaagatgtgtggaaagcagcgtttggtttggagcttgaagagatgaagagctaccagccgtttgcgctctccccagaccctatcatacctcagaacgtgattcacttcatcctaaaggacatgctagggttctttgtgctttcttatggccaggaagtcctgatctactcaatgagtcaggaggagcacctccaccacgtccgccaagtcctggtccgcttccgccatcacaacgtctactgctccctggacaagagccagttccaccgccaaaccgtggaattcctgggcttcgtcgtcacccccaaaggggtgaaactgaacaagaacgtcatgaccatcataacagggtaccctacccctggctccaagctatctctgcgaaacttcatcgaattcgtcttcccctaccgccacttcgtggagcgcttcagcatcatcgcagagcccctggtgcggcagctgctgagctcctaccagttctactggggagtcgaggagcaagaggccttcgagtgcctgaagagggctttccgcaaggcgcctctcctccaccaccccaagccccagaacccattctacttggaaaccggcgtcaccggcacggccctgcacgcctccctgatccaaatcgacgaccaaaccggcaagagagcctgctgcgctttctactcccgcaacatctcccctatcgaggttgagtactctcaagcggagatgaagattcttccaatacgggctgccttcatggtgtggtgccgctacctggagaacaccgaggagcccatcatgatccttctcaacacagaggatctagcctctctgaataatgacaggctcaccgtacttctccccgggcattgggtcttcttcttctcccacttcaactttgacgtcatggagctgccagaacaagacggcggccgagctctgccacctgtgagaaacctccggtggaggagagccttccagaggaacactgccgccaggcaaaccctgctgctggcctcaaggggattccccagggatccatcgacggaatccggggaagaagagaatgaagaacaggatgagctcaatgaacagatcctacggcaagagctgctggccatgatacccatcgaccagatcctcaacagcttcctcgcccacttcagcatggcccagatcagggccgtcattctgcacttcttccgaggcctcctgtactggaagaacaccctagccctggcagccatcctcgtgctactgcgcgtgaggcaatgcctctcgctgcggccggcacccgccatgcgggtggctcggccccagccccagcgctccctacgactcatcctggattcgtccctcatcgcaggcagcagcatcacgacagccatcacccagctgctcacccagatgcccgctctcgtaggtgcaaacaccatcccagcccaggagctggctgagctgttcctgggccctggccgctggcagcgaaatgctctgcactcccaggcccaccgaggcctgcagttcacccctggcttctggctgacgctgtgtgagttcttcggtgtcagagtcaccccccaggagggccacctccctgccctgcgtcagaaccgctacctggagctgcacgtcgttggtgatgaggatgtcgtcttgcgagaagccctgcaagacgacctgcaacgttaccgtcagtgtggcctgcatgacggcctgcaagacacctcgcaggacaagcaggacaacgacgtgcaggaggccccacccagccacacagcagccacccacccaccccgcccacgccacctgatggatccccaggtcctggaattccttggtagccgcctgctccacatccacagtgcagatggccagctgcacctgctcagccgggagcaggcagccagggccctgagccagttcctgaccctgatctacaggcgggccctgcccatccccgcctgggagagccagcccagggagcaggcaaggctagaagagctgcctgatgaggacgaagatgctaacctcgactgaagacgcctccctgtctccagcaaagagtcccctctatttctcaccccaacacctcccgacgtcccctggcctccccgcgcctcagcctgcttcgcttcccttcctgccactcctgacccaagaggaacccacttgtgaagggcaacaacttcttcaactcatcaaccagcaatgccacctgtgctaacggactacccagtcctcagagacccagcgccagccctgggctacgagttctccgttctccaggtcccaagcccatgcccgggagtgacatccatgagggagaaagcagtggtgagcaggaagtgaccccatgacgcgtggccagatgaagaagcaggcacagcaggcgcagccaagcaagcaggtgacggggccccccacccggcctggtgatggccaccctgggacactgacctcgggtgctccactgacttcttctacctccactgccggtgctcctgctcccctgagctcccgcccccgccccccaacccccatcccccaacctcccgacatctgatgatgtggtgcctccctcacccccatcacaccctgcaagcaaacccacccccacccccaccacatctgcttcagcttttttgaccccgccttcctcttgccctgagctctggacttacctggacaaagccgctctttggggcatccggacgtaccagtgccacttaccagacttgcacagcaaagagggcccctgcatgccttggggcgcctttccctcccaacactgaacactggacagtgcaggggtgcaggggcccctcatacagggatggagtcccagaaggcacacagacaccca

SEQ ID NO: 1885683 - DNA, 4001 bp, Homo sapiens
tatctttataagaagaggaagaaataccgaagatatatttcttcctgaaggtcacatgagaacatagcaagaaagttgccatctgcaagccaggaagaaaggtcccaccagcaaccaacctgccggcaccttgatcctggatttttggcctctagaactaagagaaaataaatttctgttatttaagccacccagtctgtggtatattgttatggcagccctagcaaatgaattcacaattcctattatgtttaggagatgcaaacggtgaacagacatagcccctggctactgggaatttgcattctagttcaagggcagtgtgggaaatactgagtaagtttcttgtatgaagctaatcaattacttgatacagagtcagcagcttgtttccccacaacctaacatccaactgacattcttattgcacgggaatactcaaattatttgttttgcaaatacctagctgaagaaatgagccagctggacctcttacctctctctcattttctggaaaaacctggaattgcagcaaggaatgcatattctaggctcccctccacaactgctctccaggagctcaaggctctacaccctccatttcctcagcaatggctgcaggaaccacagtgagccctctctgccccctaactctccagaagaaaaacaaagcaacctgaagtcaaccccatctgtcatataccctagaggcagtcttctctatctgtttcagagacaatgttttggtaactaaaccactaaccaaaaactactcactacttctttaaaaatacacaaaaagagcaatagtttaacaatagtttgccttctctactgccattacaaaaaaaaaaaaaaaactataaccaaatagcctactttaaagcaatcaattctgtttagaaagaggattcaagcaacataataccttaaaatagaaagagaatgttaaaaaataataataaacaggaaatgcagggattgctgactagttatattatttccactattttttccacagcactgtctctaaattattgaactctctgcatctcaaagccaaaccccttacaaaccaatgaacagaccttgattattctagccatgttgctggagcaaataaaacaaatagggcctctcttatccacagacacgtccattcaacaaagtccttatgtctaaatatttgtgcaaggtatgcattttttttttgcaaagaattgttttgcaaaagcatcaacaaataatttaaaataatagtactaaagcaattcaataactattaagatgatccagtctaggcctggctggtggaaatattgcacaattctacacacaaacaacacagaatcaattcagagcttctaatacaggcttctaggttatccagagatcacaactgctaagaccctgcattctgaaagcccacaaaatgattcgctggttacatatactacaagtagaggactcctgcaatgacttcatttttgcccatgcttcaggtagtcttgcttcaggtacaatgaaagcagagtaaacttgggccaataaaagagaatcaggcagggtgcagtggctcatgcctgtaatcccagcactttgggaggccaaggagggcagatcacttaggtcagaagttcaagaccagcctggccaacatgatgaaaccccatctctactaaaaatacaaaattaactgggcatggtggtgcgtgcctgtaatcccagctactcacaggctgaggcaggagaatcacctgagcctaggaggtggaggtgcagtgagccgagattgcgccactgcactccagcctgggcaatagagcaagattccatctcaaaaagaaaagaaagaaagaaaaaagaaagaatcagagtagaataaataaatgattgtcttctttcctttggtttttggcaatgtagatatttaagcaggaaatagaaacaaatagaaatttatatgtaaattctatttcctgcttaaatatctacattgtcaatttcaatttgtggggaggaagtcatttattatttcttgttcttaaagattcttatatttacatgtctattgtttctgttgataagtttcttaaaaggtagaattcttttcttaattttattactatactatcacatgtaaatggtcactaaatgtaggagtctcatcctgagcaaggacaaatgacattgtattagaaacaaactgtagaccgaataagtctagacttaaaaaaagtcccaccattttccagatccttggggtttaaactgacaattcttgggaatgccatgataaaataactaagggtaaaaacaagacaaaacaaaaacagtgattccttagcgttgtgacaataaatccccaaatacaagggtcccatttttatccagtcagcaagggtgtggccttgggcaaaaagactacaccttctgtagcttgggtttggttcccaagttgtcatgtttcaggaatgaagaacgggatattcaagaagacttctctcaaatgacgggctatttacagagcatttagatctggttactcatctatcatcaagctgtggctatccagtgttctctggatccttcagtggtgttgtggaatttgatttttatcattttgctattctacctctgcctctatctatttagttttgaggtatcaattgcctgtattatggtccatgtctaaacactgcttttggttatcaagggttgaatatcagaaaatatttagttaacgataacaagatgtactataagctattactaatcagcaatgtgcttgaactttaaaatgtttcttaatcatcaacttttgaatttcatataaatatagcaagatatttttgggctgctttgtgtaaatggcaggctgagctaaataacaaagctcatactaatatttttctatgtagcccaaaagattcacattgtttataacataaagatggcataaacagatgatattaataaaatttagtcatacatctcactatatagtcatatagatagcatatatagtcagaaatacaaaatacaaagaaaaagtcaaaacagaacaaaacacgattgtgaagtttataagtggttagctcaaaactgaaaaaaatatgaatccctgcacaatgtaggttaacattcagtagatgacaaaatgaacagaggtaaaaattcttagataattttctttatttcatatcgcaaacaaatggctaaaagttagtgttccttactggcagaaactcattttggcacaaagtttttcaacataaaaattttttcagcataagaccataaacagtatttcaaatactacatttgctattaattggaaagacagagtataaatctgtcacttcggaaattatcatcacaatagaggaatttcttcaaaaatacttaccacataggcattttagacactcttgtggttaagaaatattaaatttattagatatttaatacatgcttaagtgtatattatgtgccagacactctgaagggaaaaaaattgtaaatagcttggttttccaactgcctactggacatcttcacatggaataattagttttttcaataacattctgactttatttgacatctacaatgtattagaaactggagagtcaaaggtgaatacaacatgattctgtagaaccagactatcatactggtggccacaaccaaactgatcgtcccatctcttctaaacctgctctcatttttattaattatcatagtcactcagctgaaacctgaaagtcaatcttgatgcatcatccccagtaaaaaatgtctctgattgtcctttgtaatttctgcctcatgtttcttctccacacccttttacggaattctctccctctcatcaggacctcccaactggcctctccacctttgttgtctttatcctccccccatcctagagaagtcctccttagcataatcctcgtctgctaaagactttccatttctccttactaactacagaggaa

SEQ ID NO: 1885684 - DNA, 4001 bp, Homo sapiens
caaaacgaacaacaacaacaaaatgactgggcatggtggctcatgcctgtaatcccagcaatttgggtgggtagatcacttgaagtcaggagtttaagaccagcctagttaacatagtgaaaccacatctctactaaaaatacaaaaattagccaggcatggtggcgtgagcctgtagtcccagcgacttgggaggctgaggctggagaattgcttgaacccaggaggtggaggttgcagtgagctgagatggcaccattgcactccaggctgggtaacagcaagactctgtctcaaaaaaaaaaaaagaaaaattagccaggcatggtggtgcacctgtgatccccattactccagaggttgaggtgggaggactttttttttttgagacagagtttcgctcttgttgcccaggctggagtgcaatggcgcgatctcagctcactacaacctctgcctcccaggttctagcaactaacctgcctcagcctcccaagtagctgggattacaggcatgagccaccacacccagctaattttgtatttttagtagagatggggtttctccacgttggtcagtctggtctcgaactcctgacctcaggtgatcccccgcctcagcctcccaaagtgctgggattaggggtgcgagccaccatgcccggccgggaggtcaaggctgcagtgatctgtgagatagtgccactatattccagcctgggtgagacagagactctatctcaaaaaaataaacaaacaagcaaacaaaaccaatacgctcctaaatgaccagtgggccaataaagaaattaagaaggaaatttaaaaatctgttgaaacaaatgaaaatagaaagacaacataccaaaacctatgggaaacagcgaaagccgtactaagaggaaagtttatagctataagcacctacatcaaaaaagtagaagaacttcatataatctaacaatgcatcttaaaaaactagaaaagcaagagcacaccaaattcagaattagtagaagaaaataaataataaagatcagagcagaaataaatgaaattgaaacaaagaaaacaatacaaaagattaatgaaaggttggttttttgaaaggataaatagaattgacaaacctttagccagactaagaaaaagagaagacccggataaataaaatcagagatgaaaaaagagacattacaaccaataccacagtaattcaaaaaattgttaaaggctactatgaccaactatatatgccaataagttagaaaacttagaataaatgaataaattcctggacacatacaacctaccaagattgaaccatgaagaaatccaaaacctgaacaaaccaataaaaggcaataagatcgaagccataataaaaagtctcccagtaaagaaaagcccagaacctgatggcttcactgctaaattttaccaaacatttaaagaagaactaatactaaaccctactcaaactattccataaagtagaggaggaaatatttccaaacacattccatgaggctggtattaccctgataccaaacccagacaaagacacatcaaaaaaatgaaaactataggccaatattcctgatgaacactatacaaaaatccttaacaaaatactagcaaaccaaattcaacaacacattaaaaagatcattcatcatgaccaagtgggatttaacccagggatgcaaaggatggttcaacatatgtaaatcaatcaaggtgacacatcatatcaacaagatgaatgacaaaaaccatacaatcaggccaggcgtggtggctcacacctgtaatcccaacactgtgggaggccagttcaggtggatacataacaaaagaccagtcagccttaaaaaaggagaaaatctttaagataatgagaaatacttaagataatatcctccatgttcatctctattgtcacaaatggtccatgccacaaatgacaacagagatgaacctggaggacattatcttaggtgaaataaaccaagcacagaaagataaatactgcgtgatctcatttacatgtagaatctcaaaaagttgaactcacagaggtagagagtggaatggtggttaccaggggctgagggtggcagggaggcaggggtggtgtggaaagatatttgttaaaggacacaaaatttcagttaagtaagaggaataagttcaggatatctattacacaaaatgttgattatagttaataatgtattatattcttgaagactgctcagacagtagatttaagtgtttgcatcataaaaaaaaaataagtatgaaaggtaatgcatatgttggtgagcttgatttagccattccacaatgtacacatacttcttgagacagagtctcactctgttgcccaggctggaattcagtggtgtggtctcgcctcactgcaacctctgcctcccagggtcaggcaattctcgtgcctcagcctcccgagtagctggcattacaggcgtgtgccaccacacccggctaatttttatatttttagtagagatggggtttcaccatgttggccaggctggtctcgaactcctgacctcaagtgatctgcctgcctcagcctcccaaagtgctgagattacaggcaggcgtgagccaccctgcccggcccataacgtatacatacttcaaaacaacatgttgtacatgataaatatttacaatttttgtcaattaaaaaataattttaggccaggcacagtggctcacatctgtaatcccagcacttcaggaggccaaggcaggaggagtgcttgaagccaggagtttgagaccagcctgggcaacaaagcaagatcctgtctcaacttttaaataagaaataaagttaaaaaataataattttaacttttttgaggcaaggtctcactctgttgcccaggctgaagtgcagtggcataatcatggatcactgcagccttgatctcccaggctcaagcagtcctcccacctcagcctcccaagtagctgggactatagttgtgcaccaccgcacccggctaactttttaaattttttgtagagatagggtctcactatgttgcccgagctggtctcaaacccttgggctcaagaactattttctaaaaaggaaaaaataaaagacactcaacatcattatcactagggaactgcaaatcaaaacttccactaggatggctaaaatagaaaagacaaaccaaaatagatgttggcaaggacatggaaaattggaatccttattaattactggtgggaatgtaaaatagcacagagctttggaaaacaatttggcagttcctcaaaatgttaaacatggagttaccctgacaatccagcaattcccctcccaggtatataaccaatataaatgaaaacatatgttcacaaataaacttatacatgaatgttcatagcagcattatccataatagccaaaaggtggaaacaatccatatgtctatcaactgatgaacaaataaaatgtggtatatccatacaatggaatattgttcagccataaaagacatgaagtactgattcatgctacaacagggatgaactttgacaacattatgctaagtgagagaagccagtcacaaaagactacatagtatatgaatctatttatatgaaaagtgcagaacaggcaaatccacaaagacagaaagtatactagtggttgctagggcatcgggggaggtagaaatgggaagtgactgctaatgggtatggggtgtctttttggggtgatgaaaaagcctgaaattagatagtggtgatgattgctcagctctataaatatactaaaaattgatctgtgcactttaaaagggcgaattgtatggtgcataaattatatgtcaataaaacttttatttagaaaattacataacgtcacaccatctttttttagttattccctaagattagatttgaaaaattacatagatacaaagaaaaaaatacatttttaaaaa

SEQ ID NO: 1885685 - DNA, 4001 bp, Homo sapiens
cctttacacgcaccaggacgcttttgagccagaaagtgaaactcggagagtctgttaataaaatgccatggagaggattgtgcatgatttaccgtatccaaaaccagagagagtttctttgtggaagaaagcgacttgtgccttccccagcatcacacacacactttcctggcaggctcaatgggtttccaaacatttcgtcaccgtctcctcctgaccttggtgtgaaaggaactagcagcgtggcccgccagcaaagccatcgggggcgccagcctgggcgggggatggggacggcgaccgactcgtgagtggaggtgaggtctgctggaaatccccagccccggccgccgcctgaggtttaaggacgccttccccggccttatttggtcgcaggaagtgggcggcgccgggcctgctggctgaggccgccccgagacagttgtgctgatgaagtggtagagctggttcctgctcgccgcggtgccgcgcgcgccggccggccgctgggcgctccgcgctcccagcctcgagttgtgcaatcctttgtagcacgccagagtcctcctcctccgctgttgcctctcgccctctctctttttttttttttcaagctgtgagctcaaccgatgagtcagagccgtgcaatcctgacactgcatcgcaggactgggggtgacacggagggaggcagagcgctcgcgaggcggacggcacgggtgcggggcgcgccgaggctcctgcatcgcaagcggggggtgacagcccgcgcgtcccgcccgggccctgccagcaaacttctcagcctcgggaggcgcgggctggcggaagccccgcgagcgccgcggggaggcgacggcgcctgtttgtttttaaaatcgggagtgcgtgcaggcggctggagtcccggaggcgaccgaaggcggcgacccgcggcggaagggggacagccgagcccggagcccggagcccgggcaagagctgggtaagtggggctgcctggccggcggccgaggcctgcacgcggcggggccggcgaggggaccccaggcggcgcgcgagctgtggctgctcgcacggcgggttgcagctctgcaggcgcggcccggagagggggccgcgggggccgctgcgctcgaacttctgcggcctgggcggcggtggagcgggcgcgtgtggccgtgcgggggccgcctgcagcccgccgccccctcccccgcggtccgcgccctcggcccgcagctgcgtgtgcagcgcagccccgcggtgtttgtgcagctacgcagcttgcgcgcggcccccgcccacccgggcgcggccccgccaggaaagccctccccacccggcggcccgcggcggctcgggaatccggctgctcctcctccgctggagagaaacgtggtgtccgtggggaccggctgacgtgacggagcccaggcccggaaggcgcggcgaggggctagccagctgagggaacttggcgcgggagccccttcccctgccagcgtgcacgggaaagtgggcctggacgcggcgtccacgccaggagtttgggggacagaggtgcaggggcgttggggaactggggcaaatgcagtcagcagaggcctaggctggagcgcttcgcgcgggcgggcgcacctcagacctgtcatcctcccgcgcgcccccgcacgcccgcgccgccgcagccctcccagcccgcgcggtgcctcgcggggagctgtgttccctggtgcctggcggcagcgccgaaacccgggattcggccgggccctgcatatggccggcttggtggagctggtcacgtcgcctcccaagtcgcacatgcaggaccatgtgtgtcaggttgcccccaaggcctctgggtaaaggtctaggggaggaaggggaacttcgtgtgccctggggccttcaggcttcagccccaaggcgggccgacatggaggaggtacctgccacagaaagtggaggccgggtgtccgtcccagcccagcctccagcgagagctggtgagaagatgaaaggggaagttatatgccccatttaaaactttgttggtcacaactacggtggctgcttcctgtttccaccatcccacgtgggacctgtgtgccagcctgtggagcctcgcgcggggggcggtgggatgggggaagagaggctggccacggaggccccggtggcccgcgtatgcaggggatccctgttggcagctgcggctgggggagggaggggatgtctggcttgctccagcagggggagcctggccaggtgatctgggatcttcttgttcctgtagcttcagggttgagactgaaggcctagtgaaggtggaccgagaagccagtcctccctagggggcctcagctgaggggagaaaccacctgtcttgctctagagcctcccaccaaaggtgtggcacacgccccttttggatcagagaaatgcaccctttccttgggtgttaagtggcttcagaacccagggaaaaggagaagccttcccgggttgagaattcgtaggtcttccttttccaactgctctggacagtgaataataggagcgtaaacattcaattactgtgataaaccatctcgttgcatggccctggtccagtctccactctaattggattggcctctggctggttactctggtccgtgtagctcccggggggacaagggggtgaagaacctggaggatgcccccaggtcatacagcttgccagcttgctctggaacagcctagccactgccagtgtggcctctccaagtgccagcagaacccccactcccgtgactctgtcagctcctcaccccgccccaggaaagagcgccctggagtgcccatggggatgagaatttaatttttacatgtgggattttaaaatagccccagtgtttgaccctgtgtgctgctgctttcaataagtggaacacaagaaaagacaacatgcagttgtggattcagctgagggcctcctgtgtctagagtccccagagaaaggctgcccaggggtgccaagacctctgacagaagaggggaaggggaatgggcccagtccaggaatcttcaggttgagagcccctctcttgcatttgggtctcccagaagaaaactttgctcatgctggggtggggacagccacaaagtggctgggggtttccagcttatccttctaatcctgtttcaaatgccacttctgaaggctgtagccatcttctgaacactcatttccaccttatgtagttatttgtgtacatactgcagtgtggtggtcaaaaacaaagactctgagttagagttcctatacagtatctccttcatagagttgctgtgaggattctgtgagttagtatacgtaaaatgcttaaagcacatttcagtatttggtagcctctgcttgaatgggtcccacaatgctgcttggcatctagtaagtgtttagtgtttttttttttttttggttgttagagatagggtctttctctgtcgcccaggctggagtgcagtagtgcgatctcaggtcgctgcaatctcagcctcctgggctcaagcaatcttcccacctcagcctcccaagtagctgggactacgggtacacatcaccacacctggctaatttttctatttttgtagatatggggttttgccatgttgcccaggctggtcttgaactcttgggctcaagaaatccacccactttggcctcccaaagtgctgggattacagtcttgaactacctcacctggtcttagtgcatgttagttgaacaaattagtgaaagatctccatcaaaaaaaatgtgtacttgtcatgtgttgggcccagtgagtccctgctcctggaacctcctcagattgcatcactggtttcaaaaatgtcagtccaccgtgggtgattctggggctggtgaacccagtttcctggcactgccctgtagctggccttgtggagtgcatgtgtcggtcatcctgaccctaaggggacctcagggt

SEQ ID NO: 1885686 - DNA, 4001 bp, Homo sapiens
ggcagatgagtcacactctggaaatgaccaagccctgtccatccttcaagggcagctggagcttcacctctgcggcccaggcttccccatgtagcagtgctgctgggaatgcttaaaaactggctcaagcaagggcagagaagggggaaaggactctggtttgtagcatttgcctatttccccatgtaaatattcccccatggccaattttaagctatcaatgtgaggtcagtaaacacagagttgggaagaggtgtgcagtcggttcctgagaacaggcacgagctggctctagcacacctctgcctctagccccggctcgtctgtctccacaggagccatgcagctcttcggcatgctctttcatgatgtcatgaattcacatgtctgtgcttcttcccttcctccagattgctccttgggaacttaagcctctctcttctcactcagagtatctagcacttagtaattgctcaataactgctagttcttatcattggtgctatttgtgttattgtaggttttccttgcatgcttgctaattgcctgggaggttatccttgcattcctgtactcccggaaatattcattagctcagactcatatctgccccccaggatagaattcctgtagctgtgacctttggagcaggtgagtacctgccgcctatgagctgtgtgaccttgggcaagtcactcaacctctctgtgtcttagcttcctcatctaaacaacagagataataatatccacctcagtgagctgttaagcagattaaataagtttctgatgtgaagtactggtaagcgctgcataagggtttgctgttattatttcagttgctgttgttacaggcattcactccatgttgctaactgctaaggggtttccctcctttccatgggaaaggtgatgtccattctgacctctcctgggcctccctaatcctgtgggtgggacattcagggcaggcccacccctccaatcccctactcccagtgtgggcctcgggagagctgcctgggtgctggcggagcctgggctgacctgtagttgcccttcttggaggcgatgtgcagcgggagcaagccgtccttgttggtcttgttggcgtcggcaccctgtgacagcagaaactccaccacctcctcatgctcattcttgcaggcctcgtagagggcagacgcgttgtcgctggcctgcgtgttgatgtcagcacctggggaaggagaagagatcagcaagtggccaagtgaccgggaagttgctgtcctcaatgtaacgccaccgcgtggtgggcctgctgtgctaaccacggtaatgcacgggacctttaacaacgacccttaggaaggaggagtctacctggggctacccccagcttctttcaacaacatcaagacctaggggcctggccaggcgtggctcatgcctgtaatcccagcactttgggaggctgaggcaggcggatcacctgaggtcaggagttcgagaccagcccggccaacatggtgaaaccctgtctttactaaaaatacaaaaattagctgggcatggtggtgggcgccagtaatcccagctactcgggaggctgaggcaggagaatcgcttgaacccaggaggtggaggttgcagtgagccgagactgcaccattgcactccagcctgggcaacaagagtgaaactccgcctggaaaaaaaaaaaaaaaaaaaaaaagacccaggggcctgccagcccgaacagaggcctctgagaggctacaagcagccacgatgatgctggtttttcctgagcacctactacgtgctgaacatcgtgctttccacaggctatatctgaatccacagtgggtggtcaccttgtgaggtcagtactgctcttatctccagattacagatggggacagtgaagcacagaacacctagaccacttgcctcagaccacccatttcataaagatggagccaaacttgaacccagatggtctgatggcagaggccatggtggatattctgatggtagaggccatgctcttaaccctcactccatgtaagagggcctgggctctgccctgagagaggcctcacaggtctaggagggcacagagcccctaataaaggaaaaccccaataacattattaattgcaatttgctattaatattgctattattattgctaatgttaccatgctattaatattgatccttactgctatcaataacttctagctcttatcactagtgctccttgtgctaggtattccctgcatgcttgctaattgctaattctctgcctttcacttcaaggaataagagaattactttctgtctcctcccaagaaaatactaggccaggtgcaatggctcacacttgtaatcccagcactttgggaggccaaggcgggcagatcacttgagctcaggaattcaagactagcctgggtaacctaatgagactctgttctctacacctactgagtagcccctggccgggcatggtggcacatgcctgtagttccagctacttggaaggctgaggtgcaaggattacttgagcccaggaggttgatataggcggcagtgagccgggatcacaccactgcactccagcctggacaacaaagtgagaccctgttcccaaaacaaaaacaaaacaaaacccagaaaacattaatccatgctgctagaaggaggaatcaggcctggtgacaatctgccttcagctcagtcttctacacctgcttcatctcctcgggcagggggtgagggggagaactgatgtgcacacagctttctctgcagaaagagaattcagcagtccttccttgttctggaaggacatggaactaagatgcttgaagatgtcagtggggctaaaatcaaaagcatctgctaaccacaggtcatctctctaagcatgttgctgatctcaggctttctggtaatttattatttttgatgatggtgtgaccagtttctgatccagcggaaacagcacaggctttggcgacagatgagaatcagctgaggcatctgtttcatggctcacaagctctgcagtctcagaaagcctttaggagcctcggttttctcatctgttgaccagggataatagtacctacccctcggggttactgcagggagtaaacaaaatagtgtaagcacatctctcagcgcagtgcctgccacagggaagctgctcagcaaatgccagttgctcaggatggaaggagctgggcagaggccttcgtcctgcctccggcctgagggagagccagtgagccgccctaaccctctgttgggctctcagaggcaggtgccctggagagcctggaccctaccagcaaagccgcctgcttgcacaagaaaaatatttgggttggaaaatggactcagcccacaaagtgaacacaccctgactcagagtgtcggtgggagacctggacagatgtttggagttattgaggtcacccttgcctgctgagcatgctgtccgtcaccaggacccccggcctgggctcccaggaccctgcctgtgcccctttgttcttacgctgggcagtccagatttgttcctggctgcacggaagggcctgcacctatgttccccactgctcaggcgcgtgctgagtgcatggatgcttacctgggcagagtcccgtgctgccgactctcacagggtagggtggctggcagagcacaaagcatgtgcagtttggagtcagatggcagtgggtcagcatccaggcttggactgtgaccaattagttaacctctctgaacctcagtctcttcatctataaaatgggacgagcatactacctaccacatggggctacggggaaagctccattgccccgatctgtgttcacacttagcaagtcctcaacagattcctacagttcagcctcagcgtctggattacctctggcttctctgttgctagagagagggttacttcccgtggagagagaaaagaaatcaaaggcattcttggggaag

SEQ ID NO: 1885687 - DNA, 4001 bp, Homo sapiens
cacaggagacgagggggaaaagggttggggcggatgcactccctgaggacccgcaggacaaaagagaaagggagggtgaggagctgcctcctcgtgccctgcctgtcggggctgagtggcgttctgagtgccctcactacttgcgtcccgctgtggctgccccaccaaggccgagcccacctgcaggcctccaaagcccagactgtcatggctatcaggggtggcggggccgtggtgaggcctcaggtctttgtccaaggctgctggggctgcaggcctcagcccatcctgctgcagggcccagcactgaacacctggacagacctggggtctcctggagcaggctgagccatccctgccaccattcagctggctgccctgctgcactctgaggcctgactgcccctggctccctgctcagaatggctgagggctcaggtttgggtggaccaggcctgctttcccccgaggcatcagcacgtaggtgctgcacacactcagctcccagcacatgcagctggagggcccaggttgcatacctgaatgtgaagcctggagccacacaccccgcaggcagccaatagagtccctccagcccagcttctgctgcccccagctcagtcacactccagctaccctgaagtctccccaggcagacaacccaggcctgggagtgagtatagggagggtgagtgtgatggggaacgcagtgtagactcagctgaggctatccatctatgtccaacaagatcatgaagattggcccagtgccatgtcctccagttcatcccagcccaggccagctcaatccagttcatcccagcccaggccagctcaatccagcccagcccaccccaccccagctcagcaaagccaagctcagctcagcccaactcagatgagctcagaccagctcagcccagcctagctgagctcagaccacctaagaccatctcagctcagcccagcccagctaagcccagtatagcccagcccagctaagcccagtatagcccagcccagctaagcccagtatagcccagcccagctaagcccagtttagcccagcccagctaagcccagtatagcccagcccagctaagcatagttcagcacagcccagctcagctcagcacagttcaacccagctcagcccagctcagtgcagcacagcccagcttagcccagcccagcccagctcaatccagcctggctcagcccagcccagcccagtttggctcaacccagcttggctcagcccaggtcagcctggctcaactcagcccagcccagcccagctctgctcaacccagctctgctcaactcagcccggctcagcccagctcagcccagttcagctcagccctgctcagcacagcacagcagagctcagctcagcccagctcagctcagttcagctcagccctgttcagcacagcacagcagagcccagcccagcccagcccagctcatcccagctcagcccagcccagcctagcttagctcaacccagctcagcacagttcagctcagccctgctcagcacagcacagcagagcccagctcagcccagctcagctcagttcagctcagccctgttcagcacagcacagcagagcccagcccagcccagctcaacctagcctggctcagcccagcccagcccagcccggatcggctcaacccagcttagctcagcccaggtcagcccagcttaactcagcccaggtcagcccagcttaactcagcccagcccagcccagctcagcccccagctctgctcaacccagcccagctcagctcagctccgctcagcccagttcagcccagctcagcccagcccagcctagcttggctcaacacagctcagctcagccagcccagaccagctcagctcagcccagtccagctcagctcagcccaacccagtccggctcagcccagcccaacccagcccagcccaacccagctcggcttaacccagctcggctcagcccagatcagtctggctcaactcagcccagcccagctcaacccagcccagttcagcccagctcatccaagctcagctcagcccagcccagttcagcccagcccagttcagctcagctcagcccagcccagttcagcccagcccagttcagctcagctcagctgagcccagcccagcccagtccggctcagctcagccccgccccactcagcccagctcagctcagcccagctcagcccagctcagcttagcccagctcagttcagccaggcacaatctggctcagcccagcccagcccagctcagcccagcccagcctagctcagcacagcccagttcagctcagctcagcttaactcagctcagctcagctcagcccagcccagcccaggtcagctcagcccagcccagcccagcccagatcatcccagctcagctcagctcagctcggcttagcccagctcaacctggcccagcctggtccaggtcagcccagcctggaccacccagcccagctcagctcagcccagctcatcctggttcagctcagctcaacccggctcagcccaggtctgctcaacccagcccaaatcagctcagcccagcccaggtcatcccagctcagcccagcacagcctacttcagctcagctcagctcagcctaggtcagctcagttgaggtcagctcaactcagcccaatccagcctggctcagcccagctcaccctagctcagcttagctcagcccaactcaacccagcccagccttgcccaacccagctcagctcagcccagcccaggttagcccagcccagcctcggcttagctctgctcagctcggccctgctcgcctcagcccgttcagcccagttcagctcagctcagctcagcccagctcagcccagccctggttagctcagcccagctaagctcagctcggctcggctctgctgagcttggcccagcttggcttagcctgatacaacctgctcagcccagttcagctcggctcagcccagcccagcccagcgtagctcagctcagctgagcccagcccaggttagctcagccccagtccaggtcagctcaactcagcccaaaccagcctggctcggcccagctcaccctagttcagcttagctcagcccagcccagccctgcccaacccagctcagctcagcccagcccaggttagcccagcccagcctcggcttagctctgctcagctcggcccagcccaggttagcccagcccagcctcggcttagctctgctcagctcggccctgctcgcctcagcccgttcagcccagttcagctcagctcagctcagcccagctcagcccagccctggttagctcagcccagctaagctcagctcggctcagctctgctgagctcggcccagcttggctcagcccgacacagcctgctcagcccagttcagctcggctcagcccagcccagcccagcgtagctcagctcagctgagcccagcccaggttagctcagccccagcccaggttagctcagcccagctcagctctgcccaggttagctcagccccagtccaggttagctcagcccagctcagccctgcccaggttagctcagcccagctaagctcaacttggctcagctcagcctagcttggctcagcccagcacagcacgctcaacccggttcagcttggctcagcccagcccagcccagcctagctcagctcagccccgctcagcccagcctagctcagctcagccccgctcagccccgctcagcccagcccagcccagcctagctcagcccagctcagcccagcctagcccagctcagcccagcccagctcagcgcagcccagcccagctcagcgcagcccagctcagctcagctcagcctagccttgctcagcccagctcagctcagcccagctcagcctagccttgctcagcccagctcagcccagctcagcccagctcagcccagcccagcctagctcagctcagccccgct

SEQ ID NO: 1885688 - DNA, 4001 bp, Homo sapiens
tgccctcctttcaacacacttcccttctttacagactcctgtctgttccaagttcaagagatgccctgtgtctgagaagacaacacaggccttctcccagccaatgaaaaaagctggaagcaccaagattcataggcacccttttccatagacaaagctttgaatgccactaagccccctagaacatgtgctacaagaaacaattaaccagcagcccccctggaagactttgacaggtggtgctcctgttatagctcattccacatttccctgggattgcagaattactgagtcttatccatgccagggacaggtttgtaaaagactgaccattttaccaggggcttgacctcaccagttccaaataaagagatcaccatgaccccaagtttttttctatcttagaaatgttgggccaggcacggtggctcacgcctgtaatcccagcactttgggaggccaaggcggacagatcacctgaggtcaggagttcgagaccagcctgaccaacatggagaaaccctgtctctactaaaaatacaaaattggctgggcgtggtggtgcatgcctataatcccagctatttaggaggctaaggcaggagaattacttgaacccagggggcagaggttgcagtgatccattgcactccggcctgggcaacaagagtgaaactccgtctcaaaaaaaaataatactaaaataaaaaatgtttgacttggggaattcctgacttccctactggtggtcaaggcagagactgtgcaggctccaaagtcagtgcacttgctgacagtgcacttgctgtgttccaagggtaagtgccttatatgccttaatactgacacctaaagcccagtgggcccaggccgggaaaatgggacagaggctctgcttactttaattcagtgtcagaaatggtcacaactcaacaactcaaaggaaattaagaaactaaataatgaggctcagggccgggtgcggtggctcacgcctataatcccagcactttgggaggccgaagtgggcggatcacctgaggtaaggagttcaagaacagcctgtccaacatggtgaaaccctgtctctactaaaaatacaaaaattagccaggtgtggtggcacgcgcctgtagtcccagctactcaggaggctgaggcaggagaattgcttgaacctgggaggtggaggctgcagtgagccaagatcgtgccactgcactccagcctgggagacagagcacgactccatctcgggggcggcggggaggggggaagacggggggtggggggctcagaaacaggaaaaaaaagtatggggaggggcagaaaagaatctcatcttttacatttgagcagttacattatccaactaagtccgaagaacagcttctctttggacccagggatctcattccaaaaacagatcagcaaccagcagggccccatgacttcctctctcccacaggtctactcagagacacctgctctcacatcaagtacaccagaaagatggtgcaggagttagcaggcagactgaggtttcaagagatagagagagaatgttcccagactttttgctcactaactacttcggttttgcgttcccatttgagaccccacagaaacgaacgtggatttctctactccaatggtgcaggtggaacaaactcccatttaggcttattcaatgaatgtaaaataaaacatttctaatagtgacaactctgcagccagtcagacacggcgagtctcttctccatggtgtaggggcaacccacccctacaacccacccctacacatgggttctggttctctacccctttacgcagttgcctttcctgttgctgttgcaacagtgactgttgcaacactgagggttttcagctctgccctgcacccagaggaggtggcaatcaccacagagcccaggacaggagtgggctgctccttccagataacgcagaagcagcgcccacttcctccccgctccccgtagcaatttcaaggaagctcattctgtcgcagccaatttgaagaagcaaagaatgacactaaaccaatgaaactaaatcttactctgcattcgcatgccccacggcatgaggttccacactgggcactcaaaatccaggatagacagagctcatttcaacccctctaaaaaagcacgctgggcttccagactttgtgagtagtggagggaaatcatccagccccaagtgaacagctccccaggctcaccttgggcgtgcagtgcgcggtggagcaggggcaggagccccgcctgccagaaggagtagcagccatccaccagcttgttgcagcggccctgaaatcctccttcaaatcgcatctgccggcttgtcacccattgctgaggagacacagatgggaaaggcagttgtaggctaaaagagacaaaatccagcccgacagaatctccaggagtcaatctgtgggatggagggtttcccatcttgtggcttcttggcactctagttttggtgctctggttttctttccttccctccccacactgccatagacacagagtgaagcatttaagccaacgctgtagaggcatccagcactgatctctgctcaatgcctggcagacaactaccttttcctgggttccaaagcagtgccagtgctgagaagataaagaggccaagctggtttgtaaggagaccttcaaagtctcttaataaacatggcttaagttggaaattgaaggcaagactaccagtagctcatttctcattacttccctgctccggggagtttattaaaagcagataaatggaatttggtactacatttcttttttttttttttttttttttttttttttttgagacggagtctcgctctgtcgcccaggccggactgcggactgcagtggcgcaatctcggctcactgcaagctccgcttcccgggttcacgccattctcctgcctcagcctcccgagtagctgggaccacaggcgcccgccaccgcgcccggctaattttttgtatttttagtagagacggggtttcaccttgttagccaggatggtctcgatctcctgacctcatgatccacccgcctcggcctcccaaagtgctgggattacaggcgtgagccaccgtgcccggcctggtactacatttcatcagatgatctcaaactgctcctgacttttacttggcacctggggaaatttacccaaggtctcttagcaagtcactagcaggcctgaaagcagaagccattcattctaattaccaaatgacaactctgcccagtctgtggctgatataagaaaatcttttactttgaagctgtaaaataggtcttggtcttgatgtcactcagcggtcacacacgataccaccattccttgcttatctacaagttttctaaacacactctactacaaagatcaagatagtcatgggtttggtccctcagaatgagcagaaccaactggctgagcagatatgacatttccatttccctccctagaccacctaggccgttccagccacggacttacagagctgcctcactcaactgaaagggtacaggggagggtacttcctgtttctagagtcttactaggtaaaggtcctgaaaggagccactgggacccttgatggaagtgggggccagccctcccctaaaagctgttgtttagattattccctcttcaaggcaacacctgcccatagagagtcacagtcacaaatgcttaaaagagacagaaaacactgtactgcaggttcaggtactaatatatcctcggttgatcttaaatgaaccagggcttccagcatgtaatggaagtgggctaagcattactcaggcagagagaaagcaggcgctgcagtgggagtcggttcctcatttctacttaccgcagggcttaagtgtttttaagcagactaatttactttttccagtgcctaagcccatggatttgttctgtttccttgggctataggaattca

SEQ ID NO: 1885689 - DNA, 4001 bp, Homo sapiens
gaaaaggcaagaacctggataagacctctctggataaatcatcaaaccttttgcaagtggctactcttaccttgttgaagtatttccatcccttctccaggtgagcagaaatccccggatgccatttgattttcttgggattctaatctgtggaaccaagaagtgaaagaaaacaaaaagatgaataaacagctggctgctccaaggacactaccttatgttcaaatttctgctgtccacaagctggaaaggaacctcaaggatgacttttacagagggcctataccacacatcctgggtcccaagctcttacacaagctttatggacaaacagatttacaagtgccaaaacatgtcacattctaagcacacatgtgtttccacttgctccaagctgtccaaaaggagcatcctaaaaagagaactttccaattcactgagtctaaacaagaggattctccaccaccaccaccattatgccaaagttaaaactgagctgcagcttcccagttatgagtgaactgggggaaaagggaaaaaaatcaaagtctactttttccccccaaataactcagctatcaaattccataatagtttttttgtgcttctttttttgtctaagatctgttggtagttttttttttttttatcattaactctagaatcatccttcaggaatgacaaatcattccacacttgaacaactggttttcacataacagcctaagaaaagagcacctggaggaaacagcgtgacaagaagactgacagtgaggtcagtggcaaaagagtaatgcaaaggtgtaatgtggctacaacgagaacgtgagctgtgggtgttttgccagaacatggagtgcgctgaaaggaatgacaccaacacaggggcagtaaagatgggcacagtttgacctcaggagacaaaaattttcccttgacattacttttcatgtttttgctctgcccctcctctctgcaaggtatcaaactccaaagggcaactgagcctcccaaagctgaacaggcattgaaggttattatgatttaacgcttcatgtttatagaacatttggtttactcgatcgttttatgagtaacatcaaagtaactactcatttgttttctaacatggtctagagggggacgcagctgaggaggcagaatgctgggacttaatttgcagctcggccggccgttgcttctgagaacttaaggaaaatgcttttttctgtgccaaacttttcccacctgcaaaactgagataacgattcctgccttggatgagacattaagaattaataacacaatcgacttgtcaacaaaagccactacttagttaagttcagtgttttaacaattctgtttatcgttgatctatgactgcaaataaaaagttttgcaggcaaatttcgcacttggaaatgaagaccaacccaaattccaaaaagctagctgttcgtccccccctagggtaagtgtccccttgcgttttttagggtgcctttctttacccttcttaaaggttacagggcgtgaacggcaatcaggctcgattctccaccctctgcactcagacgtgttaaaacgctgctacagggacccaagcatttaaatgttctgactcaggcgtcttttaaattcttagagctgtctttacacgctgcactgaacgttaaattgattttacaggttattttcacaagatatgacccttacagggcccgagatgaatcaaaatgcagaacgggctctccggcgcctacttcccttctgtctgggcggccaaggattcccaagagcgacgacggtctccggccactggccggaatgactctcccagagctcctcttccccgaagctccgcccgccgaccctctaaagcaaacctgcacaccctggggcagctgaagctctcaaggcggtgccgagaacctcggctggggcgggctggccagcagcgtctacaccccagaacccgcccgcgccggggctccggaacctctcgttcgggccgggcgcaggggctgggggaagcgaggcccggaaagaccaagctgaaaggcccgggaaggggaaggagccgaaagtgcactagaggccgcgacgaaggaggtggaggcggggccacactcgaggcgggaacggcaggccccgcccctcgacgggtgcgcgctgggttcccaacgccctgggttcgcatgctcgggtggtggaacccggactgggaaacaggatggtctcggaaaggcttttttgccccttctcattagtgcctccccagtgaagggcagatgctgagaaaatggtggtaattgctaacatttattgagggcctacgatgagtcaggcactacgccaagcattttgcttgccttgcctcgttttttttttgagacggagtctcgctctgtcgcccaggctggggtgcagtggcgcaatatcggctcgctgcaagctccgcctcccgggttcaagcaattctctgcctcagcctcacgagtagctgggattacaggtgcccgccaccacgcccggctaattgttgtatttttagtagagacggggtttcaccgtgttagccaggatgatctggatctcctgacctcgtgatccacccgcctcggcctcccaaagtgctgggattacaggcgtgagctaccgccctcggccaggcctcgtttagttcttaaagcgtcctgtgagaaagtcaccattatactcattttacagagggggagaactgaggcacaaagggttaagttcgaggtcgccatttggggggtctaaacctgtcccaatagctctcggaaggaaccttcccagacctgccacccaagccgcgtcctgcgagtctcctcactaaggcctggctctgaggcgctgccgcccagcccagcccagcccagcccagcccatgccgggcaccatacagtgcttcctcagggtcaccttcctctcgaattcccaccacagactccctattagcgcgcattcctcattcgcctgttttgtttgtttgtttgtttgttttcttgggggtacggagtttcgcacttgttgcccaggctggagcgcagtggcacgatctcggctcaccgcaacctccacctcccaggttcaagcgattctcctgccctagcctcctgagtagctgggattacccgcacgagccaccacgcctggctaatttttatatttttagtagagacagagtttcacaatattggccaggatggtctcgcactcctgacctcaagcaatctgcccggccaaatatctttcacctgtcttaatctttttttttttttttttccagacggagtcttgctctgttgccaggctggagtgcagtggcgcgatctctgcaaccttcacctcccgggttcaagcgattctcctgcctcagcctcctgagtagctgggactacaggcgggcgccaccacgcccaggtaattttttttgtatttttagtagagacggggtttcaccacgttggccaggatggtctcagtctcctgacctcgtgatccgcccgcctcggcctcccaaagtgctgggattacaggcatgagccaccgcgcccggcccacctgtcttaaccttaaacccaaccctcactcccacccacaccttcggtgaattatttcaaaaatataaatttaaaaaaataaagagctgggcatggtggctcacgcctgtaatcccagcactttgggaggctgaggcgggcggatcacgtgaagtcaggagtttgagaccaggctggccaacctggtgagacccccgtctctactaaaaatacaaaaaattagctccagaggctgaggcaggagaatcgcttgaacccaggaggcggaggttgcagtgacctgagatcgtgccactgcactccagcctgggcaacagagtgagactcggtctcgaaaaaaattaaaaataaataaaaattaaaaataaagaaaatgtttaggcggggtgcagtggctcatgcctgacccag

SEQ ID NO: 1885690 - DNA, 4001 bp, Homo sapiens
cagaggcacaccaaaatttgaaagccagctctaccactgactaattgtgtgattttggacaaattagttcatctcctagtatctcagtttcctcatttgctaaatggggaaaataacagctccaacatcattgagctgttgtggaaattaaattaatttaaaatgaaagcacttggaagagtacttggcacataataaatgctcaataagtgttaaagattgctacttttcctgtcccttagcaactaaaaaatatcttttaaggagcgccatttcctggacatactacaaaaaaggggaattgcctgcatttacatagattttttgatagttgatgtctctgagagcaatattcttttagccccttctctaaatccaggtttatgcctaatttagatcccacggtctcctgtggtcctaaccaccttgtgaacatgttatgaaggtaaattgaagttaatctagggatggaatgatgagagcaggtaaaagataaatagttcaatggttctcaaccttggctataccttataattatctggagagctttaaacaatgcccaagtcagctgggcatggttgctcacgcctataatcccagctctttgggaggctgagtcaggaggactgcttgaggccaggagtttgagaccagctaggcaacatggtaagaccccctctctattatatattaaaaataatttttaaaaaatgcctaagtcacaccccagaccaattaatatcagaatctgtgggaacagggctcagctatcagtctattttaatctccagatgattccagtgtgtagccactggcctcatcttagctcggctgagctggtgagacccagtaatctgtattctaacaagccttctgcaaatctcaggacctttggtgtgaaccatcccatcatcctcccaatgtccaggcctctgatttcacttctctgcccagtgggtgtgacttgaaagcaagagaggaggtgcaacaacccttagtttctgtaagaaggtacaaggagaccagttctgtatatcaaatcctggtttattctagccagacctgtcttagggacaatgatggtctttcagcctaaatgcttgcttctcaggaagcaggtgagccaatgaagggccccactctctccaagtggagactatagcatttgcctaaaataccccttctctccagtcctaactgtcctggaagcttctcagaggccaaatatgtaaacaagttccaaaccaacacatctgcttttcatttcctgcggaatgctaaaacgagtcttttaaggttgcttaaaatatgttctctcctcccgccccaccccccagggcatttgctgtgcgtcctcagaccacctcagctcctccttccctacacctgggactcttctgcgcagacttggcttcaaacaaggctcacggttcttcctggcatttgcttttttggcttagcgagtgcacattcaatatctttttcttctttttcttgaaagcactgtcttcagtctcctcacttgtccctttctcctctggcaagcgtaatgctatcaacatttgaaagtggcctgattccctggtgtctggtaaatggccttgctggtgaacttctttaggagaactgcaaagaaactagagcaggggctaaagagagctgctctcttggggctcagatgcccctcctggggccccacctcacactaggtgggtttccttcctaaatttgagcaacgactctgtgtgaccttagccacccttaactttgctctgcttctgtttagcatctgttaaggagtgacctttgccaccaattaatgagggtgaggccccattcagttgcaaagaacgtggaattgtaaacaaacttgcaagtggaaagactagttccaggggaaatgtaggtaagaaaggtgctcccgtattctccttttagtatcagagagatgccgccttgctcctcctgttcaaggagcaaggcggcatctctctcctaaatatgctgttgtgtctcatacctcagcttctcagggccctgccaagagcgggtaggtaacataacaacagctgttactgccccaatgtatcctccctccaaatgtcaacaacatacactttggagtggcctctttatgttaaggccttgagctttaagactcagctctggcctttaagaatcgtatgttcccgttgaagagacaggatgtgtgtaaagatagcagctagagaccatgcccaacagataacaaacattaagggaatacataagtattgaacaaatatatatggagcactaattatgttttgttgtaagctctgaggctaaagtgttataggactttctccttagttcaactaaaagccggattcttgtcacacagccatgagagattaggcttgcagacactttgaagggtgagaagaatggaacttattgggcaaaaaggaaaataaatggaaacagggactctcagcaaagtgagagtcctgcttgctggtttttcctgcctcactgattgaatcccatgtactaccctggatcaggagaggccaggctccttcctgctgcaaagggtgtgaacttctgcagctccaccctgttctcccagtgcgcaggccagtcggagtttctcaggggacccctttacacttggctgtctcaaaaaacagggagcaaaacagataaaacccctggctttatggatcttatgttccttatatatatatatgtataaggaacacacgtatatatgtgtatatatgtatatatatatttttaggttctggaataaatgtgcacaacatgcagctttgttacataggtatatacatgccatggtggtttgctgcacccatcaacccgtcatctacattaggtatttctcctaatgctatccctcccctattcccccaccccctagatcttatgttctaatgagacaagacatactttgagaggccaagatgagtgtcagcaaataaatatgtataatacaccagcttctgggaagtactttgaaggaaaatgaagcagattaaggagggtagagtgacatggttaagagaatgtggttttttagatgggagatcagagaagacctctctggtaaggagacatttgagtcaaaatctgaagaaggagggagtgagtcatctgagtctgtgaagaattttctaagcaaggcgagcagcaagcacgaaggctctcaggaaggagtgtgcttggtgagttctaagaacaagcaggccagtgtagctggaaagtagtgagcaggagactgtgggcaggagaggacatgagagaggtgacagagtggatcactgaggaccctgcaagtggtggtaaggactttagattttgttttgaagccattggagggctttgagtagagcagtgacatgattggactcacaccttggaaggatcactctgagcatggactccaagagtgcacaaggagaagtgtgaggccagtgagaagggtgctgcaataatccgggatgagatgaagatgatggtggcttggaccagagagaagagactaagggtggtgagatgagattagattctgatatataatgaaggtagagtagacaagatagatgagatatagggttatgatttatgacataaagagagaaatcaggaatgattccagtgtttttggccgatactcaaggttttaaatttatagcagggatgggctgcttctggttaagataataagggaaagattaatgaaagacccaagatttgagctgcactttgaaaaactagtaggattttgtgacttataaaaagtctcaagggcttattttgagaccattttatctcctggagtgcagcctcctaccctagttccacttctttcagttatatcaaccaggagctctgggatgcgggactcagccagcccaaggaaggtgaatctggattctttaggccaatcatgaaaattttctactcttgccagtaactggtttagaaatgggctggtt

SEQ ID NO: 1885691 - DNA, 4001 bp, Homo sapiens
taataccgcagatataatatgtatctgtttatgtattatctgtctgttcctgctttacacataaaaagattaagaatttttttgtccctaagaacaaattttcacaaagaatgcaagttataaacaatgaaagatatacagtattaaaacattgtttcaaatttgaagaataagtggaggaaagaaaaatatattttagaacttagatatgtaaattatttccaaaatagtttaacactcaaactagtcagctgtatcaaaatcaattctccctgaagtaggcactgttcctagctagaggcaagtactcattttgcatggtattgtgagtcctgtcttcttttaacacaagggcagaggagtatgcagggtgggtagctgttaacttcaaaggagctaaatggcatgagaaatcttctgggaatagggagacagtggacacatgagaattgagcttttccaggcctttcagaaagttcttgtgcacagaggatagcctcatccttctgaggagacatcatcaaatctcagattgaaccttctaattttcctgctatttgtagacaaagaagaatgtctgtctcccagagtgacagctaacatttagagagtatatactatagccagggtcattctaagtgttttacatgcctcatctcatttagtcttcacagccctattattattagtcctatttaacagataaggagactgacacacagagagatgaagtgatttcaagatcacactggtagtcctgttaattgttggtgccaggattcaaccataggcagtccgaagccagagacccgcacaacagttaacagcctcaggaattcacacaattctgatacatctagagtctggtatgggagacaaggtggactgtcactctagactcaatgtggcaggatacacaaaagatcttaggtaaaaagtacactggttgactggctcctagcattaactaggaaagcttggctgttgataactgtattcctgatccatcactgtcccctggtggttttcctgggaaactcacagaccaaagaaatccaagggtctagtgaaattagtgggatgaaaagaactggatcaaatcaatcacttgctcacaagcactttgtatgaatgttccttccttttgccctaacaatggatgacctaaggtccatgttattcaactcaattgtgaatggggttgtaatccctgtaccacctaagagctgactgctagtatactgactcaaaataggtggcaaaatatatgcccatgattatacttgtactttaagataggaaactccaagatttaattaatttagccattacttgctacaacttcacatttcatttttaagcttctaggctttcttcacagcagtgttcccaaaagatcaccatgcctcatcctaacctgtaatccctaacccctacctgccctccccaccaaattcagttccttcaacctttcaggcgttattattcaactaggtgatttttactttcactgcttctttcgagcatgcttggtggtataagattgtgtcaaataaagcaaaacaaggccattttatataaaatagatatggtcttactggacaaaaaggaggaaaaagagtttctgaaaaagtcatgtcttcagtgcactctgggaccacggaactgggggcctgccttccatggttctagcagaatgtaccctgaaaggagcaggagaagaccacagcccacatgcagaagacaagacaaacgagtttttatttattcaagagtaaatttccaggtgtagaaagaggccacaagttaatgttgttaaaaaaaaaattaaacatctgctaaccaagtgctgcatttaatgaaaccacctaagacagaaaaagagacatgagacaaccactgagaaccagccacccggagctcagtttctgctacagagcacctcctcttcaacgaatcactggataccattggagagcaagtcactgttgttgaagcagcagagctggaggtgctgtcaagagtctcagcagactcattggccagatgcaccgaactcaatgaggcacttagagatgagaaacctgtggatgtaatgtcccagctcagtggaagtggtttggaacctttcctccactgtcagggcaataaccctagggcaagttatcagacattcctaagcaacctccttcaggtcctgtctggctggaccttccttactccgacagaaaaaaaccaatgaagacagttaaatcaatctctacagtctcactctctcttctttccttcaaccttttttttttttaacaaaggatattacaaaggcaacagttctgagctctcaggaaatagggtctcagatgcttttagaggttgagaggcataaaacagcagtcttgaaattccttttatcttatggcactgatttagtttcagtctgatttctcctccactttcttccctccacccatgccctctcacccccagatagacttacgatctgtactgggatttcccagcagaagagactttggtttttgtcatcctgaagttgccactccaccaccagttttatctggagaaagagaaaaataattgagaaaaatgaaaataggacctgacttctatccataattggtttaactatgaatcctagatgtacagtagcaaacttcctaactcctcatactttttttcttaaatcatgagggctgcttagcatgtgggcacagcttacagccttaagagagtgaacaaagttatacttgtgatttgatgctagcagcaccacatactaacttggttaatttatcaaatgtaatttctaaagcattctcttctctcttagatcaatggcatataaatgaagtgatacggtttggttatttgtccctttgaaatttcatgttgacatgtgacctccaatgttggaggtgggcctggtgggaagtattggatcatggaggaagatccctcatgaacggcttagcaccgtccccttggtgatgagtgagttctcactgacttcacatgagatctggctgtttaaaagagtctggggcctcccccttctctttcttgctttagtgctggccatgtgacacgctggctcccctttgccttctgtcctaacagtaagcttcctgaagcctcaccagaagcaggtggtggcactatgcttcaggtacagcttgctgaaccgtgagctgatcaaacctcttttcaagttacccagtcttaggtattcctttacaacaaggcaaatggactaacacatgaaggcttacatgaataatttcacatttaagcaatttctcatgtatttggcaatctgatccagctttttcccaatgtaaccatgaagagcagagagtaaaaaaaatttagattcttaggtataaggaaacgttcttgttagctagaaatggaaatgtcaaagcacaaaagatggcctagagaagtctgtagctgtatgaataatttcaaggatgacaaccttttgtagcaatatactttcagttaacgcccttaaactgctttctaataatgtacttcatcagaaatccctgccttgacttgttacactcatatcacgtgagtggtcccttccaattcttgataactcactgacactctgcaggtcctttcttatgtggacattagcttacttgtcactagttactacctctcttttgtactctaatgtttcttcacaatggaacatgtgagtggcactgatattcaggttcttgaaacttgccttgtgagtttttccagactagtatacattaactactgcttcatttagtgcttaagcagtttgagctatttttcaaattaaatgtaactcatttaacagacaataactaccatacattaagtacctactacgtatcaggctctgactagtcactgcatacgtaactgaggttcagacatgcccatggttatgtggatattcatctactaatctgtccctgacctctaaggtctccaacagc

SEQ ID NO: 1885692 - DNA, 4001 bp, Homo sapiens
gaatgggtgaatagatggatggatggacgtagggggttgggtgtgtgggtggaagagtagacagattggtggatagatgggtggatgcctagatgggtaggcgaatgaatgggatttggattcagtaagaggttttaacactaagctgtcttaaatgcccaaatgacagggccaaggtgggagtaaatgaagtgccagctgatgggaaaactcccagctctgacacctctcaccacccctgcgactctcctgctcagattctgaatctgtaaaatgggaatgcttagtggtgctccagcaagaggaagctccatgtgctgcaacacaagttatatgtcctgacatggatgccttgctgggggtggtggggggtgattcgcctgcagacgtcaaagccctgcctgccaagatccttgacttcccagccccaaccaggcatcactcaaaggtgacctctccactcccagcaccaaggagttgcctttggaccctgaccaccctgatggccaaggctaggctggccagcacctccccagcagcccttcagaggcctccacagccctgtgtccagtctgacacaagtgtgtcaggtggtcatgagcaccgttcccttccagcaaggccacctcttcctgtggggaagggcctcaggtaggcaggccggaagcacctgcagaccccgcactcagaaactgccaccccgcttgttgaaccttgtgttttagaaagggtcttcctttcacagcatctccctctccccagtcctcctcccagaggctgtttaagggtgggcgtgggacccccagtgtttccagggttattcctagggatggacttcttataaacaatattgcccctcttcccagggccccagggcaaggagcagcgagcctggacctgcagccactgtagccccagcctgggggaggggacagcacaatcagggtgaagtggagtcagaggtgggtgttgtggaggggggagcggcgcggggacagctgtcctggcccggctaccttccctgccccctgtgacatcagcccatcaattccctccctcttttgccctcactaggtcgggtctctggccctcgcagccacaaggttcctgactcctgtgtccttgtgaaagagccacacacagcagcagggggactgcccccgccaggaccagcccaggattcctgctggattccgtgtgtcaggaccacccattctagcagaggagcaggaagcccagagaggcaaatcacgcgtctaggaagcagagagggatccccgccccagggccgcctgaggagtgagagagctgaggctgaggtctgctgttactagagctgaaacctacggacctacccagctcccgttttcgccgctggggagacccacggggagatcaaggggcctgggggggggggggccctcccaccttggacgttggttgccacatctgcacgtgacggggagaaacgtgtcattccaggaggacaggagggcggggcagctgaggggggatccccagatataggggcatccccaggacccacccccgtcctgtggaggcaggaggaggggccgcacccctgggtttgaaaggcagcagccgccttccagagggagcgctggcgggaccttaccgcacccccttcagagtagccccctccccccattgctgccctggactctgcggccagcaagctggaggttcctagggctatgggggacaggaggctgtggctggctgaggactttgtgtcaatgttcccactgcctctggggactggggacagccaggccacacgcgggggcagtgggacttagcacctgagcctgctgagctcctgaaagccctggaggttctcggttccccgaggtggggcagggaggagggagcccctggtgtggcctggttctgctgggcggaacactcaacactcccttccctgacgaagaggcgagagctgcttcgggaagaaccacctgccctcaccccactcggtctgggacaggcagggcactggcctgccgggagcccccgcccctgtgcctgcagcgctgctctgcgccctgctcccttactccacctccttccacctcctccccttcctcctcctcccaaggaggaggcagatggtggtggaaactctgcttcctccattttccggagcgtgactcagcaccgcagctgccgcctcggcccccacgcagcagcgcgaagcctgccctcccctacagcggagcccggggactccccagaacacccctcccgcaactcatctggagaacgcagggctgcgggctgccgagcccaccttcccggagcccccagcccagcggacccctcctaggcagctaatttcccgcccacccggcgacggcagaggacgtgtgccggggcggagtgcgggcaggtgggcggggctgcagccccagatctcagggacacacagaggcgaccacggggcttcttagcttctgggtggccgccccgcccaggagactgggctgagcgaaggggaggggaaggcctaggaggcaccccaagaaaggacccatcagaaaacacagggaagtaggaaaataagagaaatttccagaagcaagaggcttggctcatgcggaatgccgcagagccaggcctcaacccaccggagaatctctgagaacactgactgcagcccaccacggtggccccgggtcctgctctgagctcctgtcggccctcgtcctccctacatcagagcctcccctgggagccccagagatcctctcaactccttctcgggacaaaggaaccctccctgctgagagcccctggtggctcctcccactcccccactcggctccctctctcctcctcactccctttgtggtgggcttggcccaggagagtcccggcacccccagctgctctctgtaagcccctgggggtggccagctggggtgggctccccactcctgcctggccgtaatcagggagccgtgcctcgggatgtgggcacacactcgtgcacacgcacaccgtctcagcaactgggctctcctgagagtccccttcccaacccacaaaacaagacctgccagcgcccccaccccttcctcccacttctgtccccctccccatagccctaggtacagctgcagaaactgaggctcaaaggggtcaagtcccttcactccatgtggcagagctggggtggtcaagagaccccagaccccagctgaagcctcccgccctgacatgggaagccgctcctgtggggcctgagcaggtgcccaggaccaacgggccagcccaggtgagaggcttcctgccaggaggccctgagggtgacctggccagggacaccagtgctcaaaggtccgggtgggtcccagccccagctcaccctccgtttgctggcagtggcccctctactctcccccaggactcccgacagctctgcagagaggcctcatccccacccagctgggcagactccgaccttgccaccgggtgccttcccattctcctggctgccagccactcccctcttgcagcctcagtttctgcatctgtaggttgggagtaatgagattccccagccggcccgctgggaaggctgggcatcctgggggagggagggggaagggaatgccaggagctggctggagccaggtcagggaggcatgggcccagccccagccgcagcagccactctgtgggcccaagcaagccccgggccctgggcctgtccatctgtaagcagggtgatggcactgccgggcgaagtggctgagggtgggcccagcccagctgccctccctaggcattcatcaggcccagcgctggggcagggcacccagcccacaccacatggatggggatgaacctccagctgggctgcccgacagggacagaggcaaacagggctcccaggattccggggccagcacaactctgtggctgccgtagtgtcagctccaggccccagaaaggactgcaggggaccaggctgctcc

SEQ ID NO: 1885693 - DNA, 4001 bp, Homo sapiens
actaaagaacggagaaacctcagttaaaaaaaaacaaaccttgtggtcagaaatgaattcatttaaatatagaactatggcaaaacacctgcaagaattatagttctagaacaaattgcagatatttataatgtaaaattaaaatgtataattgagaaaaagcaggagatagtaagcaaaggaagaataagaatgctgacttctttatctttctgaactaggagtgaaattgaaatagttaaaaaccataacaatcctaaccacttaatttttacactctaatttttcttaattttacagggatcttttaggagttgctacctgtggtggtaaagcgagaaacatttatcaatcatttcaatctcctttagcttgttttttatgataaattcaaggaaaattatagttagcatttttaataaaatgattaggtacagtgtgatctcatattttccctgcgtctgtcttgtttttctatttgcatgtatgctcagacaggtgtatgaaatttctaaagcccttaatggttatttctgggtgccagagaattgggcaattttccttctttttcatttagatttttccacatcgcttgaattttattaagcatgtgtcattttcataaatatggtaataaggtagaataattatcctttttgaaaagaaaaacaagaaattgaaaatgcaactgtcttctgttcttaaatttgctgtggcctccagatcaacagatgtggtgagtcacccttccagtgagtccccaagaatgctgaaatcaacgccccttccctgaatttgtcaacatgtctaagaagtccttcctccatggtaagatttaatagtgaaagagaagagaactatacattgtttttctttaaaaaaaaacacaaaaccccagaagcatcatgggcaccaccacttcctcagtcacagaggggtcttgagcacagatcacatgcttcttccccaggaatgcactggctgaggattaggagtgctagcagcacctacccattggttccagggccacacacatgttcagttgcactggtgtggaaccaacatgagtatggtgtcccctaaatcggcatcaggtccaagaagacacctggtgagatctgataccgaaaagaggtcgaccgtgtattgggcatcattaaataatgcgaactcaccacggacaacctccctccgagtaccatgaggtggcactgctcgcagcattcctgcatcttctgcacagcctgggcagcttgggagtggcctctgagggtggatgggaccctgaggatgagtggaccaggtggctcaaacccatgctctccggccaaccccaggttcaccaagccaggattagtgtgcacagaaataccacttcttgtgctcagctggccatgcaggcaacatttaataatgcaaggatgtcagtggcacaggagtcattaaatatgaagcaaaccacacacaaatgtgtgtgcaaaagcaggctaagcactgcctccttggtaaacctgggattcccttacaggaattctctggagggtgtaaggctgctgtgggttagtaaaccaggggtcgcacagagtcctgttcctgttttcttctgtatcccgacggctgactaataaaagatgcttctagatgcccaagattcaactccaaggttgaatttgataggaataaaaaaagaagtcagccatgtgtatttcaatcttaacttttaaaaaattagggcatcccaacaacctctctcgattttcctaaagttggtagtgccccaggaagttgttttagggtcagcttggactctaaagttagtaggtcagttacatgcatcctcaggaaaatgcttgccatggggtcagccatccagaaacctaccttggaagcagcactggctcaggaagccctccgaggcagaatttgacactaaaagagaggagagccgtgtatgactcgctttgatgaatcgaattcatcacggccagcctctctccaagtaccacacatgaacactggtgagaaatccattgcctctctggcagaggtggccgcccttctcgggagtcctgttaggaatgggtgggatagtattgggtagtgggccgagccgagtgacatacacccacattaagtgcatgctcacccgaggcgcacttaccttaagggagtgctgagggcactgccttctccccagcagcaaggatgcagttcgtccttccagacaagacagggagcttttgcgtagctcactggtccctgacaggagaatcatggccgcttcccaaagccgcattatctccatggagcctcctagggagagacaggatgctgggtattagaggacgacgtgacagacctaacaaaggcagcacatgctctgggaagaaggattcagtcacacacccaggagaaaagctggcccacatcaggtccctcaacagaagacaacatggcgtcccacatcggaagtcaacacttcaaggaggctgtcacagtggtgaaggggctgccaaggctgactcattgcattttaagtaaacatacacccccaagagcacgtgtcatcgcagtccaccaagcagtcacagcaagtccatggccgcttccccagagttggtgggagctctggaaagtcttcctggagtgggagtgatgctgagggttggtgactaggtggcccacagggtgaacacagtgcatgcccctctggtcaaccagtcacacaccctggacggtgctgacaccaacatctcttctggaagtcggcctggggcccagggagcctctcttcaaagtcttgtgaggtgacgctggtgacagaaccacagctgattccccagagttggtgagacccatgggaagacctcctataggtgcatgggaggctcggattatcgggccaggtgacttacagctaggtcagcgcattgtccatggcccgccatccattcttggcttttccacatggttgacacaaagactatctttcctgaagctgccattgtgtccaggaagtccttagaggtagcatttggtactgaaaaaagtgttgtccgtgaatgattcgtcataagtaaagcgaatccaccacgaacaacttctcttcaagtaccacagaaaagcagagacaagacagacaaggagtccccttccacttctccaaggggagtggctgccaaccaccatcctgtggacagagtggacaccgagcattagtgaggcagcttacgggtgtcctaggaacacactggagtttgggcaacccttcactcacctcccttggagtggtgctggcacagtcccccttccctggagttgaaattgtggtcctgaatccacacgcacaaggtttagaaataagaagagggaagccacttgtcacacgccaggagcactccgcagtgtgtagaccccagggtttctgaacagggccttggacttctcaacagagcacactgagttatccatcaagcacatcaaggtgccagccaggctcccgcagggcccactgaactagggaggtccagagggggcccccttttgccactgcaggtgcccctagagaaactgcccagctcaggcacgccaggctcctggtaggttccccatcactgccctgggtagattctctatcaatgcccttgtggtcagagtgatctttccaacacagaccacgcatcccccctgctcacaacccttccaaatcccccatctcactcagaataaaacctggagtcctgcctctcccagctcagacccagcgactcccagcagctcggttcaatcccactggccttcttgctttttcttaaagatgccagggggctttccatgggccttgccctcctcctgaaatgctcctaccccagaccttcctctggtccaccccactccattcccacccacatcctcagagagagctttccagacccctgtatttaacacaaaggtccacctgcttttacctctttctgtcactgtaacccgctttccctttc

SEQ ID NO: 1885694 - DNA, 4001 bp, Homo sapiens
gacacaaagactatctttcctgaagctgccattgtgtccaggaagtccttagaggtagcatttggtactgaaaaaagtgttgtccgtgaatgattcgtcataagtaaagcgaatccaccacgaacaacttctcttcaagtaccacagaaaagcagagacaagacagacaaggagtccccttccacttctccaaggggagtggctgccaaccaccatcctgtggacagagtggacaccgagcattagtgaggcagcttacgggtgtcctaggaacacactggagtttgggcaacccttcactcacctcccttggagtggtgctggcacagtcccccttccctggagttgaaattgtggtcctgaatccacacgcacaaggtttagaaataagaagagggaagccacttgtcacacgccaggagcactccgcagtgtgtagaccccagggtttctgaacagggccttggacttctcaacagagcacactgagttatccatcaagcacatcaaggtgccagccaggctcccgcagggcccactgaactagggaggtccagagggggcccccttttgccactgcaggtgcccctagagaaactgcccagctcaggcacgccaggctcctggtaggttccccatcactgccctgggtagattctctatcaatgcccttgtggtcagagtgatctttccaacacagaccacgcatcccccctgctcacaacccttccaaatcccccatctcactcagaataaaacctggagtcctgcctctcccagctcagacccagcgactcccagcagctcggttcaatcccactggccttcttgctttttcttaaagatgccagggggctttccatgggccttgccctcctcctgaaatgctcctaccccagaccttcctctggtccaccccactccattcccacccacatcctcagagagagctttccagacccctgtatttaacacaaaggtccacctgcttttacctctttctgtcactgtaacccgctttccctttccccataaaacctagcagtggacaaaattacgcttcctaattcatgtgttctcatccgtctcttccaccagaatgtaaagtccacatgagcaagaacttgatttcattcactgctctctgctaaggtccagaatcacctagaacacagtgtgcactccatcactatttatggaatgaccaagtcattccttgttatttgatcaactcatgaaccatgtagttatgctataaacaaaagaatctgatttttttaaaaagagagaactttatcgaaacaaaatcatggtggccaaagtcaccaaccctctcaatagccattatggccatgggcaggacacagctctggcaggagagtgagctcagggagacgcctcagaaacaaagctcagactgctcaactaactctccacaaactccaacagatgtggatgccaagtctccccagagggcggtgctgcttccagaaacccttccctggcaagatttggcactcaaaaattctgccctggaacaaaagcaataatgatgaccaattacctatcagtcagtccggctgatgacagtaacactaccgagccagcatgtctccagagattcatcttaccaagggtgagggtcacttggagcaggtgacagacgtcttgtgtgaatgggcctctcactggtcaacttcccccaataatgtagtgcagacaccaaagccccttccagaaaatcacagccttagaagtaaccatcttcctcagagattcgattctggtcatggctgtggcacatgaagaagctagtgcactgcgatggcccgttcacatacataccttgggtgggaggtgaagccaagaccccttgcctgaaggcgggacgctgtccgggaagccttccaaagcagtatttgatactgaaaaactggatgtccctgtatgattcgtcataaattaagcgaacacagcagggataaccactcttcaagtaccgaaggctgacggtgacggcccacgtcttcaccagagtctgccttccttccagctagtccgcctgaggatgaattggggacagagggttaggagagttgaggggtgcacaatgtcaatcaagcccttgctttccagccaaccatgcattcttgcccctggagagggacgaagggcaacagctccttccagaaagcttccccagcaagatccatactcaaaaaaggcactccctcatgagactgggcataaagaaagcaaacccggcaaggagaaggtcctttcaagtgccagaaaatagcatggcctaggaaaccaccaccttgtcttctgagctgatgtggcctccagaagtcactggataggtagggactgtggatcaactgacatacaccatttataaaatgtacgttctctgatcaaccatccattcccctatcatggacagcaccctgcctccaggtcagggtcctgccaggggacatctccggggagtttgtcctgaaaaacagtggtccaatatgataagccacaaacccaggcgaggccccacggtcagcctcaaccctgctctgcccccgaggcctccagagcctggaggccacagcatgtgagtcttactccaatgaagacacaggctctgccatgggtcatccttacgagtatttcacgaggtgctgacaccaatgcctcctttaataattccttggaattatatccaggaaagaggtgatgctgagttgcatttgcagcagagaaagcattgtagagggaacctgccattgacgagacctccccaggtgtgtcagaggagtccccctgcctcctcttgtaggtagcctggatgctgagggtcaaggacagagaaagcctgtgacctggcttgataatctgtcctgtggcctctggctctgcagcacctcctggatcgtggcctcgtgctgatggccagaacctttccccggagttgccctcccttctgggggaccctcatgggcaggctgcatggataatgagaattaatgacccatttaataggtatcatcaattcagccccctctctgcctgggacacggagtggggctgagcaccgaaatggtcttgcccagaagtcccccaaggacgggttgcttgggccattgaacattgggcatcgtcagcagaccctcccccaggtacctggtgatggtgctgacatagacctcctctctggtggcgggacacctccacacattctcccactgtgcaggaatgaggccaactgtgtggtctttgtcatgaaaaatgcaagagcactccggtggttcctcaccaagccccacgccgcgacacgagcacatcgggtcccccggccagagcctgtatcacttctagggcttctcctgagggtggaatgaattctctgggttagctgtgcagagaacacattcgtcaacaaagttcatatccctgcgtcacctctgtgcccatacctcaggcgaagctgacagttttcttactgtgaagccggcacctgcaggcacccataaagaactgactccacacagggaccccagcgcactggccacctcagataggacaaagccacggaggcagagagcagtggggctttgcagccactccaggatgctgccccacacagggaccacatcctgaagggggcggggcttggtgccactgccctccactgtgttagtccattttctggctgctgataaagacatacccaagactgggcaatttgcaaaagaaagaggttcaattggacttacagttccacgtggctgggtaagcctcacagtcatggtggaaagcaaggagaagcaagtcaggtcttacgtggatggcagcaggcaaacagagaccttgtgcagggaaactctgccttataaaaccatcagctctcatgagacccattcactatcacaagaacagcaagggaaagacccactcccctgattcaattacctcccaccaggaccctcccacaacacaaaggaatt

SEQ ID NO: 1885695 - DNA, 4001 bp, Homo sapiens
acccaacaggcagctgcttaggagctgccaaaaagtagtaatagtaacaggaaatgtacggagtttttactaatgtttgcattccctacaggaagtgtttcatactcagaatgaaggctacagataggagaggctggacccaggttccccggtccaccatctacctagagagaggcttgaccccggcatctctccaaggaattcctcgtggctaagatttaataacaagaagagaaagagagatgaaataattgtgaacatcttccaataaaaagatatggcaccaagcccctaaatggcatctccaccccaaagctagcatttgtccaaggaaatcacactggtggcttgcattctgagatcactggattcatcattataaatcatcaacacagtcacactccatggtggggcaggcaccaatgtcccctcactgaagtcagcactgtgctttcaaaaacttctgaagcaaatttggatactaaaacaatggttgtccgatattaatcatcataaatatagagaccatactacggacagccattctttaagcaccaaagaactgtgccatcaagaagagctgggcatcttctccaaagttggtgtctcttccagaaagttcttctcaggtagtccaaacaatgaggattagcaggtcagcttcacacattgagagtcaagcccatgcctgggggtcagtcacactcttgggcaggggaagggggtctggccccaatgatcggtccctaaggtttgcttcatgtccaagaagtgcctccaagaagcaggatttgataagtagcttgaatgctgcgtcacccacaacacacacccatggccaatgcaaatccctgatagcaccaaggagtcccgtggccccctgccaagcgtggccccgcctccagggttctgaggttagggcacaagtgtccccaccacaaaccaactgcatgcgccctcatccccacccaggcgtgagcccctgggaagggctgatgcgtgcatccctttacagaacttgtcatggcgtccaggaagtctgccgaggcaagatttgatactcaaaaagaaattgtccttgtatgattcatcataaataaagcgaacacaccaaggataatttctcctcaagtatgaaacagcagcacggaccaccacctccaggtctttggctcaaggttagatggtgactgcttcgtggcaaacccagtcacacactcgctcatgcacacacaccacgcacacacaggcatgcacaatgcatgcaccaagtttgacctctctttaagcaccagggaagcaagatgccatagaatcctcactcagcttggcatcctcgctcaagactccttcaaagcgtagatagtggccgaggtcaagaacccagggactgtctctcttaagtggagcaaatgttctcggcacccctgctgacccccactgcatgtggcattctgtatcaaaagccactgtgtgaatggcttagctgccaagcatcaagagcatcactagcccccattgtaaacaccgtgtatgctctgggcttcctagtccattccatacccgatgaaggacttgacttccatgttttgacactgttccaaaaacccatggagagattttagtcataaaaccaccaccaccaccaccaccaccaccaccaatgatagtttcacagcacacaagggtcctggctaccacctacgaagtgccgaccacggggctctgctctgagccgtgtacaagtcttaactcgttcagccccagcagccccaagaaatggacgccaatgtgattcccctttgacatgtgagacaatgggcacagcacgatgagatccttgcccaaggttggacggttagtaaatgtcagaggtgggatccaaacacaggaaatcgagctccagagtctgcgctcttgatactgaaaaagtggatgaccctgtacgattcgacatgagcaaaacgaacaggacagggataaccactctccaagtaccaaaggttagcacggaaaagaaagccactgccttgggtggacttggtacgtcttcaaggcgcggtcctggggatgaattagatgctgagggttagtggaccgggtcacataccccaagcagaacatgcacactcacggaccgagtaacagcagggaccacaaagccactaccccacacgagcgccaccccagccatcggcccgggctgatgacttcccgctcaggaagcagggacccagaccacacacatcgtgcatgcttttggccccgcccacactgcaccaggagaggggatgtcccagaggccactgccttccctaaagtcatccaggtgcccgtgaagtcctctctgtgaagtggggacccgtgaacgatttgccacacacaaaacggatacacacggtcatgcacacacataccgcatcccttgctgagtgtggactgggtccaagacaaggtttgatactcacagagagcttgcccttgtatattccatgtcaataaaccgaatatacaaagggcaacctcgctttaagtaccaaacaatagcactgggcaggttcctcactatcattcacggggccggcctcctctcccggggttcatcctggcgggggagggggtgggagatgcgggatcagcagaccaggtggcaaacaccacctgccagctgtgtgcccataggtcagctctccatcccaaaggggccaggaaggggcagacgccagtgccccttcaccagaatcagcctcttttccaggcatcactccagattagaacttgttcctgaaaaggagatccaccccacgggccttcctgggcacacgcagagctcagcttctcactttctataggaattccctggggtgggaccaccatctccttcccagtgtgggcacctctccaggaagttttcctaaggatgcactcagcaccgaggtcccaggcactggatgaatttacaccttagacaaagcaaaggccctgtggtcaccatcccttcatccatctcacagagccgttgacaccagtgtcattctccatgccagcccttgccccacccctgccagaggctggcatcgtggccatgaagccatgctaagaaagagcacagggtcaacagtagtaaaccccacgtacccccaagtaactgaggaagcagacccacagcccattccccacagtggtctctccttcaagaaggggagaggagcgggagccgcctggtccaggtggcaggttatgtgactcattacccaggcgtggtgctcacctctcttcagctggacgttcgctttccttgggctgaggatgctgcgaatgtccttcctgaagctggcttcgggtccagatgacccccatggcagtcggggtgtaaaaagccggcagtcacacggcccaaggagtgtctccacaaacacagaacaagagtcccattctcaggcagccatcctaggtgtgagcagaaagccagcagtcagagacggggcacagacatcgaggcagaagcaggcgccctctgacctcccacatgcacgcacctggtgcggggctgacagctcccacggctcatccccagcgctgccttcatgggcaatcacaaatgacaaatagaagcaaaccattcttacagattcagcctggggactgcgagctggatcatgaacacccaagcatcaaaaaaaaaaagcgctgatgagcacacctcagccccttccccaaggtcaataccacctccaggaagccctcctggggctggcctaccaggctcgaaaacagcatagacagagccagtgctccgtggtccaccatcactgctgtctgtgttccccttgaaatgatccaacatccaggtcccccttctaaggctgatgctgggaacaggaagccttctgtgtatgacttggtaccaagaagaggcagatcaatgtgtgatttatccttaaaaaagcaaaccaccattaaacttggagcacacaaaaaggtccctcctctcccactgc

SEQ ID NO: 1885696 - DNA, 4001 bp, Homo sapiens
gacccagaagcatatctacatgccaccaattctaattctgaacgagataaaacatgcaggtaaacaattctaaacatttttcagaagtttctccagcaaaagtaacatttccttagcaaacatgggacatctttaaagaccacagaggcccccgaatactgagtgtgctctagtccttaaagggaggtgaccctgaggacctcagagtccactgttttgtccctgggagtccacatcccttcaccccagggcatcacaggttcttcctagacaccagagggccccagattctggctttccaacacctaaaaacttccaaaatagatatttcacaacaaacacttcacacacaaaaaagaaaacattaaaatcaactgacaaaataattcccatcttcaatcaccatcattttagagcaaaacgtacatcgttaacaatccaatgacacccaccaacgcgggcagcacagaggctgaccagcagactaggtggcagagttcaggtgccaaaaggctcctggggcgcaggaatcttgccaaggacttgggagtgaggaccttgggagcaatctagggacccctgaactccggcagccattactgagatgacccatggggaatagagaggggacatgcaatctctccctccaggctccacacagcaggacctcagctgagcccgcacttcctccccctgcccaccaccccagctgatcccgcccttctggaaaccagctcaccctcctctgcactcatgcccacacccacgcccccacccccagccctggcccaggctctcctgccatccaccggtgacacatgactcgaggaggagcctagtgtgacacgtctgtgtggggcggggtcagagtgatgggggaggaggcgcttctggcgatgcatgtggaagaggctccacgtgacacttgaggctgggacacttttcagccttgtgaacatctaatgaagcaagcccctcccaggtgaatgatgggtgtcctgagctgaaggtggagacccagtaggcctgcctcatctcggtagacccagaagcatatctacatgccaccaattctaattctgaacgagataaaacatgcaggtaaacaattctaaacatttttcagaagttcctccagcaaaagtaacatttccttagcaaacatgggacatctttaaagaccacagaggcccccgaatactgagtgtgctctagtccctaaagggaggtgaccctgaggacctcagagtccactgttttgtccctgggagtccacatcccttcaccccagggcatcacaggttcttcctagacaccagagggccccagattctggctttccaacacctaaaaacttccaaaatagatatttcacaacaaacacttcacacacaaaaaagaaaacattaaaatcaactgacaaaataattcccatcttcaatcaccatcattttagagcaaaacgtacatcgttaacaatccaatgacacccaccaacgcgggcagcacagaggctgaccagcagactaggtggcagagttcaggtgccaaaaggctcctggggcgcaggaatcttgccaaggacttgggagtgaggaccttgggagcaatctagggacccctgaactccggcagccattactgagatgacccatggggaatagagaggggacatgcaatctctccctccaggctccacacagcaggacctcagctgagcccgcacttcctccccctgcccaccaccccagctgatcccgcccttctggaaaccagctcaccctcctctgcactcatgcccacacccacgcccccacccccagccctggcccaggctctcctgccatccaccggctggcgtgcgtctccccgaggcgtgcactcacaagggcaacgtccatctacacgatgcctggcacagggcctggcacacagtagaccttcaccgaatgtgcaaacgaatgaatgaaagcctaccatgtacaaagccctggaggccagaatgagccccgaagcgaggatgatggaggtgaggcgggtgatggaggctggaatggccagagatgagatgctgtgcccaggatgacagaggccagatggaggtgatgggagccgtgatgatggagtccatggtaacagacatgcatgagatggaccccccccaaagacgagagggagaggaggaagccagggcccaagagctgggcctggaaacctctgagggtcaaggtgggacatgaagcaggagcctttcctgtccagaccagcgttcagctcgacgccccaccacccaccccacgcacttgcattcacagaaaatcgaccctgtgtgatcctcagagaataatcagtgagcccgagagccctgccagtgaggagtgggacgtgccctggaacagggggcagcagacatttctgcttacagaccccatgaagggattttggaaagccacggatctccccctcccatagcccatttttaaatgggccgtaaaagttaataggaagtttacaaagttgcaatgaggtggcctctggcatatactatagcatatagatgtgacaaatgctaggtatggagcacttgtcaaaacctcagaggtctggaatcagctcattttgatttgtccactctgaacctcactggcaaaccaatcgggcaaaacagactttttcagaaaaagcctgatgtcattttgggaacccctcaattcaaatcagtgtgtaaatatgcagtgcaaaggcaaacatttcccccctggattcggaacctcaggtagatgcatcacctggatgccaaggagggtggggcaccgtgggtatgacgagaactcacctggaggctgggtggagggtgcagcatctggccagagggcatggcgggcacaggcgtcgtccgggcccaaggccctgtccagagcgtgatgcagtagccgaggcctgggaggccccatctggtcctgaggttccccagccagtgccacagagcagcagaagccccatgcagtggctgggggagctgaggggctaggcacaggacccagcctgccccttgctcaacccattgtcttgggagctgccttggaagctggagactagggggtgggggtgggggggatggccagaaccccagacaagggggcaggggttaaggggtgggcaacgggggtgggttccactccaggacacaggagggagagccggtgagaggacggtgtctgcagctcatgggagcacagtacccccaaccttggcctcagcccaggtctcactccagctgctttgccaagaagaggcagggggggaggtggagaaggatggagaagaggaggggttcaagggccaagactctcactcttctgtccactgaggcagacctggacacaaagacggactgatgggcaaagccacaggggatataggcatgggtgactccgggaagcaggtctgggggcaggatgtggatgtggcatcggcacccagggtgctgtaggctcagggacagatccactgtcgcccactcccagtcgctctccaccatctgtctcccacgcatgcacatacacacaagcatagagctgcatacgcatgcactggcaggcacacgcacccacacacgtgcacaccgggcatgctcacacactcataggctcacgaaggcacacacaggctcatggaggcacacacacccacacacatgcacacagctacccgctcccaggccaggggcccctgtgctctgagccctcccataacaggagcccggcacatacatctgagcctaacccagagctaatgggcataggagcccattcgccccacactagagggtgcacacctagggctggggactgtgcaggagcaggggtgaatggaggacactagccccactgccaggagtcccaagttgcagaaaccctccggaggcagcacttctgcaggagcaccgggctgcatggaggcttttggctaagggctggcccttagaggctcacagccaa

SEQ ID NO: 1885697 - DNA, 4001 bp, Homo sapiens
taagatggatgagatctaccacccaccctttagggacaaacagcaaagtgtctgccctgatggagcctctgagccaagggagtcgtcatagaatgggtagcgcaagggattttttaacatttgcctcaaacagatggaatgaccaggggtcctggcacagcgtcaccactgtcgatcagcctgagccggagaagagcccccggggcagaccggaagctgcgggttagggagggatgaatgagcaatgaataaaacccaagttctcaggtggtccacgtggacaactgacttggtggtggcaaatcctcaccggttcctgcattcacacctcaccacaaccccctcccgggtggagtgggcctccccgccccttgccttgggttcggccgtgtaattgttctggtcaatgatctgtgggtagaaatatagcagttcccagccttggccttaaggagtttctgcgtttctaattactttcttgtgcctctgccgtagccatgggagcataccaaggccggggtgagagctgtgggtcccaacttcagccctcagggcaggccttctctccacaagccatcctaggtatgggagggagactgaggatgaacggaccaagacacacacccgaaatagaatgtctgctctcagacaagatgtccactcccatacctctccatggacctgacgccaacagccctcccctgaagcgcgtgtcacagccgggacacatcttccgcagtctgacactgagggcatccagggcatctggggcctcgtaaggcaagcagagctgaacaacagacagagatgagcaacggcaacaaagccctttccccaagcatggactgaacgctgcccacgaagcggctggattctgagtggtcccaacacaggaagggctcatctcaatcacgctgccagctcctcagtcccccatccacgactcaccaggagtgctgctgacaccagtggccctgccggaatctagcttcatgtccaggaagtcctcctatggaaaagagatgggccacgtagcattcatcaaacacatggcaagctttgtcagacagcctctcttcatgtagcacagaataaagtggccctcactaccacagctgtcccaacgcctgccctgtcctgcacacacacaacactcctcaaacccttccgaggataaaccacacccctgtaccaggtcacacacacacctcctgcagtcagcatgtggtgtggggtgggactttccctgatggggcactgaagcccaggcctctgcaatcctggcattgtctgtggccagactatcagccctcctgggcaggatttgaaaccaaaagagagattattcactgatgattgcttatattgattttaacgaggtaggaggagggggccccgaagggaaacccctcctaaaatcctgcagagtcccacgggccccacgtcctcccacatcttctccgaagttgccatgtgcaccaagatgtcatcccacagatggaccgggcgctggtggatagtcaaacgggtgacctacatcgtaaatgaagtgcacgtcaccggtctaccatcccctcagctaccctggagagcagatggcaccatcgtcccttcaatgacgttgctagcgtgtccagaaggccatccaagcaagatctcacactgaagaggcgccacccaccgtgaatcaacaaatagacaaacaccacaatgagcaacctccttcaaccacagaagcacaggcccttctccaaactcagcttcccctcctaggggccctccatggctggggcctgagagccacacccccacgacgcatggcacgctgtcagcctcgcttgcgcctaccgagagtggagccggcaacgtccctccctgaaggctgcatcaggaacaggaagtgcctccagggtgggatttgatactaaaaaagaggtttcccgtgtatgtttcatcataaataaagagaagacaacacggacaacctctccttcgagtatcgaagattagcactgatcaaaaaacaaacaaaaaaaatcaaaacagaactgccgaatcttcgccgatgttggtgtcacctccaggaagattccccgaatctacatggcactgggtagaccagacgtcagatggcttctatttgcgtgtcccaggttgcttttgggaagtcagccaaaagctcttcaagccttcacaatgaaaagaggttgcccgggaaacattttccgccaatacagagaacactttaggtacaacctctttccaggtattggagctttcctgacggtggaaccagggtttccttgtggaagtccaggccacgggaagtgcccctagtcataatggtttgcatcccaaagtcagtgcgtcaagagagctcatgagtaaatctcgaattctgtggtcaagaagcaggtggctgggtctgcagttagccggtgcccaggcccctgtgtggcactggccatgggtccaagcagccttccaggcaaggtgtgattccaaaaacagatacatggcaccgaggaagctgtaagcaaagtgagtgcctgctacacacggctagggagggagggtcggggaagccaggagcaccgccaggccaccttcctccaggtcaaatcccacttaatgccttctgctgccttcaatccaattcagcagaatcaagaaataaaaacgaatctcatttcctgatgtgagctccccaaatgttttagccaattctgggccggattttctgtttgctataaaactcctttgacaataattgttttcatggtggggggagtactgttatctccagactcttttgcatctcaacagagagttagatcaatcctgacagggctggggagaatcaggggtcagaaaacttcaggtttcctcttacaaagttgtaaaattgtgccctcttttcccccgaaggtggaccccggagcagaggtctgagaagaaaatcccagggccaggctgcggctctgcacccttgccacctgtcctttgacccctccgtagccagcagagcacccaatctacatggacccagcagccgcctaccctggataccccggaggcaacagcatactgcctgctgtcacatggccttgacacactctctctgccctctctttatgagggctcttttcggctggaaggaacggtgtttgggtatcagctaataggaaggattggtggcggaggtcattggtgctacctcatatgttctctctggttataaaaagcagggttgacatggaaatacctggcccttctccagaacctgaggccctcctccctcacagtcccatccccaaatgccacagatgagccgaggacccacagtcacagctaagtgccatcaaaacaaatgcagcaccagcaaaacctacttctgtgccttggctttagagctggcagggagccttttccttccccagaggctggcatcacctccaggaagtcctcctggaaaggatcgggcaccaagcattactgccagacaggacgcttagaacaggggaagcacccatctcggcccactcaccctggcctgggcctgacaactgtcttatccggaagccttccaaactggtgtttgatactgaagagtggtccacagaaatgatttatataaaagaaacagatatgccaaaggaaacctctccttgagcaccccaaagaaggaccatctgcagaaacacaaccctgagggtaggtcagatgtgctggtcagtggagcaggtgtgttcctggggaggtacatgccccgtggtgggccatccactcccttcccctggatcagggctggtgacaatgccctcccttcaagctggcatgacatcaaggattcctccagatttaaaggaagtcaactccacaattcctgtgagaaataaacaggtctcaacctgggccaattccagggcccccaaggtctcctcttgacctcagaatcagcttttcttccctaaggtgtcattatatccaggacatccttt

SEQ ID NO: 1885698 - DNA, 4001 bp, Homo sapiens
ccacaggggactcagagccagtgtcccctccagaggtcctcaggctgagggtccaccggccaagtggcacgtgtcatatacagactgtggggcctgccttctgctcccacagctgcaccttccctgaagtgggcaccccatcatttagaaaggtggcactcaaatgagtaaaacaggttgactatgcaggccacagcttggacagcctttcttgatggaatgtcctgacatgaagaccggtgctgcttctccaaagtgtttctgccaccgggaagttctctggagggaggccagagcccaaaggatgggtggagcagctgcccactgtctgaagggcacctgctgaggccagcatggtcccagtgtcaccaatggactgccgttagcatctccttccagaagtgggttctgacctttcccgatggcacatgattctcaaatagaagtgcaccatatttttcatcataaataaagggaaaaaacacagataacctctcctccagtaccaaagtgtagcccggagagcagtcccacagcctctagttctggctggcagagctccaggaagccctcctgggggacagggatgctgaggttcgggggacagggatgctgaggttcagaggaccaggtggccgtggggatgacgcgtatgctctctgggcaacacccatcactcaccccagagagctgctgatgccaccaaagctcccagctcaaacagcctttcccttcaagtgggatttgatactgaaaaaagagtggccaaaaatgattcgtcacaaataaaatgaacacactggggaaacctcttctcttccagggcccaaggatggactgaatgtggggactggacacccggacagcagtgtcttcgggaaggcatgtgttctgccgtcagccattgttcactgctcccgatttggggcagacaccaatgtcagacaccatctctctgatgctggtgatcaaggagcacatctctcagaggcagaactggcacctagaaagagtggggcgggggctgggcgcactggctcatgcctgtaatcccagcactttgggaggccaaggtgggtgtggatcatgaggtcaggagttcaagaccagcctggccaacatggtgaaaccccgtctctgctaaaaatacaaaaaattagctgggcctggtggcgggcgcctgtaatcccagctacttggaaggctgaggcaagagaatcgcttgaacctgggaggcagaggttacagtgagccaagatcgtgccattgcactccagcccaggagacagtgcgagactctgtgtcaaaaaaaaaagaaagaaaaaaagaaaagaaaagtaaagaaagagcggggcagggaggattaggctccagtaaatcaccactctgagaaatcccatctcccagaaccacagggacgccttctgccacaattgctacccccaatcaattcttctgtggaggtgcgggtggcagtcccccagatggcatgtcctcatgtccccttcagccatcccctcaagcctctggagagagcggatgggggcaggggtcttcattgcttatttgtttttgttgttgtggcagctgcttccttttttatttttttcttggctgctatgatctgaactcttctcaaatgttggggaacgcttctcaatggagcctggaagtgcatctccccagcctccctggcagcggggaactggcatgtggttgaggcctcgccaactgtgcctgtccgagaggtgggcgtggactgaggactgaggactgagcatggtccctgagcccaccaacacacaaagtcaccgaggggctgccaggacaaatcctccatgtacataccaagagaggtagtgacaccaggtcccatgctcagggtcccgtcggggatggaggcacttcaaggagatatttgataccgaaaaagaagtgcaccatgtttgtttcgtcacatataaagcgaaaataacatgggcaacttcttttcaggtaccagagatgagcacgtcctccctgccagaggcacacctgggcgtgaagggacactgagggtcagggcgtgagggcagggccgggcagacgctgccaatcaaacttatgctcaattaagcctaaaagcatcaggtaagttggctcaccccaggggaggtgggggacatgcttcgaagggctgggctgacactgagcagaggcggacagtcatcacggataaagcaaaccgatcccagactccctctacttcgggatcccaggaagtcttcatgggcagaattcaataatcagggcagacggctttcggaatgtttactatcaaccctgcaaatgctcatggagagcatcacttcagagaaaatgggatggtcctggacccaaaaatagaatctcctccatgagcccatggttccaggaaggagatgggaagacaaagatatcgaatcaggagaaacaaaccaccaaggcagccccggctctcggtggacccatctctctgtgcaccttgcatggtgctgaccactgcacctcctctctaaagtgctccgggttccctggaggcatggcttggttctaaaacactgacagttaagtgtgagttgtgacaaatacagccaacccacagagagccaaaggacagcaggggccaggaaaggacaacggcttccccaagtccacatcacttgcagggcagcctcccagagagaggtggattcgagggagagtgaatcggggcagaagttctggggcccaccatccatcaggccttccagagaggacccagtgacccattgctggacacaaaacacggtaattgtgcatcatttgtcaaccataaattaaatcactaagacaaagctttgaaagcataagtccataagaaaagtcaccttccaccaaaaccctgccttaaataggacactgaagatagataggcaaaccgtgagaaacacatcattgaaaaaaatgcaggctttcccagtcacactggaaaacacactgtggtatcatctgtttgtattgcaagtaagataagatctaactccaactggcttaaacaagtaagggatttatagacgtatataactaaaaagtacagagacagagcaagcttcaggcagggtttgatctagggactcaaatgatatcatccaggctcttctctaggtctccaagatgcctttcatggtacagactccctctgctgtgtctgcgtggcaccaagccctctcctctcagtccttaaacggctgtgggaccttcgaagctcacgtcaaagttcactgtctattcccagctgaatggaatagacagtgtctactctggcagctatcacaggaaagggagaaacagtttctttcccagaagctgcagcaagcatctccttgcctatcactggcccagtggggtcatgggcctattccggaagcaattgcagtggcaaaggagaagagatcaagagattcgcttaagcctgggctggtggaggaagtggggcagggtcaatgcaatcaaagcacacggcgggaagacgggagctttcataaaaaaaaaaaaaaaaaaaaaaaacaaggagaaatttaggaaggagaaaagacatggggtagggaggtcctgatcagcgtccactacaggggcccatgtgccttccctgaagttgcacccaaaccaagacgtcttcaaggcagaataggatactgaaaaagaagtgcaccgcgaatgtttcgtcacaaataaagcgaaaaaaacacgggcaacttctcattaagtaccgcacgtcagcaccgttgacaacactgcttctccgcggctggtatcactcctgcgggcttcctgagagcacatgggtcctgatgcgcaccgggcaaccggtgacaaagatatggccgtgcatacaaccccctcaagacctgggagacatctaacaggtctgccccctctgcacaggtggcattgtgtcctggagctgcttgtgagcacgatgtgttcaatttctcaataac

SEQ ID NO: 1885699 - DNA, 4001 bp, Homo sapiens
gatagaaagagaaagatagagacaaggaaaggtgcagaaagaagcacagtgcttgtgagctagacgggggtctggggctgcagactcgtcacagaccctgccaagtgtgagctctttgtgtatccgcgaggtcaaataccttccgaaaaaaaaatggtggagtcaaaatgtctttgggatcaacacagccaaaatggtgatgtaaagagacagggtccagggtaagagctaaagccgacgcgacaccaacgccatcctccccgggccgcgagccccgcccccatcatgaatgaagcttgtgttctctgagcgacatctgttctcatccaccgcagaggaccgcagagggcagaccacccacgtctaccccgtccattcttgctcacgggaggggtgtagatgcccctgagcttgccactgggtcccggaagccatcccaagcaggatttgatactcaaacaaaagttgcctttgtgtgattcaacataaataaagcgaattcaccaagggcaacctctgctcaagggtcaaacatcagcacgggcaagaacacaccgagatgcctcttcaccaaaggcggcattgcctgcgggacctccctgctgactccagctgcaggctcgctggcttgctggctcgctctctcccctcttgctctctctctctctctacctccgagaagccccccaggcagtggtcagaacatggttggtcatggaccagcttctgtagccctggagcaggcagtgggggcgaggctatgcacacacacatcacaggtcagcccgagctagagtcagcccctggtcacctaccctagaggggctggaacaccaaggtccacctccagagccggtatctcctctggaagtctctgaagcaggatttcacacagagaagggggctgccaatgaaccatgtgaccgtgttcagtccagcctacaggggtttgagggaggacccgacctgaaggctggcgactcctcgtccagcgcagcatcctcagagggtgggtggggctgcgtcacagggacagcacaggctcaggtgactgtactccatgcactccattccaggaggcctcaaagagagttcaaccaagaaaacaggtcacgctgcctattcattcattcagcatcacacctactgtgcacatctggcgacacagcaccaggcaaaacagacaaggactctgccctcagggagcttccattctagtggcgagaggacaatgagtgcagatgacataacattcatataatgaccatcctcagaaacaatgcttatcctacagccacgtgccagacgctgtctagacacttcacaaagagcacgtttccactccgctgttaaccctgctttacagaggaagagactgaggcccagagagctgataggtgaagggattttccaagggcacacagctggcaacataaggtagtaataaatgctattaacaattctcgtcttgcagtaggaataaccgagtcgtgccatggaaatgtgtctttaaacaacattaattctcactgctgaggaaacccccttcaccccttgcttcccagaggtcacccagaagataaggtatttgagggcgtaatgtggatgtcttccattcagccaggagttcctttccctaaagtgtgccacacagccaagatgatttcacacctaaaaaggttgactaaatgtggtttattcactgacgagtcttcaaggatgcgactagaagaccaccatgtcaactaaaacgtcagcatcatttcggggaattcctcctaatgatggccgggatatgagccaagtgatgtaagtcacacagagagcacctgtcatgcggaggtgatccacttccttaccctgcgcaggtgccggctgggctttcccctcgtgacgtttcccaagaagaattgagtaccgaaaggagattggccatgtaatactcatcataaataaaatgaacacaccatggacaacctccattcgagtacctgacttgggtgctcgcttccagcgcgtcccagcagcaggcctgaggacggacgggatactgagagtcaggaaggtggcaacacaccacccacgaaataagctctgcggtccgggccgcactccatcccttacttgcaattagcacctcttgcaggaagccattcagggagggaagtgccacagcagagaggtctgcagagcaccatctgtgatacatgaagagagggcagcagggaagacagcaagacggtgtcttgtcaaacatgcagtgagccgatgagggaactgccgcctctttcgaggaaactgccatggtaagcaagcaggacgcctgcaggtgcacgacccaccaagaagagtgtgcacactgtcagcttcgccgtgcgttcaggcattcagacaccagttctagttcctaaactcggcaccacccgagggtgctttaaggctagatttaatgctttcaaaagagtccactatgtaggattggtcaaaaaataaatcgaatgcatcatggaagacctctccaccagtaccacagagtagctctgataggaaaagctccacttcttccccaaaggtggcaccatctctagaaacctccccaaggacggggcacacacagggttagggccagggcacactgctgggtcggctatggtcaatggtccccttccttaccctggagaggagctgacaccctgaagtaagactccgctccaggaagccctccaaggcgggatttggtactgaaaaataggtcaaccgtgtatgattcgtcacaaataaagcgaaggcaacacggataacctatcttcaagtaccacacgctagcgcagacccaatgtcaatgcctgttctccaaagttggcctcctccaggaagtccccctaggagacagtgaacattgacggttagcagacggactgcaagagggttgagaagaaagcacacgccctgtattcaaccattccatcccggaccctgcagccatccagacctcaatgcctttgccaaggtgggtgcatgtctaaaggagcactgccagggaacctgatggtggagaggccaagtgcacagaaactcagcatttggatcagagcagggcacattccctcatctcacattagcatcgaggctgacagtaatgatcctttccttacacaggccttgtgtccaggaaccctccaaagctgagtccatgacaaagagactgactttacaatattgatcatacagaaacaaacagcattgaatgcaaactttattagaccatggcatggcactgacctcagaatcatggcctcatccccaaaggtgagcataatttccaggaagtcttcctaaggatagattgcatgcttggggttaatggtacttcatatatggtttttcaaactcttccattgttagcagaaaattcacatacctggccagtggtgctgactcccacgaccatctcagaagtggcattgccataaggcatcctgccagggtggaaggtgacactgaggagggggcatctgggtaggattgttttaaatagacaaatgcacagtgcaaatgacaacagactgacgtgcagacagatggcagcaaggggccagatgacagactttcttctcctccagtacacaatgaaatgaacaaaacagattatttcaccaaagaaaaaaccaacacctggagtagaaaagtgctcataaaatgaataaatccttgaaacaaaggaacgattaaatctactcatcaagaaggcatattatgattcagaaaaactaatgaataaaaatagtgactgagtcataacccggtaaagtcaccaacgttcaagactaaagaaagaatcaggaaatctaagcaggaaaaaaaaaaagttcatccatccaagggaaagcagctgtccccaggcttgtccacagcaatggtttaacaccagaaagcaatggaggcaagtttacaaagttcagagggaagaaactgggagccaagaatgtcatgccaagttc

SEQ ID NO: 1885700 - DNA, 4001 bp, Homo sapiens
ttctctgctgagctcagcactgtaactgcctctactaaaagaagtttcccaccaatggagggatctgattgatgttcaaggcctgccatccagattctcctgtcccacagggtgttccctcaatgtggtgcactcccttcccctaggagcaggagaacctgggagccatactactgtgagtgttgttgcttctctaggtctagccgcccagtgaagttgacacacttcaggctggtgttggggaatgtatgtgagggatccggtggtgtgatgtgtcctcaatttttcagcagtgagcagtgaaccaggtctgatggaagcagcaggggagtgatggagactgaaattccttagatattgatagcctttgtgtactggctttcttgaatgctggttatagcggtaatgaactgttcacatggacagactcaggacctcctggtcatccagagtggtgcaggcactggtcatagctgagatcacacagtcattttctcctttctgggtgcagtgatagtctaccaggagatactgtgatggactgtttattggcttcctgcttggagatggtgctttccaaagagcaccagctacagtattaacagtggggtttttgcttggcttatgttgcccaggaataggggctactgtggattctcaggcagtgggtgtggccatgtatctcccaaaagatgctgtcctttgtgttaagctgccagggcagatggctgcataaagcaaggtgagggctgggccaggtaggtttctgctcagagtatccttgtgcagggcaagcagcagcctctctgggtatgggagacacagataatggtgaattctattcttaatctgctgtttaattttgtttgtcatctcatcactcttgagagtttttgaaactatgataatcagggatattggcctgtagttttatttacttgtagtgtcttttccttgctttggaaatagggccttccaaaataagcttggatatatttctttctctttattttgttggaaatttgagtagagattctaggttttttttaatttttgataaaattcagtagtgaagccatgaagttctggactttgattcgagatgttggaaaaatcactgactcgatctctttactcattggtctgttcagattttttttaattggagtctcactctgttgctcagtctggagtgcagtggctcgattttggctttctgcaacctctgcctcccaggttcaagtcattctcctacctcagcctcccgagtagccgggactatgggactgcgggtgaacaccaccacacccagctaatctgtgtatttttagtagagacggggttttgccatgttggccaggctgatcttgaactcctgacctgaggtgatccacccgcatcggtctcccaaagtgctgagaatacacatatgagcaaccacgcccagcccagattttttatttcttggtggttcagttttgataggttgtatgtctttaaaaatttgtctatttattttaatttattcttaaccaaacaggttctaaaatatttgcaagattactcacaggaaatctatttatgacagaagtctttgttatatcaaaatatttacgaattggcacaaagatgaattattcagtgcatattgttaaaaggaaaacaacaacaaaaacaagataacttattaatggtacaaaaaggggttaaatgattttggaaaagtaagtagaaaataaaagaaggagggagtaagagcggacagaagggaggaaggcaagcaagcaatgatgaactgtgtaaaattttcactaattaaaagactattatattgaagaggtgcctattaggcagccttttgatgttaaccatgtaatatacaccatgaacaaccttgtagaacacacaagagccccctcagagaactggatgggtcaggtctcccatccagttgccttaggggttaggaacgctcccatgttgttctctggtttttgctcctgaggacacaaacagccagtgtttcctccccggatgaatagagaggcccctggggagggtgtgtctggcagctcactctgcacctgcaccgcggaaggttttagatggtccctctcacacaataatacatggcggcgtccgaggccttcaggctgctccactgcaggtaggcggtgctgctggagctgtcggctgagatggtgacgtggccttggaaggatgggctgtatctggtatcagagttcccaggatagatgctccccatccactccagttctttcccgggcatctggcgcacccagtggatccagtagctggtaaagctgtatccagaagtcttacaggagatcctcagagactccccgggtcttttcacctctgctgcagactgcaacagctgcacctcggcaaagacacctgtgtgggagacacaaaatttgcatcaggggctcccttctgcccattcttctctgtgacctcaaaccctgggcaggactgaccttggagaacagccaggacgagggaaaggatgacggttgaccccatcctggaggaggacagaaaagaaagcactgagatcccagctgggtggtgaaggagactcactgtggaggagagccctgggtttaagtggggaggcccccacttgaatttgcatagttgccgccctggcctgaagggaagagtctacaaggtttataacccagaaccgcaactgcagaaaaacggctgaactgagcctcttgggagaggcagaataaggtcttaataatgtcttacaaccccctgttgtccctccgcactcttgtccatggtcctacaagacccaaaccagggcctcccttcttcctacccttctctgtgaccctgtgaaggtgataaatctagatgaaatcacgtgtgttttaaaaaatgagaaatagaaccaggaaatgctatgaagacaaaattcaaatgcacatatgcctgataataagaactacaaaaaaaaaaaaaacacctagtttctacttgctggcaatttcccatgagtgccattatggtctgggcacccagcaaaggcaggaccaccctagggcttcaacagtcctcaacttgattaacttgccagaccttcacccatgccaaatcacacattttttctggtcattttgtcttctacatttctacagtctgccaattcaacataaatagggaatatttgtttaggtctctgaattgctgatggaactgaagggattgccattgctgcacccaactcctggtagttctgttttaagtcctttgtgtcaaccccagcaccttcttgtttagttctttcattttttaacattcattttatgatatccacattgcttggaggaggcccttaactatcccctgtgtctgccccattatcttgtgaaccactctcatttccttatcatctaaaagattcaaatgaaaagacaaggcaatacaaactacacagtttctaaaatatttgccagattgctcacaggagttgtacctggggtgcagaagcaaaaggacttctctttatcacagcacaggccatgacctaggtaaggtgcatgcgaagcaatgtccagcagcatcaacagaaacacacagcagcaggacctggataagatgcatgctaagcaatgaccgtcggtatcaacataaacacatagcactatggcttccatatacagcattgggctcctcatctggagagcccactttgcattttaaagagagaaagggcagtctcattctcagggtagagaaactttacatgatcgggatccagtgcttgaggaaagctgtcccatcagaagcatcctacttgaggttgggatcagctagagccatctgtgatgtgtctattgtgagctgtgggtccagcatcttcccaaacatgctcctcccttatgcaacacatgaagccaaagagaatctgctacatcagtcagtctcctagtccattggctaatgttgttcacgatctgatgata

SEQ ID NO: 1885701 - DNA, 4001 bp, Homo sapiens
aggcaggttccattaaaaatatatgaaagcttcctccacggattcctgaaagacgggatttgatgacgagaaccagcagaatgcatgtcagagataagcaaagccatcatgaagaattctgtttccgataaaatggggtgtcactgatccctgaagacagggtccctaccgcagagatggtctcagttcctggaatttcctcccgatgactgcttggaaacggagggtcacagaattccagggcccagcacatcaataatgaataagcgtgccgttgacctgcacccgacaatcttgcagcagcttgacaccggcggcccctccctgaagcaggtcttgtatctgggaagccctttgaggcatgatttgattttaaagaaaagtaatctcatgctatttacgcatgtgaaagtgaacccttgttcacaaaccaaaacatggcacgttgattctgggccgttctcccacgatggacggtatatggcatgtggggagacaggcgacacatatcacagggaaagcacctggtctccagccccaaaccactgtgagtgttgtccacagaccggcggtattagcatcacttgagaacttgctaaaaatgcagaatcttggtccctgaatcagaatctgctttttaacaagatccctaggtgatgaaaatcttaggagcatttttaaagtttgagaaacactactctagccaactattcatatgcacacgcacacaaacacacacacacacacacacacaccccagaggtgctgtcgaccacaacgtcttattccatgagagtctgtctaagatggggtggttcccaaggaaggcacgaagccatgccacgtccaccaagaataatccaaatacccaacaggcagctgcttaggagctgccaaaaagtagtaatagtaacaggaaatgtacggagtttttactaatgtttgcattccctacaggaagtgtttcatactcagaatgaaggctacagataggagaggctggacccaggttccccggtccaccatctacctagagagaggcttgaccccggcatctctccaaggaattcctcgtggctaagatttaataacaagaagagaaagagagatgaaataattgtgaacatcttccaataaaaagatatggcaccaagcccctaaatggcatctccaccccaaagctagcatttgtccaaggaaatcacactggtggcttgcattctgagatcactggattcatcattataaatcatcaacacagtcacactccatggtggggcaggcaccaatgtcccctcactgaagtcagcactgtgctttcaaaaacttctgaagcaaatttggatactaaaacaatggttgtccgatattaatcatcataaatatagagaccatactacggacagccattctttaagcaccaaagaactgtgccatcaagaagagctgggcatcttctccaaagttggtgtctcttccagaaagttcttctcaggtagtccaaacaatgaggattagcaggtcagcttcacacattgagagtcaagcccatgcctgggggtcagtcacactcttgggcaggggaagggggtctggccccaatgatcggtccctaaggtttgcttcatgtccaagaagtgcctccaagaagcaggatttgataagtagcttgaatgctgcgtcacccacaacacacacccatggccaatgcaaatccctgatagcaccaaggagtcccgtggccccctgccaagcgtggccccgcctccagggttctgaggttagggcacaagtgtccccaccacaaaccaactgcatgcgccctcatccccacccaggcgtgagcccctgggaagggctgatgcgtgcatccctttacagaacttgtcatggcgtccaggaagtctgccgaggcaagatttgatactcaaaaagaaattgtccttgtatgattcatcataaataaagcgaacacaccaaggataatttctcctcaagtatgaaacagcagcacggaccaccacctccaggtctttggctcaaggttagatggtgactgcttcgtggcaaacccagtcacacactcgctcatgcacacacaccacgcacacacaggcatgcacaatgcatgcaccaagtttgacctctctttaagcaccagggaagcaagatgccatagaatcctcactcagcttggcatcctcgctcaagactccttcaaagcgtagatagtggccgaggtcaagaacccagggactgtctctcttaagtggagcaaatgttctcggcacccctgctgacccccactgcatgtggcattctgtatcaaaagccactgtgtgaatggcttagctgccaagcatcaagagcatcactagcccccattgtaaacaccgtgtatgctctgggcttcctagtccattccatacccgatgaaggacttgacttccatgttttgacactgttccaaaaacccatggagagattttagtcataaaaccaccaccaccaccaccaccaccaccaccaatgatagtttcacagcacacaagggtcctggctaccacctacgaagtgccgaccacggggctctgctctgagccgtgtacaagtcttaactcgttcagccccagcagccccaagaaatggacgccaatgtgattcccctttgacatgtgagacaatgggcacagcacgatgagatccttgcccaaggttggacggttagtaaatgtcagaggtgggatccaaacacaggaaatcgagctccagagtctgcgctcttgatactgaaaaagtggatgaccctgtacgattcgacatgagcaaaacgaacaggacagggataaccactctccaagtaccaaaggttagcacggaaaagaaagccactgccttgggtggacttggtacgtcttcaaggcgcggtcctggggatgaattagatgctgagggttagtggaccgggtcacataccccaagcagaacatgcacactcacggaccgagtaacagcagggaccacaaagccactaccccacacgagcgccaccccagccatcggcccgggctgatgacttcccgctcaggaagcagggacccagaccacacacatcgtgcatgcttttggccccgcccacactgcaccaggagaggggatgtcccagaggccactgccttccctaaagtcatccaggtgcccgtgaagtcctctctgtgaagtggggacccgtgaacgatttgccacacacaaaacggatacacacggtcatgcacacacataccgcatcccttgctgagtgtggactgggtccaagacaaggtttgatactcacagagagcttgcccttgtatattccatgtcaataaaccgaatatacaaagggcaacctcgctttaagtaccaaacaatagcactgggcaggttcctcactatcattcacggggccggcctcctctcccggggttcatcctggcgggggagggggtgggagatgcgggatcagcagaccaggtggcaaacaccacctgccagctgtgtgcccataggtcagctctccatcccaaaggggccaggaaggggcagacgccagtgccccttcaccagaatcagcctcttttccaggcatcactccagattagaacttgttcctgaaaaggagatccaccccacgggccttcctgggcacacgcagagctcagcttctcactttctataggaattccctggggtgggaccaccatctccttcccagtgtgggcacctctccaggaagttttcctaaggatgcactcagcaccgaggtcccaggcactggatgaatttacaccttagacaaagcaaaggccctgtggtcaccatcccttcatccatctcacagagccgttgacaccagtgtcattctccatgccagcccttgccccacccctgccagaggctggcatcgtggccatgaagccatgctaagaaagagcacagggtcaacagtagtaaaccccacg

SEQ ID NO: 1885702 - DNA, 4001 bp, Homo sapiens
gctcgtgtcttgtgtgtcatgatttctgtgaatgcaacacaggccacctctcctcaggcaccacaaggagcagcacacgcacacggccacccaaggcaccagctcccacccagggtctcacagcactgagatgagcagaaggcagcccaggtgcagggaatgcatgcagccgcccccaacatcctggcgaggggtgggtggccttccagcaggatgccttccagcgggactagctcccccgtgtcctctgcctcgatgacactggccatgaaaaacagactgagccccgtcaccattgctcatcagcttcatgaccgccccccaccacagtgcacaaccctagcatcttccccaaagtccacatggccccccgaaagctctcccaaaatgattcaatggcgggggtcaggggaaaggatgacaaatgtcacaccagcccatgcattcacgtaccctggaaagtcccgcctcaggcgtggcgcccgcacaccaccgggcggtagcggtactgaaaacaggccatctgtgttatattcgtcattaataaaagcgaactcatcacagacaacctcttctcaggtacccagagtgccatcggctcaagaacgtggctgccgcgtcccgtggtgccagcgctgcccccgggaagcagtcctgaggacggatgggacatcaaaggtgagaagacacagagacaggaaagagacccctgcccggcccactctcggtgaccaggccccactgaggcagcgactccaaagcacccgtcctgctcctaccctcaaaagggcttcatctccaacgggtcctccaaggtgagatttgatactgagaaaagatcaaccatgtattattcgaagtcaataaagcgaatataacacggtcgatctcccttcaagtaccaggaaaggcgctgagctgaagcgcgatcggctccccggcccgcaggccccacaggctgcagcggatacggacggctagtggaccaggtgaagtacattagaaacaattactttccaactggtcgaccatccatccccgtaccccagaatggtgctgatgccggcgtccttccccgaggtgccccagcctccaagacggcctccctggtggaatttgataccgaaaaggggttcaccgagcaacattcgtcgtccagatgcaaagttgctcgggtaacctctccccgagtaccatggagaggctcagatgctcggactaaggtgaatgcttgcaggcggctgtgcttgcagaagaccctcccccaagggcagcacaaggtctgggcattcagagcccagagcctcacactctccaaggacgttcccaatcaccaagtccaacgattccaaccccttccagaatgaatctagagactcttcccagaagttgagtgcaagacccaggtaggatcttatactgaaaagacggcaaccttccttgggcaccttgctaaagatgaaaatgaaaccctgctcgcacccgcttttcattcccagaccctgagagggggtgaccctgtagggacccctgcacaagcacagagcctccctcccagcagaggattcctttggcgggagctcaacggggcacaacgctgaccccagacctgcggtctcaccagcaccatctccagcccacagaggcatcaccccaggatccctcaaagagtaacttcacagttatcaacagctggctgaccatctgattagcctcataaagcaagtgagacattcaaaataagggactggggggataaatgcagcagaagaaagcaggtgagtcacagatgtcttctcttcacaagggtcagggcagccctgacctcagaacccaaccttccccagactcagagaacacccagaaggtgcctcctggagcgggcagccagcaagcatcgggccagacgatggatgccacaagcagagtccagattctgtgcccaccacccattctgtgaactttggagtgggaccgacagcagaatcctttccctgacgttggcatgagctcagagagccctctgcgccttgctacaagtggagcaagaggccagccatgcgaggcctgctgtaaagaaagaaaagatgtcacagacgacttcccttcaggagccatgggcactgacctgcatcagagcctccttcctggggcaggcatcacctcccaaggtggtcccggaacgcaccggagtcagcaggagtggaacagatgacatgcaccgtgggtacaatcgggcctgtcccatgggcggccctcaggcacctgccctggagagggctccggctgcaggccgcctcctgagggtgctgttgcttctggaaattctccaggtagggtttgatctgaaaagaaagccatgtgcaatgctggtcaccaacaaagcaggccagcaaacaacgagctctttccacagccccagcaaggtttttgaccttggaaacatcaactccagaatgactttcagcctctatgaccaaatgacattcggcaccaacgaagggcacgtccttggggccagcatggaaccatgtaaggtatcaacagcagagtctgaggaaggactgaaccccagaatgttcctggatgcctgtgtgttcatcaatagccttggaagtgtgaaaggaaagttatctcgggcccctaaaatcactaaggaaaactcaagctggaagctgctcaggataaacctgcctctcattccattcaaagtcatccctctgctcactgagacagatgcgtatctgatttgcctcctttggaaaggctcatgagaaacgcgaaagaatgtaatcatttgtgtatcacctgtctgtgacctggaagctccctccttcctgccttcgcttcaagttgtcccacctttgcagacaaaaccaatgtacttcttacatgtgctgaatgatgtctcatgtctccctaaaatgtataaagccaagctgtgccttgaccacagtacttcctgaagctgtgttacgggtgtatcctcaaccttgtcaaaataaactttctaaattaactaagagctgtctcagattttctgagttcacagaagcaactgtcctgaaagaccagaccccactgaccgtagaacttctgcttccctccggagtcagcgtctcacccagaaccctccgtggggatggagggagaccaggtgatgcctgtcacttacgtatgaatgctctggggacaacatgcacccagatccccgggaggacgccttaccagtgtgtcacgcctgaagtcagcacacctttccgggaagctctcgggaaggtttggggcagcaagaaaagatcaactgcataaagggggagactgtatcccattttttgaccctaggttcctactgaccccaccaactccactgtaaacacgcacaaatgtaaccaccttcacaagaattgtaccaacactgatattcatagaaacgtgtttttcagagccaatgccattatactaatccaattccctgtttagctttcctgaccgcgctgttgagctgttttcatttctcttatttcccttgttattttccccaaatcattttcattaggatcaattttttccatttaaaaatctgcatgaagatttgattcctcaatgtgttcttgtctacatcaaatatcactgtttatcaccgccgccaccgtgaatttccttccatggctgccacgtcggcagcttgctatttccccaggtcaaatgtcacagctgaaatgttgtcaagaaaattggattcctctgccaatttgtagtcaactgaacacatttagcactgtgccgtttcagctgtttttagttttattttgtgttgattatttttatcagtattatttaatacaaatgggatgagatactgatagcctctatttgtttcataacccaggagaaaattgggaacaatgtttggttgggggatagaaagagaaagatagagacaaggaaaggtgcagaaagaagcacagtgcttgtgagctagacgggggtctggggct

SEQ ID NO: 1885703 - DNA, 4001 bp, Homo sapiens
gaggactgagcatggtccctgagcccaccaacacacaaagtcaccgaggggctgccaggacaaatcctccatgtacataccaagagaggtagtgacaccaggtcccatgctcagggtcccgtcggggatggaggcacttcaaggagatatttgataccgaaaaagaagtgcaccatgtttgtttcgtcacatataaagcgaaaataacatgggcaacttcttttcaggtaccagagatgagcacgtcctccctgccagaggcacacctgggcgtgaagggacactgagggtcagggcgtgagggcagggccgggcagacgctgccaatcaaacttatgctcaattaagcctaaaagcatcaggtaagttggctcaccccaggggaggtgggggacatgcttcgaagggctgggctgacactgagcagaggcggacagtcatcacggataaagcaaaccgatcccagactccctctacttcgggatcccaggaagtcttcatgggcagaattcaataatcagggcagacggctttcggaatgtttactatcaaccctgcaaatgctcatggagagcatcacttcagagaaaatgggatggtcctggacccaaaaatagaatctcctccatgagcccatggttccaggaaggagatgggaagacaaagatatcgaatcaggagaaacaaaccaccaaggcagccccggctctcggtggacccatctctctgtgcaccttgcatggtgctgaccactgcacctcctctctaaagtgctccgggttccctggaggcatggcttggttctaaaacactgacagttaagtgtgagttgtgacaaatacagccaacccacagagagccaaaggacagcaggggccaggaaaggacaacggcttccccaagtccacatcacttgcagggcagcctcccagagagaggtggattcgagggagagtgaatcggggcagaagttctggggcccaccatccatcaggccttccagagaggacccagtgacccattgctggacacaaaacacggtaattgtgcatcatttgtcaaccataaattaaatcactaagacaaagctttgaaagcataagtccataagaaaagtcaccttccaccaaaaccctgccttaaataggacactgaagatagataggcaaaccgtgagaaacacatcattgaaaaaaatgcaggctttcccagtcacactggaaaacacactgtggtatcatctgtttgtattgcaagtaagataagatctaactccaactggcttaaacaagtaagggatttatagacgtatataactaaaaagtacagagacagagcaagcttcaggcagggtttgatctagggactcaaatgatatcatccaggctcttctctaggtctccaagatgcctttcatggtacagactccctctgctgtgtctgcgtggcaccaagccctctcctctcagtccttaaacggctgtgggaccttcgaagctcacgtcaaagttcactgtctattcccagctgaatggaatagacagtgtctactctggcagctatcacaggaaagggagaaacagtttctttcccagaagctgcagcaagcatctccttgcctatcactggcccagtggggtcatgggcctattccggaagcaattgcagtggcaaaggagaagagatcaagagattcgcttaagcctgggctggtggaggaagtggggcagggtcaatgcaatcaaagcacacggcgggaagacgggagctttcataaaaaaaaaaaaaaaaaaaaaaaacaaggagaaatttaggaaggagaaaagacatggggtagggaggtcctgatcagcgtccactacaggggcccatgtgccttccctgaagttgcacccaaaccaagacgtcttcaaggcagaataggatactgaaaaagaagtgcaccgcgaatgtttcgtcacaaataaagcgaaaaaaacacgggcaacttctcattaagtaccgcacgtcagcaccgttgacaacactgcttctccgcggctggtatcactcctgcgggcttcctgagagcacatgggtcctgatgcgcaccgggcaaccggtgacaaagatatggccgtgcatacaaccccctcaagacctgggagacatctaacaggtctgccccctctgcacaggtggcattgtgtcctggagctgcttgtgagcacgatgtgttcaatttctcaataacaaaaagtctcctccagtagcacagaatatgacaatggcacagaaacagtgattttgcatcctaaaagtcctcctgaggatacatgaggagggaccaggagagtcacaataactccccagataagatggatgagatctaccacccaccctttagggacaaacagcaaagtgtctgccctgatggagcctctgagccaagggagtcgtcatagaatgggtagcgcaagggattttttaacatttgcctcaaacagatggaatgaccaggggtcctggcacagcgtcaccactgtcgatcagcctgagccggagaagagcccccggggcagaccggaagctgcgggttagggagggatgaatgagcaatgaataaaacccaagttctcaggtggtccacgtggacaactgacttggtggtggcaaatcctcaccggttcctgcattcacacctcaccacaaccccctcccgggtggagtgggcctccccgccccttgccttgggttcggccgtgtaattgttctggtcaatgatctgtgggtagaaatatagcagttcccagccttggccttaaggagtttctgcgtttctaattactttcttgtgcctctgccgtagccatgggagcataccaaggccggggtgagagctgtgggtcccaacttcagccctcagggcaggccttctctccacaagccatcctaggtatgggagggagactgaggatgaacggaccaagacacacacccgaaatagaatgtctgctctcagacaagatgtccactcccatacctctccatggacctgacgccaacagccctcccctgaagcgcgtgtcacagccgggacacatcttccgcagtctgacactgagggcatccagggcatctggggcctcgtaaggcaagcagagctgaacaacagacagagatgagcaacggcaacaaagccctttccccaagcatggactgaacgctgcccacgaagcggctggattctgagtggtcccaacacaggaagggctcatctcaatcacgctgccagctcctcagtcccccatccacgactcaccaggagtgctgctgacaccagtggccctgccggaatctagcttcatgtccaggaagtcctcctatggaaaagagatgggccacgtagcattcatcaaacacatggcaagctttgtcagacagcctctcttcatgtagcacagaataaagtggccctcactaccacagctgtcccaacgcctgccctgtcctgcacacacacaacactcctcaaacccttccgaggataaaccacacccctgtaccaggtcacacacacacctcctgcagtcagcatgtggtgtggggtgggactttccctgatggggcactgaagcccaggcctctgcaatcctggcattgtctgtggccagactatcagccctcctgggcaggatttgaaaccaaaagagagattattcactgatgattgcttatattgattttaacgaggtaggaggagggggccccgaagggaaacccctcctaaaatcctgcagagtcccacgggccccacgtcctcccacatcttctccgaagttgccatgtgcaccaagatgtcatcccacagatggaccgggcgctggtggatagtcaaacgggtgacctacatcgtaaatgaagtgcacgtcaccggtctaccatcccctcagctaccctggagagcagatggcaccatcgtcccttcaatgacgttgctagcgtgtccagaaggccatcca

SEQ ID NO: 1885704 - DNA, 4001 bp, Homo sapiens
aagcctcacagtcatggtggaaagcaaggagaagcaagtcaggtcttacgtggatggcagcaggcaaacagagaccttgtgcagggaaactctgccttataaaaccatcagctctcatgagacccattcactatcacaagaacagcaagggaaagacccactcccctgattcaattacctcccaccaggaccctcccacaacacaaaggaattcaaaatgagatttgagtggagacacagccaaactatatcatccaccaaacgggggatcaaggacagcctcccttctccataaccaggggacacgctggagtccgtgttctcctctcaaaccaggtgctgtgtgcaggaagccctccaaggcagcatcacagagccgaagattcattagctgcatggtctccatcgggaaggagtgaagggaacctggcaccgtgccagtgtctatgagcaccaagcaatggaccaggagaccccaccaggtcggctggcagagggaagctgacctgaggaggaagtggcactgggccagtgacctgggtgaggagtgggaacacagcccaagtcggcctgcccttcacacacccacagaggtgctggacttcatccagggagccaccctgagaggaaaacaggctgtcctcaaaggagtccgcatggaggagttaacctctcctcaagtgtcccagtggagtggtaaaccttgtccttgcccccagggacccaccctgaaaagcactgggtccaggaagggacctagccctgtggctaagccacagacccagccactgggggaaggcacaagttggcattcaaagaggagggaacctcacataactcgcaaaaacacatcgcattcacagcaaacacagcaaagcaacccagggctcttccctccaccagcctcacttccaggaagcttccctcacgcagcacggagccggggcaggggctctcagctcacacaaggcacacactctcacgtctcctgtgggggcggccctccgaggcagagtctgatattcaaaaagaggttaaccatgtattattcatgatgaatgaagcgaacataacacggataacctctcctcaaatatccttgcatagttctgaaacgaaaaccatggcctcttccccaccgttgtctttgcttccagaagattcttcttgggatgagctgaatcccagggttggggcagggaggtgttcacatcctgcaaagaaagcacacgtactggcattgaccttccattcccgtacctcagtctcagggcccaggcagccctggcaccaaagtcaaaaccctgacattggaaccatgctcagaaagacttctaaggcaggttccattaaaaatatatgaaagcttcctccacggattcctgaaagacgggatttgatgacgagaaccagcagaatgcatgtcagagataagcaaagccatcatgaagaattctgtttccgataaaatggggtgtcactgatccctgaagacagggtccctaccgcagagatggtctcagttcctggaatttcctcccgatgactgcttggaaacggagggtcacagaattccagggcccagcacatcaataatgaataagcgtgccgttgacctgcacccgacaatcttgcagcagcttgacaccggcggcccctccctgaagcaggtcttgtatctgggaagccctttgaggcatgatttgattttaaagaaaagtaatctcatgctatttacgcatgtgaaagtgaacccttgttcacaaaccaaaacatggcacgttgattctgggccgttctcccacgatggacggtatatggcatgtggggagacaggcgacacatatcacagggaaagcacctggtctccagccccaaaccactgtgagtgttgtccacagaccggcggtattagcatcacttgagaacttgctaaaaatgcagaatcttggtccctgaatcagaatctgctttttaacaagatccctaggtgatgaaaatcttaggagcatttttaaagtttgagaaacactactctagccaactattcatatgcacacgcacacaaacacacacacacacacacacacaccccagaggtgctgtcgaccacaacgtcttattccatgagagtctgtctaagatggggtggttcccaaggaaggcacgaagccatgccacgtccaccaagaataatccaaatacccaacaggcagctgcttaggagctgccaaaaagtagtaatagtaacaggaaatgtacggagtttttactaatgtttgcattccctacaggaagtgtttcatactcagaatgaaggctacagataggagaggctggacccaggttccccggtccaccatctacctagagagaggcttgaccccggcatctctccaaggaattcctcgtggctaagatttaataacaagaagagaaagagagatgaaataattgtgaacatcttccaataaaaagatatggcaccaagcccctaaatggcatctccaccccaaagctagcatttgtccaaggaaatcacactggtggcttgcattctgagatcactggattcatcattataaatcatcaacacagtcacactccatggtggggcaggcaccaatgtcccctcactgaagtcagcactgtgctttcaaaaacttctgaagcaaatttggatactaaaacaatggttgtccgatattaatcatcataaatatagagaccatactacggacagccattctttaagcaccaaagaactgtgccatcaagaagagctgggcatcttctccaaagttggtgtctcttccagaaagttcttctcaggtagtccaaacaatgaggattagcaggtcagcttcacacattgagagtcaagcccatgcctgggggtcagtcacactcttgggcaggggaagggggtctggccccaatgatcggtccctaaggtttgcttcatgtccaagaagtgcctccaagaagcaggatttgataagtagcttgaatgctgcgtcacccacaacacacacccatggccaatgcaaatccctgatagcaccaaggagtcccgtggccccctgccaagcgtggccccgcctccagggttctgaggttagggcacaagtgtccccaccacaaaccaactgcatgcgccctcatccccacccaggcgtgagcccctgggaagggctgatgcgtgcatccctttacagaacttgtcatggcgtccaggaagtctgccgaggcaagatttgatactcaaaaagaaattgtccttgtatgattcatcataaataaagcgaacacaccaaggataatttctcctcaagtatgaaacagcagcacggaccaccacctccaggtctttggctcaaggttagatggtgactgcttcgtggcaaacccagtcacacactcgctcatgcacacacaccacgcacacacaggcatgcacaatgcatgcaccaagtttgacctctctttaagcaccagggaagcaagatgccatagaatcctcactcagcttggcatcctcgctcaagactccttcaaagcgtagatagtggccgaggtcaagaacccagggactgtctctcttaagtggagcaaatgttctcggcacccctgctgacccccactgcatgtggcattctgtatcaaaagccactgtgtgaatggcttagctgccaagcatcaagagcatcactagcccccattgtaaacaccgtgtatgctctgggcttcctagtccattccatacccgatgaaggacttgacttccatgttttgacactgttccaaaaacccatggagagattttagtcataaaaccaccaccaccaccaccaccaccaccaccaatgatagtttcacagcacacaagggtcctggctaccacctacgaagtgccgaccacggggctctgctctgagccgtgtacaagtcttaactcgttcagccccagcagccccaagaaatggacgccaatgtgattc

SEQ ID NO: 1885705 - DNA, 4001 bp, Homo sapiens
aagcactgcccaaggtgccctggcatctagtagagcaagaagatcaggtgtcagctttgcaaacattcttctctctgtttaggctaccacgtcctattgaaatctcaatgggtgcatatttgctgtgagtgattaaaacttccatggggctagacaatgaaaatagtccattaatctgcttagattatgacaaagattcttttttgtgggggttattttataggtagtcataaaacagaccaatgaatgggatgaagaaatagaaaatttgaaacagatcttaaataattattcagctcagttctcccttgaacatatgtcaccagaccaagctgacaagctgccacaactacaggtatgtttctttcattcataaaggtatgtttcatttgtccatcagtgcatttatttaatacttactaagcctttggtgtctaggagcctttctagtggtgcagtgtaacacctgtttctctgtaacaattgaaggtatttctgtgtgtgtttactttccatccctatttcataaaatagatgattatataattatcattactaaaaagtgacaaaattatagcccctgatgtttgatcaagagaagccttatctgtttgtagcctgggcagtcctaatcccagaaactgagccagggctgccgcatctccttctttaatggagggctttttaagtgcccatggcctcagcttgaagcattttgatgtgaatttgctctggtaccaaagaacctgatataacacacaggatatttggacaacctgactttctgggatagagtcaggcagtgtaggcaggctgggcttcagcagtgaagaccctgaatactattgtaatgaagaattccatattctaagcagtattgccatactgacatattgccatatgtcagaattaacagtgtcctgtgggccgggcgcggtggctcacgcctgtaatcccagcactttgggaggccgaggcgggcagatcacaaggtcaggagatcgagaccatcctggctaacacggtgaaaccctgtctctactaaaaatacaaaaaaaattagctgggtgtgttggtgggcgcctgtagtcccagctagtcgggaggctgaggcaggagaatggagtgaacctgggaggcagagcttgcagtgagccgagatcgcgccactgcactccagcctgggtgacagagtgagactccgtctcaaaaaaattaaaaaaaataaaaaataaaaaaacagtgtcctgtggattcagttacaatggtttgcatgttaaccatctgttgctaggttttttcagtctttgtttttgaagtagcatttctataataaaaaacaacaacaacaaaaaaacgtgattgtatgctaagggtaatagagagctgcttttttttcttgccatcaaattgatacaggcaagcaattaatatggtactcaaaagaagattacactactcgccagctgtgagacctggggcaagtgatttgacatctacagtgaagtacaggagagtgcaagatgacacagctgttaaatggtggatcaataattcccactcagtaatgaagactcagtattgtaaaaatattagatttccccttatgctaaaaaatcaaggaccccagagagcttttgtttatatgaattatatccattgataactaaattaaaactcagaaatgtaaaaacattcatttagtttttaagcaacaataataaacccactacatattaataggaataactatttttattttcttttttttagagatgaggtctcactgtgttacccaggctgtagtagaagtaacatttttttaaagtagttatattttctaaaacaaatagtaatgagaagagtgacattgttttatgtatttgtaatctctttaatatctggcttaatattaggtcagtgcaaaagtaattccagtttttaccattaaaagtaatgacaaaaaccgcgattacttttgcacccacctaatggacagatgtgggtgctgcaaatgtttctgcatttgatctgctgaagcatgtagttttgttttaagtataggaagacaatccagcctctcaaagacatgcacttggaagatggaggaatattttaatagtccttttgaataattgtggacatttttctttgaaactatactaaaacccaacaagtgcaaagtatgtattaattgtaaaacggaatctaaacccatgtcaatgaactttatacgtttttacattaaaatttactggcctactttgtacttcgaatggatcttctaacaatgcatgattttataacatcacgctcgatcacttggaaaatcctgattagctgagttaggccgatcttccaaatgttgacacattgtcaatatttctttaaatcatagttgttaatattaacacttatctcttcagaaaaaatcttttagtatttaaggaaagcaatacagtttatcagctggctttttttcacgtaaaaatagtgttctgtgaataaaaaggatagttcagcttacaactcaaacagtagcataagtgctttttctcaaccattggcccttggtatgcagcagaagtgccatatgcatactttccattttttcacaaagaatactaaaaatacatactgctgtggtttgaatgttttttcctcccaaaaaatgttgcctcccctccccccaacatttttgttcatgttgaaacttaatcaccaacacagcagtatcgggaggtgtggcctttgggaggtgattgagtcatgagggctcttccctcatgaatgggattaggtgccctcagaaaagggcttgagggagggagtccacccatttttgcccttctgctttgtgccgtgtgagaacacgacaaatctccctttaggaagatgtagtcttcaatgcgccatcttggaaacagagaacagccctcaccagacaccaaacgtaccaatactttgatcctggacttcccagtctccagaactgtgagaaataaatttctgttctttataagttacccagtcacagatattctgttacggcagcacaaataaactaagacacatatttttatcaaggacattcttaaggaaaatggaattttttttactataaatacatcaaagtgaagaacccagtaacaacgaatatacttggtgttcctgccttgattcatattaggtgccggtagttttacccaccattgctttcatgccatcagtgcaaatgtcagtatggtgtaaaaggcaaataacattttagtattatgaaaatgatctggacctcatggactgtggccaggggtctgcagatgctgctttgagagcagctgctccatgtaggactgtgcctctactctgtttgtgttatcctagtggctgtagtattgctcttgtcaggaggcagtgtacctctgaagtttagtgtttattgaaagtggaacacaaaatgcagccaactcagatttaagtcaaacagttgttatttcccaaaagcaatcacagaaattttgacttcagacagaataggggtattggcatagaaatgtgtgcagtacagccaggagaaagcccaggcctgtgctctgctgtgtgctagttgcagctttggacaaatcaccttctttctctggcctttagaactctctcttgcaggtggagacagattacgtttctctgttttgtaagaaaattattgcttctatgactatctgtaggatgggtggatggatgaactgacagcaagaaaggaagacataacaaggaaagaataggggtctaaggaatatattaggaacaaatttcaaacacatgaaggttttctaaaaaggagcaggctgcttctgatgcagtactcacttcaggagctcaggcaagttgaatgacatctctcagaggtgctagagaggaggatgttagtgtatttgtcacctgctgtttcttccaaagctaagaatctataatcctatagtcatctcagacatacagtgggc

SEQ ID NO: 1885706 - DNA, 4001 bp, Homo sapiens
aaatggaagaccagagaggaggctgtaaactttttaatgacctaattcttacatcacacactttcacttcaacaatattctatctgtcatatatgtaagtcctattaattgtgggatggaattagataggagtgtgaataccaggagccaatgtttactaggaaaatattgaatgttggttactacagagactatggtggatttgtatcatgccaaatgaactaaactggaattgcattccccagaattcccctccaagcatagttctttggtattagtccattttcacactgacgataaagacatacctgagactaggcaatttacaaaagaaagaagtttaacatggacctacagttccatgtggctggggaagcctcacaatcacggcagaaggagcaagtcatgtcttacatggatggctgcaggcaaagaaagagagcacttgtgcagggaaactcccccttgtaataccatcagatctcatgagacccacccaacaccatgggaaagacctgcccccgtgatccagttactttccaccaggtccctcacgtaacactcgggaattcaagataagatttgggtggggacacagccaaaccatatcatctttgttagtgagggccatgagagatattttgtatgagagttggaaggatgaaatgaaacagcatctatattctttttattttcagaaagtcagcactgggcacatggcactgttgtagctcacacaggtgtcatttatctgtgggatcacattgttggagtagggcagtagctgggccctcagaaatgccacagctgccagacacccactttcaatcactctgactttcagtgaggtatggtttagctcatagcagctcctcctgcagattaccccaactttaaagttggacacatggaagcagggttgcaactctgtcctgatagattcgggtttattcttgcaggtaccagtttgtctcgcttccctcattttacgtccattttatctttcagactgtgtgcgctgatgactttaggctcagcactagacacagaaacaatagtttcacaaagacttttcaacagtttccacaaatatataaggcaaatccctattacaaatcccttattatacacaaatctggtggtactgcttctcagatcagactctgacatagagactataaaataagtagctttaaattgaatgaagcaggaaagaggaaatcaattactataagagataaggtgacataaaaagcagatatatttgaaaagaggccaaatagaagttataaaatgaaaaatatattaaataagaaaaaccttctaatatatagatttatatatatataatatatataaatcctgaacaggatatgggtggctttgacaaaattccacataaacagtagttcagataagatagatgtttatttctctttcttttttttttttttttttgagacagagtctcgctcgtcgcccaggctggagtgcagtgatgcatcttggctcactgcaagctccgccttccgggttcacgccattctcctgcctcagcctccggagtagctgggactacaggtgcccgacaccacgcccagctaattttttgtacttttgttagagacggggtttcaccgtgttagccaggatggtctcgacctcctgacctcatgatccgcctgcctctgcctcccaaagtgctgggattacaggcgtgagccaccacgcccggcctatttctctttcataaattgtaagcatttcaggacttcgatgatagataagacatttccacattgtcaacaaaccagatcctttattgtaacttcctcaattagctttttaatcagagtccagcttggatgctccacatctgccatgtctgcacccccacagtgaaggtgttactaggttggtgcaaaagtaatcacggtttttgccactgagagtaatggcaaaaacagtgattacttttgcaccaacctaatagtttaggctgctgtcacaaactactataggctggtggcttaaacaacaaacagttgtttctcatagtgctggaggctaggaagttcaagataaaggtgctggcagattatgtgtctgttgaggctcacttcttggtttatagactaccaagatcttattttcatatgaagggaagagagctagctactctatggcctcttctcataagagcactaatcccatccatgagagcactaacagtattacttcatcgactctgaaaggtaccacctccaaacactatcacattgagatgagggattacggtttcaacatatgaatttagggggccacaaacatacattccattgtagtgggaaagaagaatgggaagacctactcttttccttttaaaactgtgatccaaatgttgtacatcaatttcacgtatataccatttaactgacccaaagtagctgcaaaaagtgctgaaaaatgttatatttaggtaaatggacacatattcagctaaaaatagcattactacacgaaatatatggatattgagaaagcaaataatagactccgacacgatgattaaaaagcagataattctcaacaggcaattaacagagagaaagagctgaggattttacagttactaaaagcaagtttaagagataaataagataatagattaaaatgggatagattcaatgaaagaataagagggaatgagatggtaatgatgattttttcaaaatcaatagcatgaacctaatatttgagaagcacactggatctgctgcaaaataagatgaaattacacacacacgcacagacacacacacacacatacacacacacacacacacacacacacacacagtgctaaaaccaaaaccaaacacccaagacataaagatcttcagaatcaacataaataacttatgaggaaaactactagcttctttataaaatctacatttcaatgcactgctgtggttgcagggaaataagtaaatctccaagcaccccttaaataaacaacctaataaacatgcaaaaaatgacctgaatcctgagatagaatcaaagaacagtgcgctacctgcaagacacaaatgggaaagttggagctagcctgagacaagtgttgaaattagcattgtgttccagagactaagcttgagggagctgatcctggaaacctggcattatgtcagcaagcctggtcccaggtcttactacatcaaactcctagcagagataatttcaaattctaccctggagaaaaagttgaccctaggatacctaaagattaagattaaagaaatcaagccatggtgagtgagacagcagaaacaacaaatagcaaacatctaattaagactcccaatggcttcagatatagaaattatcagaaattgaatgtaaaatgctatatatgaaatgtttaaataaataataggtgaaattacaaaatcagtaaacacgaaaatgtcaagaatgaacagacacagaattttacttctggccatgctgattaacagagacaggagctttcctaacattataaatatctggaaaacttggaaaatgtatgagtcaaattctttcagatataggagattaggcaatttaggattatggtccaagggaagtggaaacaaagtgagctctattaactgcctggaactactttccaacctgtggtgcagagggggtcactagcatgatctcactgagttgagtaaacagagatcagagttagggaagactgacttacctggaatattgaatgtgtaggacacattaccagtgagaaggaaagtaggtgaaggaggagctccaggaatatgcacaggggtctccttgagaatgttctaggtactaagttgtacatgcatgggaaaagtcaaagggctgggagctttaagctgaaggactcccagagctcaggtagggcggggaaatgtttacttctgaaccaaccagaatagattgaacatctacaacattcagtggaa

SEQ ID NO: 1885707 - DNA, 4001 bp, Homo sapiens
tcgctccctaattcccgctctctgccccctacagaaaacccctaaaggtctcgacccctcttaagcccctccaccccggggagccttcccctgcagactccacgcttctgcgcggccttttgaccccatttcgcatgaaatctgcagagcgaccgccccaaggaccagcgagcgctaatcagatccgtctgtgtctgcagagcttcacctgaggcctgggtccccgagggcggatgagcgggccggctctcgggcccgggctgggggacccgcagtccgcggtcggcggggatggggaggggtggccgcctgccgcgcggctcccgcgggccgtcgccaggtgcacggtccccctggtcccccgcagggaggacgccccctggtgcccccgccgccgccgggcctgggagctccagagcgggcgggaggcggggtcggcggggctggatcttgacgccagtccaaggccgggtgactactggggtctgcccgcgccgcggacgcgccgagccctctcagtgtggcgctgcccggcggcgaggggggtgtggaacgaagcacggtcaagacagaaaacaaagtcagcaggtcacctggcaggttctgggcgaattatgcaacgaaagcaggggaatgtttgatgcgtcccactccacacccccccaaccttttttttttttttttaagctcctaggaagccggttccagtttaagggttgggtagggatcgaccaagcagctcctctgatgtggttacgactttgccgaactcctcaagggcgagcttccctccccatctttctttcagtaataggaacattactctggagaaaaaaaaaaaaaaaaaacatgaatggggtgaaatggtaggcttgatccaaaagcaacgccgagaatcaccctacgacttccgtcaggtactgaactgaatattaggcaaaaatagtaaatgccgaaacctaaatcacacacatccaattttttttattttttttttaatctccccgggtctcaggactaagctttcaaacagaatttaaagagttaacgctggccatagctctttgttttccatgctaacatttgtggcattaggactattttgttaactaggtatatgcaattcacagaatttcacggtaaattccccagaccaaatatttggctgaacaaataaacaacattatccattcctgaaaataagccagtaggagcggggaggatggaggaaggggctggttgctagaactggacagccacagggctcagtactggccctaggataatttgttcaagtactggagatctactggttccttttcaatgacatcgacgtttcagaaagttgctagaaattgggcaaaacaaaatgaggctgcctgagggcaatctataaggggcttccctaaatgatttatttgagctccataccattaatcaaaggggcagcgacctggggggttggaggggtgggggaaggatccctttttgcggggagttttggaggaactgtgtagtcttgctgcctttgcctggggctctgatgtcttctctccacctgcgctctccggggagctggggttttggcaaccaccccgcttcaatttttattggtttccactaagctgctccttttggaggagtgtaggacttcagtaattaaaaacaaaaatgaatcctgcttcacccactccactcccaggagcgtatgtaagaaagtgtgtacaagaatgcaagggtgcacaccccacctagaaaaatgcaaacgccaggagtgtgcaccacacacattctttgggtgcacacaccaccagcaacagcaatactaccgctcatatctacaccttcatgatggagaaatgcgctatcagccttccccacagagaacatacaaagacactaaatgtttctgctccaaagggatccaaagggatcttggtctgtgctggctcacttcatatgtgtgaattttctcagcacacatatgaaatgagccagcacagaccaagattcaaggcttaatttagttgttggtggcaagtaagaaaaagcaaaggcctctcctctgctcctcttaatccctacacccgtcattccagaaaggcatttatctgcctgctgggagcccttaactgagggtacattagcatcctcctttttattaactttgtccaaaaattgagcttttccctttaagaaaccctagcacagaacatcagatctacctctttctgcccaagtccagggaagagggtgtgagggaggcagtacagagcgaaaaggagagttgacatttgactcgagatttctgtataatagtgggacaccttcacagtgcctgcttagaaattctgaccctttagtatctgaccccattgtcaacccccacccagcccaatctgttgggatcctaaacttgatgaaggccttcacattgggaaaagaggacaagggaaaaagtcaagaaacaatgggaaattctatcaagtggcatattaaaacagtagtcatcaaactttttgaaggtagggtacattatttgttacaaaaaaaaaaaaaaaagacaaaatagcagtgcatgcctgtaatcccaaagaggccgaaatgagaagattgcttgagcccaggagttcaagaccagcctggggcaacaaagagagaacttgtttcaaaaaaaaaaaaagacaaaagaaaaaacaaaagagtcctacctggagaaaaaaaaaataagtttaaaaacatgccttcacacacacattatgatgttagtgtacaaattagttttgatttggaaatatcacattggtacctgtaataactggagataccctgaggtatcatgaaagcagaggtgggtatcatttttctagggttgagacctcatcacgctcagctgtgatacacctcaacaggtgagtgaaacagaagatgtacaaggggcctgaaatgaagtctttaatctgacctacactcctttcatcccagtgtttctccaaggcatgtgtcatccagatgggagaggatactgcatccttgttaacattaaatagaaatagaaaacaattcatgctggcaattaccatctctctctgccaacagtttacttcctgtccctacaacttaaccacctccaggtaccaccttttgacttccatccagcctccaactcacctgaacagaaaaaagcctcattcaaaagagatgagcccgaaggaaaagagaaaggattaaggagaaaaaaaaaatcatgatttacctttaaaataatgactcattttatttttttcttttaatacgtagttataaatatattttgtcaaaatatatgatcaatatggtcaaaacatttgcacgtaaagtcataaataaggtcaaggtgaatgtttagggattttttccttttttttttttttttttaaataaaagtccagctataaggaagcagtctgtgtagtgtgtgggtgagtggatgggaacgtgtgtgtgtggtgtatgtggtgtgtgtgtgtggtgtgtatatctgtctatcctcaaggactgcctgatctcagcggcacccacatccctctactaccatctcctgataatttttcagtaccaccttatcatactcatccaggtacagcatggagatggcactcagttcagtgggcacacaacaggctttggggatactggaattgacagaattgaccagggtctgcacaatggcatggttggttgagttgaggtggtcagccagtggaaaggggcagtccccatggcagtagaaggcctggtagcctggtggggccacaatccagtcattccagcccacatcgctgaagtccacatagagcgagtggcgccggcagttcttattcttcttcctggcccgctgtgagtgatgcttagggctacgcttggccctccggcgtcgggtcaaggcatggccccggccatcatggccaaaggtgaccaggaggggccggagctgggcccaattcccactcccttgaggt

SEQ ID NO: 1885708 - DNA, 4001 bp, Homo sapiens
gagagtccaaggcaactagggactggggcagttccccagcacagcaaagcagctctgtgaagctgcagctagactgcctttccttatgggtcctggaccctatttctcctcactgggcagaatctcctgaccaagatttacaactaccctcgccagtatgttcaagctggcaacagatccatacctccctgggatggagctcccagagggagtgacacactgccatctttgctgttttgcagccttgattgttgataccttcaggtgctggaaaatctgaggtgattagaaactggagcagacctcctgcatattccagcagcccaatggaaaagtggccagacttttatatatgtttgttacatgttttctatatattacatgttttctatatgttacatgttttctacatgttacatgttttctatatgtttgttacatgagtccctgttcccgtatctcctcactgggcaggttctcccagcctgggtctccagcctttccccactggagctattgagccagtagcagttcttcagctctctgggacagagctcccagtgggaggggtgggttgccatctttgctgtctcacagccctcacccttcttgtctccaggctctagagagtccatggggacccggcactggtctgaacccccagcacagagcatccacctaatggaaaagtgtccatactgttctccacgcaggtcctggtcctcacttctcttcactgggcagagttaccaggcccaggactccagtgcaaccactctgcccctgcctgaccgcttcaatcagaggcagcccagcagttaagagaacacctaaatgcagagatgagaaagaaccaacacaagaactctgacaagtcagatgaccagagtgtcttatatcctccaaatgactacactagttcttcaacaaggattcttaaccagggttggctggaataacagaaagaaaattcagaatactgataggaacaaagatcattgaggttccagagaatggcaaaatccaatccgagaaaactaacaatcaaaataaaatgataccgaagctgacagataaaatagccagtataaaagaactcatctgatagagctgaaaaacaaactgcaagattttcacaatgcagtcacaagaattaacagcaaaatagaccaaactgaggaagaaatctcagaacttggaagactggctcttttaaacacgacagtcatatacagataaagaaaaaataatgaaaaggaacaaataaaacctctgagaaatatgggattatataaagaggcccaaactataaatcactggcatccctgaaagggattgggggaaagcaaacaacttggaaaacatatttcaggatatcttctgtgaaaactttcccaacctcactacagaggccaacagtcaaattcaggaaatacagagaacctctgcaagattctccataagaatatcatcaccaagatacacaatcagactttccagggtcaaaatgaaagaaggaatgttaaaagcagctagagagaaagggaaccccatcaggctagcagcagacctctcagcagaaaccctacaagcctgaagagattgggggcctatattcaacattctcaatgaagaaaatcttcaaccaagaatttcatatccagccaaactaaccttcctcagtgaagaagaaataagatccttttcagataagcaaatgctgagggagatcattaccaccagatctgctttacaagagatcttgaacgaagcactaaatatggaaagaccattaccagccaattaaaaaaaaacacaagtacagaggccagtgacactataaagcaaccacacaaacaagctggcataaaaaacagataacaatacaatgacagaatcaaatccacacatatcaataataatcttgaaggggtcttgcttctttaaccagcttgtcactctgtgccccatttaaaaagcatatagtaacaagctggataaagaagcaaggcccaatggtatgctgtcttcaagagacccatctcacatgcagtgacatccatatgctcaaaataaagggatggaggaaaatctaccaagcaaatggaaaacagaaaaaagcaggggttgcaatcccaatctcagacaaacagactttaaacaaacaaaaatcaaaaaagacaagagcgttacataatggtaaagggttcaattcaacaagaaaacctaactctcctaatacgtatgcacccaacacagggacacccagattcacaaagcaagttctcaagagacctgcaaagagacttagactccaacacaataatagtgggagacttcaacacttactgacagaactagacagatgatcaaggcagaaaattaacaaggatatttcagacccaaattcaacactggaccaaatggatctgatagatctccacagaactctccaccccaaaacaacagactatacattcttctcatcaccacatggcacatattgtaaagtcaaccacacagttggttatataacaattttcagcaaatgtaaaagaactgaaatcataccaaattcactcttggatagcagtgaaaatcaagactacaaaaaactcaaaacatgcagttacatggaaattaaacaacctgctcctgaatggcttttgggtaaataatgaaattaaggaagaaatcaagaaattctttgaaactaatgagaacaaagatacaacataccagaatctctgggacacagctaaggcagtgttaagagggaaatttatagcactaaattccaacttaatatcaaaagttagaatcatctcaaatgtataacctaaccctgcaactaaaagaactagagaagcaagagcaaaccaactccagagctagcagaagacaagaaataaccaaaatcagggctgaattgaaggagatcaagacattaaaagccatgaaaaaataagcaaatccaagagttggtgttttgaaaaacattaataaggtagtccactacctagactaataaagaagaaaagacagatccaaataaacacaatcagaaatgacaaatgggatgttaccattgaccccacagaaatacaaataactattacagactattatgaacacctctatgcacacatgcacacaaattagaaaacctagaagagataaataaattcctggacacatataccttctcaagactgaaccaggaagaaattgcttccctgaccagaccaataatgagctttgaaattgaatcagtaataaatagtctatcaaccaaaaagtccaggaccagatggattcacagctgcattctgccattaaaataaagaaagaagagctggtaccattcctactgaaactattccaacaaaatgagaagggactcctccccaactaattctgtgaggccagcatcatcctgaaaccaaaacctggcagagacacaacaaagaaaacttcagccccatatccttgatgaacactgaggcaaaaatcctcaacaaaatacttggaaactgaatccagcagcacatcaagaagttaatccaccatgatcaagaaggctttatccctgggatgcaaggttggttcaatatatgcaaatcaacaaatgtgattcatcacataaacagaactaaagacaaaaatcacattattagttcaatagatgcagaaaaacttttgataaaattcaacattcatttatgttaaaaactctcaataaactttgtattgaaggaacatacctcaaaataataagagccatctatgactaaaccacagccaacatcatacagaatggacaaaaccaggaagcattccccctgaaaactggcataagacgaggatgccctctctcaccacccctattcaacatagtattggatgtcctggccttagcactcaggcaagagaaagaaataaatggcattcaggtagtgtgatgccactagctttgttctttttacttatgacaaggctag

SEQ ID NO: 1885709 - DNA, 4001 bp, Homo sapiens
taggctcaacctatcctcctacctcagcctcctgagtagctgggaccacaggtgtgtgccagccccagctaattttcgtatttttggtagagacagggtttcaccatgttggccaggctggtcttgaactcctggcctcaagtgatccacctgcctcagcctcccaaagtgctgggattacaggcgtgagttaccactcccagccttagctgggtaattatgagaagcatctgcattttctttattgtgttggtgatgatctgcacatacccaaagaactaaaaataaatggcaggaagtctgacttctttgaagctgggtaaatatttattttcccaaagatcgaacctccttgatacggatgtaaagttacatgaaatgtgccttaggtctgcagactgtggtctatggctcgaatatacaggtggtcaggatttacactgaaactgttagctgtaaaattactgtctcccccaccgaaaaaaaaatttctgccccactcaccttgatccactgctggatcatggccagggcataaaagccactccggactgggcgcgtggctcacacctgtaatcccggcacccgaggtggccagatcacttgaagccaggagtttgagaccagcctggccaacagggtgaaaacccatctctactgaaaatacaaaaatcagctgggcatggttgtgcatgtctgtagtctcagctacttgggtggctgaggcacgagaatcacttaaacctgggagccaaaggttgcagtgagctgagatcgtgccactgcctgggcgacaaagtggtttttcctgtctcagagtgaaaaaaaaaaagagacactcccagtttgccctgatgctgccctgattctatttcacctccagccttgacacactgagcaaatgggctcccttccctaaggcctacttcctccatctggcaaatgggcaggagcaagagaaggcagggaaagaaggctaaatattgatcctaactcttgtagtgtcattaatccctgacaaagggcctcagagctcggcttgtctctaagcccacttttctccaatcagagggccaatattccaggaatagtcaagccatgggataaaaacggagcatcaacttttccttaaatcttttggggagaaatatgaatatactatggagtagaatgcaacatttagatgaacgtttttaaaagaaaaattcaactgaaaagagatttcccagctgtggctgctgctgtagatcaagctaaccaacttggggtccaagttcgtgcttctctggcttagaggatgctctgatcctccaggtcctgtgaggcaaatgtcatttcctgggggctcagcataggccagagacatttggtcaggaatgaagatgatttgtgacagacagcagaggtaaattcagtcctccaaggccctggcagtcttccttaatgcaccaggcactggtctccaagctcaagaccttttgcagtgagcccagtgaaccactgtgtgggcagtcacttacaaaggggaactccaagaaaaggaccctatgtcagctactccctcaaactcaggccgacttctccaatgggctcagtagacacagggccctgtggtggttaattttatgtgtcaacttgacctcccaggtgcttggctcaacattatttggggtatcccgtgagggtgtttctggctgggattactatttgaatcaatagactgagtgaagcagactgccctctccatggtgggcgggcctcatccaatctgttggaggtgaggcctgaatagaaccgaaaaagtggagtaagggaaaaatcaggctctctctacctgactgtcctttgagcgggacgtcagccttctcctgccttcgttctcggactggaactcacagcactggctctcctgagtctccagcttgccaagtgcggatcatgggacttctcagccttcagatacatatggggctgagacagtcccatgatctgcagttggctataaatatctatctccttcctattggttctgtctctctggaaattccagactaatataggccctctacttttaggggaccacgaaaatgttttaattttaatttcttttaaaattagaagaagatgactataatagtaatgaatacatacaaatgaatcaagtttggattcaatttgtctttatgccaatgtagtcacaaaatataatttttaatatatttttatggaagaatgggcccacagaggcataagtgcctaagcgccatgaaagccatgatgtggccctgctgacactctgcagcaccccatccttgagggttaggaggtcaacccactgaaccaaggggtacacattgcttccttgcacctgggagcctacgtgcacccgttggttcagtgggttggccagaatggtgtttctactgccttccactgaccttgaagaagaggttatttttggagctattgtcttgagttttatctattaatagaaaaattgtgtgtgtgtgtacttctacctagcggtccagaaggcagagtgaacgagaagcaggcctaagataaggaacagcttctccttccaaagaaggtgactaccaaggagcactcgtccctgcctccacaaccagttttcctctgtgtcctgtcctggttcttgtctaattaggttgacctctctctcctgtagaccaggaccaagcattcagtgagcatacatgacgtgtcagatactgttcagggacagcaaaggtaaacaacaggacacctgcagccttcagaggcaaacagccttgtaaacaagcagtcagagctgagtacaagtgctgtgggaagacacagcttaattctgcctggataccctgtgaagggtgtggaaggacgaacatgtgaccttagggaaaacaggcaggtgtatccttccagcctcccaaagggaagattttgttgtgtgtgaggaatgtcagaaatgtaataaagccaacgacgttatattaaatgagttctgggctgggtgaggtggctcatccctgtaatcccagcagtttgggaggctgaggcaggaggattgcttgagcccaagggctcaagaccagtctgggcaacaatggtaaaaccctgtctctgcaaaaaatacagaaatgatccaggcatggtggcacatgcctgtagtcccagctacttgggaggctgaggtgggaggattgcttgagcccaggaggcagaggatacactgagctatgactgcgccactgcactccagcctgggcaacagagccagactctgtctcaaaagaaagaaagaaaaaaaaaatgagttctgtacattgtgacccccaaattacaaatctatttgttttatgactgcataagacttttcttccagctaagaagtagaaacaagtgtaaattaagagtgccatgttgcagaacacctaccactaccacaaagtatgtttgccccacaacctttttaatcacctgcaattttgacaggaaaagaaaggaaagaaggcatttcaagccgatggcaaggcacaaagggtaggagggccagtgttctgggaatgacaggtagtcctgtacagtcagaaggagggatgcattccaaagtacagtggagggacaggcataggatagacatttaggaaaaaaaaaaagaaagaaagaaaagagaaataaaaatgtaggtaccagacacagtggtgcacacctccagtcccaggtactcaggaggctgagatgggaggatttctggaggccaggggttcaaggctatgatcatgcctgtgaatagccactgcactccagcctgggcaacatagtgagataacatctctaaaaaataaaaagaaaaaaatagatgcaggaatggcatgtccccagttaagcctctcgtcctggatgggatgaggaaacaggtacagagaaatgtgaaaggaaaataaatcttggggcccctaaatcactaagctaaagggaaaagtcaagctgggaactgc

SEQ ID NO: 1885710 - DNA, 4001 bp, Homo sapiens
catgattacaaggaagagttcactttgtcttaatgcattgatcagtacacctttaatgtatacacctttcctttttcttttctttttttttttttttttttgagatggagtctcgctctgtcgccgagactggagtgcagtggcgagatctcagctcactgcaacctccgcctcccgggttccagcgtttctcctgcctctgcttcccgagcagtcgggattacaggcacctgccaccatgcccagctaatttttgtattttcagtagagacagggtttcgccctgttggccagactgttctcaaactcctgacctcaggcaatccacccgccttggcctcccaaagtgctgggactacaggcgtgagccactgcacccggcctatacaccttttctgtatttttatttttaaaagttcccaaaattgaaatggtcagtaggccactgcaaccagcctatacaccttttctctatttttatttttaaaagttccaaaaattgaaatggtcagtaggccactgcaaccagcctatacaccttttctgtatttttatttctaaaagttccaaaaattgaaatggtcaataggcatatgataaaatgaacaatctaactggtaaatccaggaaatgcaatttaaaatgacactgttttttctgcacatgacgctggcagttttaacaaaatgattatgtccaacgctgatgagtataatggtggctataaaaatcagaacagaattttgggggagaaactcaatattatttacaaaaattttaaatgtgcatgccctttgatccagaaattccacttctagaaataatatccttcagaaacactcatacatacacacacccatttgtgtataagaacatttgttgcagcattgtttgtaatggtgaaaaatggaaaaccacctatgtgatcctttgctaaaatagtgggtaaagaaactatgatacatctagaaggaatgcaacagttaaaatgggggatgcctatatgcactaacacagaaagagctacagggaatgttgttaagtaaaagaaaaaagtaagtcagagaacagaacatgtcatgtgatcgtttatgcataaatgacctgaatgggccgggtgtggtggcttacacctgtaatcccagcactttgggaggccgaggtgagcagataacgagatcaagtccatcctggccaacatggtgaaaccgcgtctctactaaaaacacaaaaattagctcagcgtggtggcgcgcacctgtagtcccagctactcgggaagctgaaagctgaagcaggagaattgcttgaatccagaaggcagaggttgcagtgagctgagattgtgccactgcactccagcctgggtgacagaggaagactccgtttaaaaaaaaaaaaaaaaaaagacctgaatgtccttaaaacattaaaaccacacacacaaaaaattaaaacaacggaaaatatctgatgtggttcatttatctaaatacttcacaaatcctaagacaaataaatttaacttctctcttgagaagttatatgcactgtataagaattctctggaactgtctctctacaccaaacctgaaaggactgcaccacaatgggaaggaactatttcttgttccacagcctcctagaagagtctcagtgtctcctcagaaatgccagctcccacacgggcctgagcaatagctcatggagtctctccagacctttgtgcttctgaggcacttttcaataattaactaatctgcctaaagggtggggcgggctatggctcccacagactcagcactcccttcagccagctgccctctggaatgcaaaggcatccatcccctaggaatggctgttggtcaatccctgccccaccacagcccccaaactcaggagggtgaaagggccagggcaggaaagcaacttcccctctcagatgttctcctggagaaattatattactctcgcctacctccacctctcctctgtcatgctcctccagcatctgaaaaagaacgttccaacaggcagcaggacaaattacatgtcaatgctgtcagtttcaatgctgccctttgttgctccaggtcctatgaaccacagaaaaatgtataggtcctttccattttttttttctttctggcacaaataaaataaacagcagaagcagtttctatttcagtattttcaaagggatggtgtctggaggaatggttcccaatctttggaatttaacaaaccattaaaattttgaaaaccttttgagagactaacataggactgctcacttctattttgccaagcacagacacttaaaaaacaacctgaattattgtcaccatcattttatggtgggagatgattggacactttaaccccaaaacaatgtaatcatgacaatctcagattttaaaacaggacttcaaatttaatacactcagatgcatgagaaatacacatgtatttcacgtagactggtgaacacttccttacagacgcaccagccccttggaaagaactggcagagactaaatcataagtttccaaacctgactatgcctgagaaagataggaaggcattaaaaataataataataataatacagattccagattcccaccccatccatatttactgtatcaccttctgaggatttcttgagacggagttttgctctgtcactcgggctggagcgcaatggcactatctcggctcactgcaacctctgccacccaggttcaggtgattcttctgcctcagcctccagagtagctgggattacaggcacccaccatcatgccaggctaatttttgtatctctgtagagaaggggtttcaccatgttggccaggctggtcttgaactcctgacctcaggtgatccacctgcctcggcctcccaaagtgccgggattacaggcgtgagccacctcgcccggccgcctctgaggctttctaagggtggggccctggaatgtgtatttaaaacttttttttactatggtgaaatatacataatataaaatttaccactttaaccattttaagtgtacaattcagtggcaataaggacatttacaatgctgtatgtaacttttcatcatcccaaacagaaactctgtacctgttgagcaatcactccgcatttccccttcccccagctcctgccaaacctctattctactttctgtctctgtgaatttgcctattctaggtcactcaaagaagtagaatcacacaatatttttccttttgtgtctgggttatttcacttagcataatgtctttggtgctcatccgtgtcatagcaggtatcagaatcccactcctttttgtggctgaatccttctccattgcatgcatttgccacattttgtttatctgttcatctgctggtggacggttctgttgtttctaccttttggctattatgaacggtgctgctatgaaggttgttgtacacgcatctgtttgagttcctattttctattactttgagtatatacctaggagtggaatatgctggatcatatggaaattctgtattaccaccaaggaacaatcaggctgttttccacagtggccgcaccattttacactccctccagcaatatgcgagtgtcccaagttagccacatcctcaccgacatttgttgttttctgtttttgtttttattaccagccatcctcatagatgtgaagtggtatctcattgtgattttgatttgtatttccctaatgattaatgattttaaacatcttttcctgtgcctattggccatctgtgtatcttctttggagaactgtctattgaattactttgcctattttaacattaggttgtttggtttgttgttgttgagttgtaggggcttttaacatattctggatagtagtcccttatcagatgtgtgatttgcaggtattttctcccattctgtaggccatcttttcattcccttcacagtgacctttgatacactgaagttttttat

SEQ ID NO: 1885711 - DNA, 4001 bp, Homo sapiens
aatgagatgggtgtggtggtgggcgcctgtaatcccagtgacttgggaggctgaggcagaagaatcacttgaaacctgaaggcagaggttgcagtgagctgagattgtgccactgcactctaccctgggcaataagagcaaaactccgtctcaaaaaaaaaaaaaaaagtaaggatgctctctattagcaggtttggaatgatctctcaacatgtgaaatgaaaaagtaaagtagggagggcatagtggttcatgcctataatcccagcactttgagaggctgaggtgggcagaatgcttgagctcaggagttcaagaccagcctggataacacagggagacccccatctctacaaaacagttaacaacaacaaaattagtcaggtgtggaggcatgttcctgtagtcccaaactttggaggctgaggtgggaggataacacagggagacccccatctctacaaaacaataacaacaacaaaattagtcaggtgtggaagcaggttcctgtagttccaaacttgcgaggctgaggtgggaggatcaattgagcccaggagatagaggtcgcagccagccaagatcgcatcaccacactccagcctgggcaaaagagtgagacccccatctcaaaaaaaaaacaaaaaaattatagtgaaaaataggttatatagtttgccacattgtaccagaaaaggatgaaaacatttgctttcatctacctacataaaaaacactagagagggacacacacagactaaaaaaaaagtagtcgattactaacttggcagtggggggtggtagacaggatcatggtgagtataagacttaattttgaaccacatattacttattcaaaatataattttttttaaagagacagagtcttttaccaggctgaagagcagtggtgtgatgatagctcattacaacttcaaactcctgggctcaagcaatcctctcccctgagcctccaaagctaggaatacaggtgcatgtcactatgtctggctaaattttttcttttctgtagaaacggggggggtctcactatgttgcccaggctggtctcgaactcctggcctcaaccaatcttcctgccttggcttctcaaagcaattttattattattattattattattattattattattattattattattattattatttgagacagagtgtcagtctattgaccagactagagtgcagtggtgagatcatggctcacagcagccttgaccccttgggctcaagcgatcctcccgtcccggtttcccgagtagctaggactacaggtacaacaccattgtgtccagctaattttttaaatttcttgtagagacagggtatcactttgttgcccagattggtcttgaatttctgacttcaagttatcctcctgccttggtctcccaaagtgctgggattataggaaggagcctgtaagtgtcctgaaagtgcaaaaattgttgttgttgttgctgttctgagacagagtcttgctctgttgcccaagctggagtgcagtgacgtgatctcggcccactgcaacctccgcctcccgggttcaagtgattctcctgcctcagcctcccgagtagctggaactacaggcgcgttgacaccacaccctgctaatttttgtatttttagtaaagacggggtttcaccatgtgggtcaggctgttctcgaactcctaatcttgtgatccacctgcctcagcctccaaaagtgctgggattacaggcgtgagccactgcgcccggccaaagtgcaaaatttttaataggaatttttacgtctgtttataaagtctatctaaaagtagtccaaaattttactttacatttataattgctttaattctagtcttttaaatcttgttcactgaaaccacttaggtgtaatgctatctcaaggtaataccaataccttgtgtttaccttggttccactgaacacaaggtactggtactaccttgaaacagcattatatattggtcaaaagcacatccttttttaacctttttttctttttcattacaagaacacaaaaccactttaaaaaaaaaaaaaaaaacagggtctcactctgttgcccaggctgcagtctgtcacccaggctaaagtacaatggtgcaatctttgctcactacaacctacacctcccaggttcaagcgattctcctgcctcagcctcccaagtaggtgggattacaggcatgcgccaccatgcccggctaatttttgtatttttttctagagacaggatttcaccatgttggccagactggtctcaaactcctgacctcaagtgatccgcccgccttggcctcccaaagtgctgggactacaagcgtgagcgccaccgcgtccagcctcacacccacttttatttatttacttttcattagtttccttgaagggtattctgtgtccagtagccttaccaggaaggctgcttcagaatttgacacaaaccatgccactggtttccacaggtatgagttgcgtttccccaattactatagttttgttccgtttgcctatgttattctttgctttatacacataagcacaactcttaaatagaattcagtttcatcttgggcttaaacactttcaatttttttttttttttgagacggagtttcattcatcacctaggctggagtacaatggcacgatctaggctcactgcaacctctgcctcccaggtacaagcaattctcctgtctcagcctcctgagtagctgaactacaggcatgcaccatcacaccgagctaattttttgtatttttagtagagacagggtttcaccatgctggccaggctggtctcgaactcctgacctcaggtgatccacccgccttggcctcccaaagtgctgggattacaggcatgagccaccgtgcccccagccaacaccttcaattttaagaagagctgtatgctccttttggctctgcagaccttacttatagccaggccttggaaagcagctgccaagacatttacttttagaagttcagttctgttcccagcaggcctctacagaaccttgtgagacagggactcactctgtcacccaggccggagtgcagtggggtgatcatggatcaccgtagccacaacctctggggctcaagcaatcctccatctcactcctccaccaggtagctgggacttcaggcacatgctaccatgcctggcttcaatactgtttttcattaggggaatgtaaattaaaaacagtgagataccactgcataactaccaaaatggttaaaatccaaatcactacaactccaaaagctgaaaggggagcaataataattctcactcattactggtgggaatgcaaaatggtacagccactttggaagatcatgtggcagtttcttacataattaaatataatcttaccatatgatccaacaatcacactccctggtatttactcaaattacatgaaaacttatacgtccacacaaaaacctgcacatggatgtttacagcctttactcataattgtcaaaacttgaaagtaaccaagataccctccaaaaggtgaacaaactgtagcacatccataaatggaatattgttcagcactaaaaagaaataatcaacccatagaaaagacaaggagaagccttaaatacactgctactaagtgaaaaggctacatattatacgattcaaactaaggcaaccctctgtatccaagggttccccattcacagattcaaacaatggcaaggcaaaaatattccagaaaaataataaaaatatatatatatatattttgagacagagtctcgctctgtcgcccaggctagagtgcagtggcgcgatctcgactcactacaacctccgcctcccgggttaaagcgattctcctgccctcagcttcccaagtagctgggattacaggcacgtgccagcacacctggctaacttttatatttttagtagaaacggcgtttcac

SEQ ID NO: 1885712 - DNA, 4001 bp, Homo sapiens
aattgtgtatgaaaaaggactaaaaggcacatataccaacatggtaaccacagttatgttaagatcatgggactgcatgtaattcttttacattcaataataataataaataaaagttataaataagttgtctaaattatctataatgtgatcttttcaatgtaaagttttctaaagaaaataaaattatatcttacatttaatttacaacaatgtctttttctacttcaatttctactaagatatttgagcactaaattcattatatgaactaagttttttaccatatcacaaaaaaaataagaataaacattaccttattctgtgctcataaaaataattagtgggcaatctactaattaagaaattcaatgtaaatgagtcatcaaattaattggttccataaatccaaagtatcagcatagggctttaataaccatcctcagcatcatcagtatacttatcagaagtgcaattagtaaagcctgacatgaccctacacccaaaaaggctataaaaataaagttgtttttttttttacagtataagaatataaaaataaacctttggccatcaacatagaaaacaaaggctgctgttgccctcaatctatacttgaaaacagaatagtaaatagcctgagtctatgctatcacttagatgattgtccctcctgttgaaatttgatctcaatgttgggggtggggcctaatgggagatgttgttgggcatggtggggaggggtcagaaccctcaagaataaattaatgctcttcctcaggcatgcttgaggtctcactctatttgttcccccaagagctggttgttaaaaagagccagggcccctcctcccacccttttctcctctctcattttgtgcacaagctggcacctctttgccttctgctatcagtggaagtagcctaaggccctcactacaagccgatcctggtgccatacttcttgtacagcctgcagaactgtgcggtaaatcaaactctttataaattacctagcctcaggtattcctacatagcaacacaaaacaagacaaggcagtcaattcatcaataataagaatcagtcctatgatcaacttccctctggagaagttttttaatctttcttgcaaattagaatatattatccccaaaatgtgcagacctgatgtcagaaagagataaaattcttaatgaacaatactgccaaatgagataaaggatactgtaataagtcttttgactagttacaaaagcatcaaaaatggtcaaaaaataaccttaagtacagttgtaaagagcttgtaattcatcactcccaacctcacgacaagaaaaaaagctgggggtaaaaaaaaaaaaactgataatccaactcttcttagagccatcagagaattgaggtcagagggcaaactgctgctctaaaacctggagagacaagacaggcagatagagaatcacagtgtgcaggaagcagaagtccaggaatacaagctctcaactgaagccagcatcagtaggaacacttgaaacagtaattgtggactagcttgagagttaaaaactgtaaggggaccagtcttacaggggtccccatactttcctgagttttacctccaggagccctaccaggttctcatggtaaagatctgaaaaaaaacccctcctgcttgcagcaggggaagaagaaaaaccattttgaaatacgccaggaactttatttctcttaaaaggtattccagaaaaggaaactattttaccagaacctaaccaactggcttttagattgcctaacctactacggttttacagtgcctaaccaaccggagggaagggaaatacccaactccagccccatctatcctttgaccgagaaaaagagacagttactcaactcaggctcacagttggtagagggcagagggatgagggggaaagttctatagtcctgagatctaattacaggactatagaactttccccctcatccctctacccttaccaccacatcagtacagctcttgtacaacacaggattacaacttaaaaacctgcaagcctcagaccccatttaaggattctttacaaaaacccaaagacaacagggcagataaaagcaaggacagtagaagaaattttagcctctaatagtgatggcggtggctttctggtacatggacggcacagggagaggcggacagaccccctccctcaacagcccgccgccctctgtgcagcacagtcaagcagagagcagaccgatgcagagctgaggctgagcttcaggggcctgaggcaggaagtgggagcggtgcccacttcagggaccagccagtgacacagccactgcgcccaccccactgagggtgccaggttcctgggcctcaggaggaggctctgtgcagggctgcccggggctacatccccagggtccaccccacatcaggcgactgctgagcctgccactcccaacagccaggccggacagttatctgctctgcctgggccactgaagcgccagggcaactggggtagctcccggcgatgtcacccctgccccggatcccagcccaggtccagcaaggatctggagcccctgtctcaggctgaaagggggcggagccagggctgcatgctccacagtgccagtgggagccaggagcaggcagcagcccaagccacccaagcctgggtggtagacccaggcctccatgtgctcttggggactggaaacaggcaggagccctgtcccccaaccccatacagctgcagctacccaagtcagggttgtggacccaggcctccgtgtgctcttgggggctcaggaaggccccccttgcctttgcaggctcggaaatgcctgttcccgctgccacttcccgcaccggctccaatgtggcaggttctcagagtggggttggagccaagcctggatatcatcacagcccaacaggatatgcgcatgctcaggccctgccgcctaggccccctctgaggaagctgaggtggagagctgctccatgctggcaggcaggtgccccttggcacaagcagcctgggagccatggaaagtggcaggaagcagacaggctcctgggtggaagggggcacgtccccagatagaccccaccttcaggccagggagggcctgaacgttggggaccgggctgccagtcccgcagactgcagtgggggcttgtggtgccttttccagcccacccatggccaccgatgtaccaattgacacacttcctccccactgaggtccataaaagccccgagatcagccagagcagggcagaggccagagagacagccagatgactagctgcagagaggagctatcgtctctgctgagagctgggaagtcaatggggacctgcctgcagagaggagccactcactccagggcctcctctctgctgagagctgaacactggatgagacaacctgcctatagagaggggctgccctctgcagctctcctctgagctgttctaacactcagtaaagcttctctttgtcttgctcaccctccacttgtctgcatacataattcttcctggacacaggacaagaactcgggcaaaggcgccactggccacagaggtttctagacagaaaagcaacaccttaaagatcccgtaacatttgcctccgataccacagccagaacaaacactaaacacagcctgacttctaaacagataaacataaaacctcacactaaaggcctatttacctcagttccttttacctgatacattctgtctggctatgaaaaaaaattatgaggcactataaaggcaaaaaatacaatctgaagaaacaaagcaagcctcggaaacagactcggatgtggcagaaatttttaccaggaattatcaaattatcaccaggaatttttttttatatatatgttttgagacagggtctcactgttacccagtctggagtacagtggtgattcacagcgcactgtagccttgaactcctagg

SEQ ID NO: 1885713 - DNA, 4001 bp, Homo sapiens
tccaaggatgggctaggtatggagagtgggtagaccagatgacccacatctacattagacattgactttgctgacggtcattctttcatgtatctgggagatgcactgaccacgagacctcttctcagaggctggcatcatgctgggcagacctgccggagtagcagcccatggatgctttgtgataagtagggcccatcaagggaggccctttgttcttttcttttttttttaacctattgtgttgagacaggggtctctgtcagccaggctgaagtgcagtggcacaatcttggctcactacaacctcccaactcccgggctcaagtgatcctccagcctcaacctcctaagtactgggaccacaggcgcacaccatgacacccagctaatttttgtattttttgcagagatggggtttcgccaagttgcccacgctagtttcgaactcctgggcttaagccatccaccgtctcagcctcccaaagggctggggttacaagcgtgagccaccgtgcccggccaaggtaggccctttttgctaggcagaacaggtggtctgaagagaaaaccctatatcatctccaaagccagcatctcttccagaaagttcttggaaggaagcatgagatgaggagggtcagagaaccaggtcacaaacagcaagacagaggcacatgccctgtggtcaaccatccacaccccagggctatcctggccatctaacaggttgctggagtcagccttgttcccaagaaggcttcccaggcaggatttgctccccagagagagtctgcccttgtataatcattgcaagtaaagcaaatgcgtgaaggattacctctcttcaagtagcaaatgatggcagtgacaggaaggccatttcctctgtgactaagttgccaccagctccaggagcaagccttagagacacagatgggatctgcatggtgagagcagcacaccgaggtgtgaagtgcaggcccgtgggtgaatcacacatctattccttccatagcccctgaagcagtgccccttcctgaaattgacagcccactcaggtattctctaaggtacaactagtcacagtaaaagaggttcattccagaaaatgcattgcaatcatggtaaacatacagagaacaaacttcattcaaggtcaatgaggcaatactgagaacacagccttgtaacaacacattatgtgtgcaccaagggcagtgagcaaacagcagagaagctgacggcgtatttcatacaaagtacaattctgtgtctgtccgtcctgtacccaggaggggtacagataacatctcctcttccatggcgacttcacgtcctccgaggttttcaaagcagcatttgatactgaaaacgtggattttcctctatgattaatcataaataatgtactcatagaaggagaatctaccttttaaataccaaagaaggattccatccaggaaagcgtgcacctgtgcttgagtcatcagaaaagaaagtcacatgaggcagacgagcttccagggaagaactggcaccacgagacccacaatttaatcttcaccaagttggcgtctcgagatggttctcgggcataccccgttcattcagatacgacgtgcggcctaccatctttgcacctactcaggccctacggtctcttccagaaacatttccaaagcagcatttgatactgaaaacatggattttcctctatgattaaccaggaatcacgtaaacatagaaggaatatccacgttttaaataccaaagaaggactgggctctggaaaggacaaatctgaacacagttcatggaaaatggaagcaagacagtaaagcaaccgttttcagtcccgtagcatagctgtgacaacacaccacagcctgtgcaccaagctggctcctcagcgaaagggggcttctaaaggtgatggtcagcagacatatggcacgaactcagcacatgttctgcggcccaccatctttccacttaccctggagggctcagccccacctcacgtccctgatggtggcttcagtccagccatgatcccaaggcagcatttgatactgaaaacgtggattttcctctatgattaaccatcaaacacgtaaccatagaaggaaaatctaccttttaaataccaaagaaggtttcatcccggaaagcacgaacctaagtacaatccatcaaacacaaaagtaacatagcacagaggagagcattcggcctcatggagaaaatgacgacggagcccagccgcttggccgagcgggcagcttgcgagaggggtctcctcaaggcgggtgggtggtccgcagacatatggcacgaattcagcacatgttctgaggtccaccgactttccacttaccctggagtggggggggggactttattgtctcttccctgatggtggtttcagtccaggaatgtttccaagcagcatttgatactgaaaacgtggaatttcctctatgtttaaccataaataacataaacatagaaggaatatccaccttttaaataccaaagaaggattgagtcctggaaagcatgaacctaagcacaatctatcaaaattaaagacagcacaggataggtgcagtcggcaggggcctcccgggctagcggcagtgacatgggccctgcggaggacgcatgtcccaggacagaccttgctaacaagagcttaggttctgggattcaccttccatcactctccgcatgggggagggagctaaccttcctctcagaaatgttcagaaatgttttaaaagcagccttagatactgaaaatgcggattttcctctatgattcaccataaatcctgtaagcatagaaggaacatccaccttttagatgggaaaagtgggaacagccctggagagcacaaacgcaaacatgattcatgaaagacagaaggtaacagaagcaggtgagcactttgcgagtcccacgtgggaagcgcagggcccacccctggcctcttcacatccagagatggaactcctatgcaggcaaacgtaagtttggggtctgccctgctgtcactcgtctgggtgggggtaaccctaatgtctcttccctaatggaggcttcatggtcaagagcgtttccaaagtagcatttaattctgaaaaaaaaaaaaaaaaaaagtgaatgtacatcaaaaatttgccacaagtaaagcaggcaaagtagggattctatgctttgaattcgaaaaatatcaaaaacaaaaagaaaataagcctgtcaggttcctaaagtcacatcgcctccatgaagccctcccaaggcacctaatgaccaatgtcatgtaactgtgggctggagcatccttcacataccttggagggagaaggacacccaagaatcttccagagactgaagcttgtgtccagaaagtttcaatcggcaggactggtcatgttggtgtgacagactgaggaataggcaaacaggtcaaaaacaatgtctctttaaatacaactgagagaggtagcaaaacatgatgctcaccagcccctaccaccaccaccctccaccaccaccaccaccaccaccaccaacaccaccaacaccaccaccaccaacaccaccaccaccaccaccaccagtaccaccaccaccaccaccaccaccaccaacaccaccaccaccaacaccaccaccaccatcagtaccaccaccaccaccaccaccaccaataccaccaataccaccaccaccaccaccatcacaaccaccaccaccaacaccaccaccaccaacaccaccaccaccaacaccaccagtaccaccaccatcacaaccaccaccaccaacaccaccaacaccaccaccaccaacaccaccaccaccaccaccatcagtaccaccaccaccaccaccaccaccaccaccaccaccaccaccaccatcagtaccaccaccaccaccaccaccaccaataccaccatcaccaccatcaccaccaccaccatcacca

SEQ ID NO: 1885714 - DNA, 4001 bp, Homo sapiens
gtggcctctggctctgcagcacctcctggatcgtggcctcgtgctgatggccagaacctttccccggagttgccctcccttctgggggaccctcatgggcaggctgcatggataatgagaattaatgacccatttaataggtatcatcaattcagccccctctctgcctgggacacggagtggggctgagcaccgaaatggtcttgcccagaagtcccccaaggacgggttgcttgggccattgaacattgggcatcgtcagcagaccctcccccaggtacctggtgatggtgctgacatagacctcctctctggtggcgggacacctccacacattctcccactgtgcaggaatgaggccaactgtgtggtctttgtcatgaaaaatgcaagagcactccggtggttcctcaccaagccccacgccgcgacacgagcacatcgggtcccccggccagagcctgtatcacttctagggcttctcctgagggtggaatgaattctctgggttagctgtgcagagaacacattcgtcaacaaagttcatatccctgcgtcacctctgtgcccatacctcaggcgaagctgacagttttcttactgtgaagccggcacctgcaggcacccataaagaactgactccacacagggaccccagcgcactggccacctcagataggacaaagccacggaggcagagagcagtggggctttgcagccactccaggatgctgccccacacagggaccacatcctgaagggggcggggcttggtgccactgccctccactgtgttagtccattttctggctgctgataaagacatacccaagactgggcaatttgcaaaagaaagaggttcaattggacttacagttccacgtggctgggtaagcctcacagtcatggtggaaagcaaggagaagcaagtcaggtcttacgtggatggcagcaggcaaacagagaccttgtgcagggaaactctgccttataaaaccatcagctctcatgagacccattcactatcacaagaacagcaagggaaagacccactcccctgattcaattacctcccaccaggaccctcccacaacacaaaggaattcaaaatgagatttgagtggagacacagccaaactatatcatccaccaaacgggggatcaaggacagcctcccttctccataaccaggggacacgctggagtccgtgttctcctctcaaaccaggtgctgtgtgcaggaagccctccaaggcagcatcacagagccgaagattcattagctgcatggtctccatcgggaaggagtgaagggaacctggcaccgtgccagtgtctatgagcaccaagcaatggaccaggagaccccaccaggtcggctggcagagggaagctgacctgaggaggaagtggcactgggccagtgacctgggtgaggagtgggaacacagcccaagtcggcctgcccttcacacacccacagaggtgctggacttcatccagggagccaccctgagaggaaaacaggctgtcctcaaaggagtccgcatggaggagttaacctctcctcaagtgtcccagtggagtggtaaaccttgtccttgcccccagggacccaccctgaaaagcactgggtccaggaagggacctagccctgtggctaagccacagacccagccactgggggaaggcacaagttggcattcaaagaggagggaacctcacataactcgcaaaaacacatcgcattcacagcaaacacagcaaagcaacccagggctcttccctccaccagcctcacttccaggaagcttccctcacgcagcacggagccggggcaggggctctcagctcacacaaggcacacactctcacgtctcctgtgggggcggccctccgaggcagagtctgatattcaaaaagaggttaaccatgtattattcatgatgaatgaagcgaacataacacggataacctctcctcaaatatccttgcatagttctgaaacgaaaaccatggcctcttccccaccgttgtctttgcttccagaagattcttcttgggatgagctgaatcccagggttggggcagggaggtgttcacatcctgcaaagaaagcacacgtactggcattgaccttccattcccgtacctcagtctcagggcccaggcagccctggcaccaaagtcaaaaccctgacattggaaccatgctcagaaagacttctaaggcaggttccattaaaaatatatgaaagcttcctccacggattcctgaaagacgggatttgatgacgagaaccagcagaatgcatgtcagagataagcaaagccatcatgaagaattctgtttccgataaaatggggtgtcactgatccctgaagacagggtccctaccgcagagatggtctcagttcctggaatttcctcccgatgactgcttggaaacggagggtcacagaattccagggcccagcacatcaataatgaataagcgtgccgttgacctgcacccgacaatcttgcagcagcttgacaccggcggcccctccctgaagcaggtcttgtatctgggaagccctttgaggcatgatttgattttaaagaaaagtaatctcatgctatttacgcatgtgaaagtgaacccttgttcacaaaccaaaacatggcacgttgattctgggccgttctcccacgatggacggtatatggcatgtggggagacaggcgacacatatcacagggaaagcacctggtctccagccccaaaccactgtgagtgttgtccacagaccggcggtattagcatcacttgagaacttgctaaaaatgcagaatcttggtccctgaatcagaatctgctttttaacaagatccctaggtgatgaaaatcttaggagcatttttaaagtttgagaaacactactctagccaactattcatatgcacacgcacacaaacacacacacacacacacacacaccccagaggtgctgtcgaccacaacgtcttattccatgagagtctgtctaagatggggtggttcccaaggaaggcacgaagccatgccacgtccaccaagaataatccaaatacccaacaggcagctgcttaggagctgccaaaaagtagtaatagtaacaggaaatgtacggagtttttactaatgtttgcattccctacaggaagtgtttcatactcagaatgaaggctacagataggagaggctggacccaggttccccggtccaccatctacctagagagaggcttgaccccggcatctctccaaggaattcctcgtggctaagatttaataacaagaagagaaagagagatgaaataattgtgaacatcttccaataaaaagatatggcaccaagcccctaaatggcatctccaccccaaagctagcatttgtccaaggaaatcacactggtggcttgcattctgagatcactggattcatcattataaatcatcaacacagtcacactccatggtggggcaggcaccaatgtcccctcactgaagtcagcactgtgctttcaaaaacttctgaagcaaatttggatactaaaacaatggttgtccgatattaatcatcataaatatagagaccatactacggacagccattctttaagcaccaaagaactgtgccatcaagaagagctgggcatcttctccaaagttggtgtctcttccagaaagttcttctcaggtagtccaaacaatgaggattagcaggtcagcttcacacattgagagtcaagcccatgcctgggggtcagtcacactcttgggcaggggaagggggtctggccccaatgatcggtccctaaggtttgcttcatgtccaagaagtgcctccaagaagcaggatttgataagtagcttgaatgctgcgtcacccacaacacacacccatggccaatgcaaatccctgatagcaccaaggagtcccgtggccccctgccaagcgtggccccgcctccagg

SEQ ID NO: 1885715 - DNA, 4001 bp, Homo sapiens
tattgaagctattaaataaggctaatgtcactcttcccctcacacacacatttaatatattccaaagatgtgtagatgcattaacagcaattttcatctccaaatgttcccatttagtcagccccatgcataaaatatgagccctaacaccacgctccagcccgttgcagatggagttccccagagcatttggctctcagcgctggggcgtttgctggaggggcgggggcgcgatcagtcggcatctgcaggggaacacagggcctgtcacttcctctggggctttggtgcccccaccccccgacaagtggaagagagaacccagacccaactgactcgtgcctcctgcagctaatctcagcctcatcctggaagggcagaaaaagctagaaaaccaaacagctttgaacaaatgggaagaatttctaaaaatcaattaacatattcatgtactccatcaccacatcttattgactgcctgctttgtgcccagcacctgcctgggaattcatctgatccggtccctgcctttggggactccattagtcaatcaacaaacactcactgttctgctactgaacacagcaggggatgagagagagagagagagagagagagagagagagagagagagagaaatttctgccaatgagaaatctcacagtctagggcacaaagaaggtagacattaacattaggcaatttcagagaactgtaagctaggaagaaaacagtaacggggcaactggtagaatgtgatagggaagaggcaaggggagctgcttttatagggttatcagggatgaccttgctgaacaagagccattccatccccttgggaattgtgaacccctgggaaaggaaaatgcaaaggatgtgggcctttaaggaaggaagggccagagcctggacaggaggcagccgagggcagagcagggcggcccaggacccagctccggaaggaggggcatgtgcaaggccagaatgaaggatgaaaacacgtgggggataggctgtggctccaaaagaagaggggggctgccactctgagggcctggggggtcctcggatcattttggtaccaagcccaagggaaggggcctgcagaggtgccctgggcagcggagttaaacagctggactctgcacttggaaatgctctccctggcagagggaggggcactggagggagacccaagtgccacaggctggagggacctagcctgtggggcggcctctccagcagggctgtggcccaggggctggggaagaggggtgctgagggagagtgggagcaggcagcccagagggatggtgccagggatccccactcccatgctaggcatggagaggagcggtcccgaggaggaggacaagggggagggcaggcacaggctgtgacttccaaggcagcgacgtctcaactaggggatgacgggagcccagctcaggaagatctcccgagcccaggagctcactgatcaacaatgagtgataaaggacagccttagctcattctttggggtcactcctgaggtgctccttgccttcagccctggaccctgggcatgggcagcatgttctggagtcactaagtctccaggtcagctgcaaacaggcctctggtcatcttcctgtagtctgggcaggccaggggtgcaaatatgacataagcatcgggtagctgagagccagcccagcctgggggatgtgccaaccggaagcaagggcatggcgggtgctcccgctgacactggaattggggatgccattctgtcacacttccaaagccccccagaacagagtggagctggaaaattaacaggccaagtgacacaggtcctacacaaagtccacagggtcaaccagcgcagagccagctgctgcctggagttgacagcaaagaggaaggcatccaaggtgggattcgatatcggaaagaggttgactgtataatattcatcatatagaaagtgaacacctcacaggcaacctatttcaggtaccactgagcagcactgactccagggaggaggcttcttccacagggaagggccctgccacccacccgcctccaggatggaggccagcacagggctgcaggtggaagtcaagcgcgtgctcggccaccagccatgcctctgggggcccacagggcgcgcaaccggacctccccgacatcagcaggtgcaggaatcatgcaggtgggatctgatactgaagagaggccgctcgtgtcttgtgtgtcatgatttctgtgaatgcaacacaggccacctctcctcaggcaccacaaggagcagcacacgcacacggccacccaaggcaccagctcccacccagggtctcacagcactgagatgagcagaaggcagcccaggtgcagggaatgcatgcagccgcccccaacatcctggcgaggggtgggtggccttccagcaggatgccttccagcgggactagctcccccgtgtcctctgcctcgatgacactggccatgaaaaacagactgagccccgtcaccattgctcatcagcttcatgaccgccccccaccacagtgcacaaccctagcatcttccccaaagtccacatggccccccgaaagctctcccaaaatgattcaatggcgggggtcaggggaaaggatgacaaatgtcacaccagcccatgcattcacgtaccctggaaagtcccgcctcaggcgtggcgcccgcacaccaccgggcggtagcggtactgaaaacaggccatctgtgttatattcgtcattaataaaagcgaactcatcacagacaacctcttctcaggtacccagagtgccatcggctcaagaacgtggctgccgcgtcccgtggtgccagcgctgcccccgggaagcagtcctgaggacggatgggacatcaaaggtgagaagacacagagacaggaaagagacccctgcccggcccactctcggtgaccaggccccactgaggcagcgactccaaagcacccgtcctgctcctaccctcaaaagggcttcatctccaacgggtcctccaaggtgagatttgatactgagaaaagatcaaccatgtattattcgaagtcaataaagcgaatataacacggtcgatctcccttcaagtaccaggaaaggcgctgagctgaagcgcgatcggctccccggcccgcaggccccacaggctgcagcggatacggacggctagtggaccaggtgaagtacattagaaacaattactttccaactggtcgaccatccatccccgtaccccagaatggtgctgatgccggcgtccttccccgaggtgccccagcctccaagacggcctccctggtggaatttgataccgaaaaggggttcaccgagcaacattcgtcgtccagatgcaaagttgctcgggtaacctctccccgagtaccatggagaggctcagatgctcggactaaggtgaatgcttgcaggcggctgtgcttgcagaagaccctcccccaagggcagcacaaggtctgggcattcagagcccagagcctcacactctccaaggacgttcccaatcaccaagtccaacgattccaaccccttccagaatgaatctagagactcttcccagaagttgagtgcaagacccaggtaggatcttatactgaaaagacggcaaccttccttgggcaccttgctaaagatgaaaatgaaaccctgctcgcacccgcttttcattcccagaccctgagagggggtgaccctgtagggacccctgcacaagcacagagcctccctcccagcagaggattcctttggcgggagctcaacggggcacaacgctgaccccagacctgcggtctcaccagcaccatctccagcccacagaggcatcaccccaggatccctcaaagagtaacttcacagttatcaacagctggctgaccatctgattagcctcataaagcaagtgagacattcaaaataagggactggggggataaatgcagcagaaga

SEQ ID NO: 1885716 - DNA, 4001 bp, Homo sapiens
taaggccaaacagagaatttaccagcagtaatcacccgtgccccacagtgggggaatccagacacgcgctaaggtaagcgtatttatccacagttcacacacacacacacatattgactgggggctcccggtgctagagtggccacggccccccacaccagcagacagtgaggacctcgcctccttggctcccctgccccatccagccacagcaggtttagtttacagagaagagcggcagcccccaggcccagaggagaactactgataaagtgatacaacggactctggggactccaggaaaagggtgggagggggtgagggataaaagtacaaactgggttcagtgtgtactgctcaggtgatgggtgcacgagaatctcacaaatcaccaccaaggaacttactcatgtaaccaaacaccacctgttccccaaaacctatggaaataaaaaattcaaaagaaaaataatacaaacctttttttctcctggggaaagaaaaaggaaggttaatgttaaatgtcatgctgggttatgacatcatggccaccacaaaaaaaggtgaaaactcctctgaacagcagacagcacagcctggcgcggacactggcacacaggcccacgggacctggcgggccacaactaaatgcacccatcttccaccttctctgtccacccccaggtcactgatgtcaggggatggagggagccctgagctccactcctgctgagtcttgtccatcaacctcccttcccgacccagcccacccccatgagatgcccaacgtgccagcctccagccctggtgcacacagggccagtttctggaacactcaacagcacaccacccaggcagctgagggctactcaccgctcgggtccggactcgctcatccctcctgcaggcggccccaggtccagttagggccttggactcaggcccccgtgccaggagcttgaccagctcttaacaatctgcccagggcagagacgtgaggtcccctcctgcccacctggtgaccccggttgctcccaaagtgaaaaagagaaagacaacaaatagaagccatcacccccactcccaagctccacccacccgctcagagccctgctgcggggacgacaagacccttgtcatgccccaagcccatgagcactgacctcagacccaaacagtaagcctcgtccagacccctgtccacctgtctgagatcaacaaagacaagcatacccatcctgacaccacagaagctgaggggtagaccaggaagggagcgggtgcatgggggaagcgggggtgaggaaggggagacgggaggtgggaaggaagggcaggggagagggtgctccctcctgcaggaagggagggggtgcattggggaggaggggtgagaaagggaagatgggaggtgagtgggaagggcagaggtgagggtgctccctcctacaggaagaaggggtgcatggggaaggaggggtgaggaaggggagatgggatgtaagtgggaagggcagaggtgaggatgctccctcctgcaccctcttgtcctctctaatggcctcagctactgcaaggcctctctccccacactggctgccctgctgccccgatgctcatgcctgggctggctgtcgtggcttgttaatggggttaatgatgccaatatcacagggcttggtgcgggtcacctctgccatgcacaggacctgagttagtcagagaggcagaagacagaggtccaagaaccaggggccacggccgtgccccctgctcatgttgccattgggcaccctcaggtacccagcctgagcagggtacgcacaggggaagaagggagcccagctgacagcttctggggacccagagttgggaatccttggggagaggggaaatgtctccagaacaggtttaaggagagagtaagaagccgcctgtgaggggcctcagcctcctggtcatgaaagagtcctgggtagaggcagagacccctcgaggagaccctcctcttggggcacagaaagggccagccctggtccgccaaagccccaccccctccaccctgggcacaaaggggcaccatctctccaacgtctgtccatccatcctgtgggccgggtccctttggagggctctgtgtgggagcacagccccagcccctcagtgggagaagccccagggctacccaactccccctccggcctatctgcccttggctgtggagtcagcccagggggtgtcccaccaggggcatagttccctgccaaggaggggcctcagagatggcccagccccaggccctcccctccaggaagtcagagagctgcagaagagagagagaagagcccaaggagcatgccgggaagaggctggcaggacagcagcggacttgaggacgcgtccccgtgcagccaagggtgcagaggagggtccgggggctgcgcgtggttgaaggggatgaagaaaggcatcatataggagctggataactgtgcatcaactcctgtatgaagccgttcccaccccccaactactgactacgggccgcaaccctcctcccggaagcgcagtgcaagcgctcggatggcagaggggacgcctgctgctagtggttagagcagtgacagcaagggacagccagcctaggcagtgccacccactgctgggcacctgcagcgctggggtacctgtccaccctgcccagccttgccctacctgcctcctatggccagggcctgggcctcccttagccccacagagcccccaggtgactgtgcagccaggccaagggacggaggatggggaggtgaagggggagacaggcctgattctggcccaggtctgtgagtggacatcggggactcgaccccacccacccactgctttgactccctggtacttctccagccttgccttctacatctgtgaaatgggttgcaacaggcacctctggggacccagtgaggactcatgaagtccaggggcacttcaagaatttcccagagacagaaagtagatttttggttgctgagggctggggggtgtgcatggagggtgaaggtgacagctgaaggctctggagttcttttgggggtgatgaaaatgatcttaaattgattatggtgatagttgcagatatctgtgaataactaaaacacacttcgctgtgagctttaatgggcggattgtgtgtatgtggattacatctcaataaagttgtaccccaaaacaccttcctttgttctttgacatctttctcaaccaccatactgcctgcctcgtcctacactctccagccatccacaccaccaacacacatgcacagggacacgcagccaggcacgtggtaggtggtgcaaaaatatctgtgagtaaatgacctgataatataacattctctgaaagagcccatggagggaaacctttagggaaaggggttaaagattaagaagtaggggtggcaggagggtatggaggtgggaaagaggctcagagtgacacatgaatggaaaaggggctcagattgacagacacatggagggaggaggggctccctgtaacacatgggtggaggagggggctggtgtgacacacgggtgggggaagagctccatgggacacatgggtggaggagggggttggtgtgacccatgggtggaggagggggctggtgtgacacatgggtggggggggttagtgtgacacatgggtggaggagggggctggtgtgacacacgggtgggggaagagctccatgtgacgcatgggtggagagggggttggtgtgacacatcagtggagagagggttggtgtgacacatgggtgtggagaggggctccatgtcacataagtaagggaggggctcagggcaatgcatgagtggggggaaggtctctgggtgatgcatgggaaggggaggacttcaagtgacatgtgagagaagctcaggtgacacattagtagggaaaaggctcctcatgacacatgagtgaaggagagg

SEQ ID NO: 1885717 - DNA, 4001 bp, Homo sapiens
gcaggagatagtaagcaaaggaagaataagaatgctgacttctttatctttctgaactaggagtgaaattgaaatagttaaaaaccataacaatcctaaccacttaatttttacactctaatttttcttaattttacagggatcttttaggagttgctacctgtggtggtaaagcgagaaacatttatcaatcatttcaatctcctttagcttgttttttatgataaattcaaggaaaattatagttagcatttttaataaaatgattaggtacagtgtgatctcatattttccctgcgtctgtcttgtttttctatttgcatgtatgctcagacaggtgtatgaaatttctaaagcccttaatggttatttctgggtgccagagaattgggcaattttccttctttttcatttagatttttccacatcgcttgaattttattaagcatgtgtcattttcataaatatggtaataaggtagaataattatcctttttgaaaagaaaaacaagaaattgaaaatgcaactgtcttctgttcttaaatttgctgtggcctccagatcaacagatgtggtgagtcacccttccagtgagtccccaagaatgctgaaatcaacgccccttccctgaatttgtcaacatgtctaagaagtccttcctccatggtaagatttaatagtgaaagagaagagaactatacattgtttttctttaaaaaaaaacacaaaaccccagaagcatcatgggcaccaccacttcctcagtcacagaggggtcttgagcacagatcacatgcttcttccccaggaatgcactggctgaggattaggagtgctagcagcacctacccattggttccagggccacacacatgttcagttgcactggtgtggaaccaacatgagtatggtgtcccctaaatcggcatcaggtccaagaagacacctggtgagatctgataccgaaaagaggtcgaccgtgtattgggcatcattaaataatgcgaactcaccacggacaacctccctccgagtaccatgaggtggcactgctcgcagcattcctgcatcttctgcacagcctgggcagcttgggagtggcctctgagggtggatgggaccctgaggatgagtggaccaggtggctcaaacccatgctctccggccaaccccaggttcaccaagccaggattagtgtgcacagaaataccacttcttgtgctcagctggccatgcaggcaacatttaataatgcaaggatgtcagtggcacaggagtcattaaatatgaagcaaaccacacacaaatgtgtgtgcaaaagcaggctaagcactgcctccttggtaaacctgggattcccttacaggaattctctggagggtgtaaggctgctgtgggttagtaaaccaggggtcgcacagagtcctgttcctgttttcttctgtatcccgacggctgactaataaaagatgcttctagatgcccaagattcaactccaaggttgaatttgataggaataaaaaaagaagtcagccatgtgtatttcaatcttaacttttaaaaaattagggcatcccaacaacctctctcgattttcctaaagttggtagtgccccaggaagttgttttagggtcagcttggactctaaagttagtaggtcagttacatgcatcctcaggaaaatgcttgccatggggtcagccatccagaaacctaccttggaagcagcactggctcaggaagccctccgaggcagaatttgacactaaaagagaggagagccgtgtatgactcgctttgatgaatcgaattcatcacggccagcctctctccaagtaccacacatgaacactggtgagaaatccattgcctctctggcagaggtggccgcccttctcgggagtcctgttaggaatgggtgggatagtattgggtagtgggccgagccgagtgacatacacccacattaagtgcatgctcacccgaggcgcacttaccttaagggagtgctgagggcactgccttctccccagcagcaaggatgcagttcgtccttccagacaagacagggagcttttgcgtagctcactggtccctgacaggagaatcatggccgcttcccaaagccgcattatctccatggagcctcctagggagagacaggatgctgggtattagaggacgacgtgacagacctaacaaaggcagcacatgctctgggaagaaggattcagtcacacacccaggagaaaagctggcccacatcaggtccctcaacagaagacaacatggcgtcccacatcggaagtcaacacttcaaggaggctgtcacagtggtgaaggggctgccaaggctgactcattgcattttaagtaaacatacacccccaagagcacgtgtcatcgcagtccaccaagcagtcacagcaagtccatggccgcttccccagagttggtgggagctctggaaagtcttcctggagtgggagtgatgctgagggttggtgactaggtggcccacagggtgaacacagtgcatgcccctctggtcaaccagtcacacaccctggacggtgctgacaccaacatctcttctggaagtcggcctggggcccagggagcctctcttcaaagtcttgtgaggtgacgctggtgacagaaccacagctgattccccagagttggtgagacccatgggaagacctcctataggtgcatgggaggctcggattatcgggccaggtgacttacagctaggtcagcgcattgtccatggcccgccatccattcttggcttttccacatggttgacacaaagactatctttcctgaagctgccattgtgtccaggaagtccttagaggtagcatttggtactgaaaaaagtgttgtccgtgaatgattcgtcataagtaaagcgaatccaccacgaacaacttctcttcaagtaccacagaaaagcagagacaagacagacaaggagtccccttccacttctccaaggggagtggctgccaaccaccatcctgtggacagagtggacaccgagcattagtgaggcagcttacgggtgtcctaggaacacactggagtttgggcaacccttcactcacctcccttggagtggtgctggcacagtcccccttccctggagttgaaattgtggtcctgaatccacacgcacaaggtttagaaataagaagagggaagccacttgtcacacgccaggagcactccgcagtgtgtagaccccagggtttctgaacagggccttggacttctcaacagagcacactgagttatccatcaagcacatcaaggtgccagccaggctcccgcagggcccactgaactagggaggtccagagggggcccccttttgccactgcaggtgcccctagagaaactgcccagctcaggcacgccaggctcctggtaggttccccatcactgccctgggtagattctctatcaatgcccttgtggtcagagtgatctttccaacacagaccacgcatcccccctgctcacaacccttccaaatcccccatctcactcagaataaaacctggagtcctgcctctcccagctcagacccagcgactcccagcagctcggttcaatcccactggccttcttgctttttcttaaagatgccagggggctttccatgggccttgccctcctcctgaaatgctcctaccccagaccttcctctggtccaccccactccattcccacccacatcctcagagagagctttccagacccctgtatttaacacaaaggtccacctgcttttacctctttctgtcactgtaacccgctttccctttccccataaaacctagcagtggacaaaattacgcttcctaattcatgtgttctcatccgtctcttccaccagaatgtaaagtccacatgagcaagaacttgatttcattcactgctctctgctaaggtccagaatcacctagaacacagtgtgcactccatca

SEQ ID NO: 1885718 - DNA, 4001 bp, Homo sapiens
acttggtctggtgttctcttccttccccaactctctctcacccgcagagctccccatccaccaggtgtgggcatgaaggagaggggagtgggagagaaagagacaggtctatctggttcctcagggattatgtcaccccctttcattcctccctgactttctgatcagagaaggccctccttagcctgaggcagggccaagcatagacccttttccttccctccacccattagggctattctgttgactctggccaattttccaaacccaccaccttttctcaataatcaaggcgggagcatgaaggaagaagatatattgagttcagaagctgaaactggctcaggaaccacggtgaacctggaagttctaagggtctccttgtgctggaaagagaactctggtttggaggggttcccaggcctctcactttaggtactgcaggacgcaagggatcatgtctgcaagctggtccagagatgggtactgatatctggaaaagagaggcatgttaaggaagataccaacctgccctcacaccccccacctcaggatgtcctactcattctctcccagaataaccactgccctccctttcctcctccccagtcgaacctttcccgcacctgtcctgttcctcacagtctggtgaagcagtaacgacctaactcttaccccaaagggaacacaggggctccctcttccattccaggggcatccacatgaacccgcacaaagttctgaatgatttcctgcatgtcctcgaactgaaacagtggctggaagcaagatttatctaaagagaacccacatcacctcaacaatagaatcagacagggactcgtgtcccccagtcagaactcacccttcctttcatgccacagtcagaccaggagagaacttctccttcccacactgacccctcccctccctctgggtttcatttctacccttcccccacagcctcttcccagacaggagtgggagatgaatgaaggtccttacagttgagtcccacatcgtggtaggtaaggatcgctgggcgtttgggtttgggggtgccatagacagtgaaagtgacagagccgtatggtgtctccacagagtgagtctgcaggaaaacagggcaccaagagctaggctcagaggagacgaggccagaaaaggagcaacaccaaggtcagggagctgggagtgggtgggcaagagggaaaagggaacaaagaattaaaaacaggatcagcaagaattgaggaaaacatgataccggaagatgagtttgaggataagaaagaataatgaagattagagagagaagaggaggggaaggaaggagaggggagagatagggaagggaaaggactagaatagaaggaaagaaagcaaagagagaagagagggccaagcagaggccatccttctactggggaagaggacagcccctcctcccaccttgggactgcccccacactgttacctgtccctggtccaggaggattcgggcagctaactcagcctcctggagagacacacacggattcacacagaaacacatgaccatgtggcgtcccagatggagagacaaacagacaaagagaggcaagtaaagacagaccaacaaatgaccaaagacagaaagagattgacaaagagagacacggaaaggatgaaggttagtgtagtgacgagacaagggcctgactcccaattatagtgtatggggagagagactagggtagtggtgaagcagtggtgtgagttagaataagatcagtacgcttgggaagttagaaggcaagggggatgcttagaggtctggaatttgggcatgggagtcaaacggtctctaataaccttggccgcctcaggcgtctgtcctggcaacagtggcttctcctctgtgatctgcacctcctgcagctccgccatggtggcctggcaggatgaggaaatgagactgggaagttgtctctacatccccacatcgcctcaaacaccaggcttcctctctcagcacaggaagatgcagggaacagagggacccaggggttgaagactactctagaacacacagagggcctttcctgcccccagctccgtttccaggctgatcggtggaagctttggaagaggaatcaggacagcccttctcttgatactcaccatccccactgccaccctcaacaccacacctccagacccctccctcctctgccctggaccaaaataccagggtggggcagaagtgtagctcagatttctcgggctatatttaggggccaccccacactctcaggtagggagtgaaacttgtagctcagtgactgagtattctaaaggacagggtaccaaaagacgggactgtgagagttcacaattgaccatgaccttcaattaaagccccaaagtcggcagctcaaagggggctaaaaatgaccaaagcaacatgaccaatgggggaggtggggaaaacaacataaaagggacatctgtccaaccaacccaatgcctcccttcctcccaagacccttcctcccaactctgaataaactccgcaagttcaacattagtgggtgaggagcagagcacctggacagacctgcacaggaaggagcctgcagcctgcggggtggggtcacttactgggctcctattggctggatgcagtgggattaggggtcagggttctcactccttctgactctggggtctgagaaaacacagcaacgaggtgaatgacatgggagacagacctggggtctttcagggacggaaagcctcagccaagacccagactcccagggtcatcaacctcctcgggtcactaaccctccccagtgtctgtctacccctaagtccagagaacacgtcctctctaggctcgagccggaatcaatataggctacaagggcatcagttcaggctgcgcggaggagagaaggaagtgctgatgtggaggtaagagggtggccctgtcagaacctccggattcgaatcccggctctgccactcccagtgtgaccttgccccagttagttactacatttggcctcaattttctatctgcagggggactaaacgcgggggaataggggatccccaaaatttttgacagctctccagtaagaggagggtagcagagcatggctgtttccctccacaatttaaaaacaaacacaaagattggtgccgtcgcttctctcctctactcagtctccgtgtaggtcccacgagtggagaaagggagaggagagcggtcccacaatcttctcccgttctcccccgacggcccgcgaaggcaagcgccatcgggaagggatgggtaggacagaggagaccggccgggcccagcacccggaacccgtccctacgagtccctacgcagcccgtccgcgtggagactgacacccttgcgtggccggtgccaagcgccccggaccttgcacacaacctcgcgcgcaccccaaacacgccctgcagctcttggagcctcagcctttgtgcgcagcaaccgagcgcccgctccgtgctggccctttcccccgagcctccagctccaggggacgcggatcaatcacaccgcccgccggcccggctggcgccttccaggccctacggcccctcgcctgcccctccccctacctgctgccgccgcggccgcttccaccttcacttgcctttgactcgggcccgccccggctcgggcttcccgcagacccgcccccggcccgccccagcccgcccacgggcgctaggctccccgcagacccgccccagacccccagtaaacacgccccccctttcaccccgcccagactgccgctcaggaaagggttgtgctggggccggggggcgaggggcgggcggctggacgcttccaggctctgctcggctcaccaaaacattccaccaccccctccccgcattggggcggtgtggggagtgcggggatccctcagccctgagagggatccctcggctgccctcagcaccgccccatc

SEQ ID NO: 1885719 - DNA, 4001 bp, Homo sapiens
gagaagctctaagacaatgggctatgtgtttcacctgatggggtccctggccatttgtaaataaatctcggatattagctagtttgtcatttatcttgcagtcaagcatacacaaaacagaaagacacacagtatgtttgcactttgaataaatgagattttgctgtatcatggcagtttataaagtattctcaagtctgttatttgacctaagatccaacattataatcgtacatttaagaggttacaatgtgagaggtactcattgagcagaattttctaataatctaatcaccttgccgatttgcacccagtgtccatttagaaacatgaaattaagctactggcactcaattgccacattgctagcatttaataaggactccactagatggaggaacaagggctctcaaaccaaataaccaacgaccacaagcatttcctgtcagacaagccaaggtcctgctggagctgcctctgaaggcagccggctgatggacaggcctggtcttccctctgtgtgccccactgccaggtggcaccttaccctgcgcaggcgctcagcctgcgcggtggtacagatgcttcactcacacttgccgggggctaaaatcacagcctatgaccaacctggcctggggtgttctgaggtagttcctgaactcgggatgcctgttacctactctctttcagaagtcaggacatgtaggaagtattaaaatatccatgcatcgctttcatcaataatcactgtaattgagtgcaaaataaaggaaacttgagttgctttatttagcttccaatttctgggaggctcaagaattataagtattctggacaacaaaagaaaataagactgtgcttacagatcttgttctgccatattcttgctttaggattgctattttattgttgccctttctgttacatgggatgtacacatcaggtgttaaaaggtacaatacattctacaactgagcaccactttctgtaactgaacaggcaaagaaattacactgaacatcagcatctggcagtatttttttggaaaaaaaaagtgactaaaatgggtttaaattgattaacactattaaatcacatctaatatttgatactacatgattcaatacagctatacgatacaattatacaaaatgtgttaacatcaaagaatacaaccaaaattaagatagcaaacaaaacctatataacttttttttttttacaggaaaatacttttgaagtatgcatgtaactgcccattcttttaaagaaaatctactgcaagcaaagttatcaacctccagaaaaatcacacgtagcattactaagcatatccccaaaaaagtgtacaatatgcacacttggaaaatacaaaattaaaaaaattgtaagcaacaggtgagcttcatatttataagaatgtgaaaagaagtcccatttttagcactgttgtataaagaattgtcttttgatgcgaagttcatgaattgtcctcctgttgggaccacactttacaaaaacactgtgtttttgaaacgagattacagagcaagatagagcatcttagcaatgtcatcttagtaaagttttttttttttaatttttactactttatcaaaacatgtcccttaggtgtgtaggattcatttttaaaattcttcctagaaataatatacaaaggagaggcatatttattcccaatcacacttctggaagatgcttcccgtggtcgagaagggtcttctctcttcttttcactggttgtttttggccttagcatgtgttaagatgtgagatttcaggttagttgactgagcaaacttcttattacaaccatcgaaggggcacacatagggcctgtctccggtatggattcgcacatgtgtgcgcaaattgaagtccagtgaaaagcgtttcccacagccttcgaacgtgcactgtcaaggaaagaccagagatcaacccactcagcaactctgaccagaccctgggagtcaggagctcactgctttgctagagaacagcctatttattttaccaaacacttttcattcctgccctgggtgaactttgtggatatagtctagaatcagcaggcaggttggacaaccccgaaaacccaaggagagccctcacgaactgtttaaaacacttggcaaaatggcaagtcttcctaaatgcaggctagagtcctagtgctgctgtaaacatttccaacagtaaaatacaaatgattaagggttctggtgtcagttgtcaaaaaagaaccacgttagatttactagctgcactgctagttctttcacttatttatgggctaaagtattacctatacttacactctagaaactttatcagttagtaattatactattaactaccaaaaataaattacttcaatcctgtaatgaatgaagtagaaattgagttttaggtatgctcttcaatcctgttctcctcctgccataaagtgtactccatcaacaccaatacattgcgtacccagtaccacagagtatagacaaggatgtccagagccccggcaacccttctaagcgactccccaggagaagttttgtttctcaccaaggagtaataagaccctgagtctctgggctggcgcctcctgcctcatcaccacaccacctacacttgcagtgttcagacaggcaaggcagtgtggggaagagagggaactggctctacctgaaagggcttctctccagtatgaaccagttggtgtcgttttagttttgaactctcaacaaaagctttgccacattctgcacagacgtggactctgggaccgtgggtgtgcagatgttttctcatggccgagttatccctgaacatctttgtgcagcccttaaaacagagaaagcagcttagaagttcacattgcaaactgttagaaaggattcaaccatttaacagcctttactgacatattaaaacaaaaccacctccccaaccccccattttaattttacttagtattacggtagaacattaatatcatttaagacaaaaagcagacagctgaaaaagtcatcattcaatgcaaaccctagttttacagatgaggaaactgaggcttagagatgtctttaagtagacttgcccaaggtcacactactagtagtagccaaactgggaatagaacccaacaccctggcttccagctctaccacagccacctcacccgactatgtcccccaaaatgaagtaacagaagcactgctaagcaaatggagttaaaatgacggtagtccaccactacctttggtggccccatattctgtgctgcaacaatggactgtcattctccatcgcctactgttccctcttctctctttgcctctttccccttcttgacagagaaagaagcaagagggtctccaaggaatggcaactacagaagaaatttattttgtgagacactaggaaaaggaagaagcaggcaaattgataccagtgcagggcgggaaaggcagatggatgtgtggcgctcgagaagcatgtcctcaacaatttcttctgcagttgttgcccagtaatggagtgaatggggaaatgataagacagcatgacagaaggacagcacaagtcactagacagctcacaggcagaagggagagggaagccccagtttttccgcctttacccctaggttgaatttccatttagaaaatggaaatttaaaaaatttaactggtacacaatgtatacatgcattgaaacatcacacggtaccccataaatatgtacaagtattatgtgtccattataaagaaaacttcagagaagctaaagggatggcataggcacttccagcctaactgttttcaaatgcttgttatttcggccctaatggagatacgtttacatttcaaatcgccacatcaagaacgctgacaaagaacaggaaggacttgctagtgcacagtcattacagggaagagaccgtgaaactaaatgtagcctgctccgattgttca

SEQ ID NO: 1885720 - DNA, 4001 bp, Homo sapiens
aggcgagcggggtgagccagggcctcaggccagcccagccccaccaccagcccgccgttcgtggccactcactctcatggcagtaggtgccagtaaagccactgtcacagatgcaggaaaagttgccccctggctggctgacgcagcgtccatgggggccacacacgccggaggctgctgtgccaggcatcccaggccccgcgtctgacccgcagccatcgatcactatggcaggcagtacagtcaggagtcaggcccgcccctgccccaccacctcccccaccaccccatgccgcacccagcacctctgcaggccccgccagggcacggctcgcggggcacggagcagttcttgccaccaaagtcatcagggcaggcgcagtaatagtcaccctccaggttatagcagcgagcgccgttccggcaggggcttggctcacaaaggtcgacatccacctgcagggtggggggtgcctgtgagagcctaggcccaggcccaggccgggaacacaggccaggcctctgtccatacgaaggtagatccctggggacccccaggcccctccgccctgggcctaacagtgccagccagagcccaagacccctgcccacctgagactgcccaggccttagctgaacgcagatacctgtgggcccccacccccacctccactgcagcccagcttcctcactgtccctcgggaggagtgtggccttggcccctgctgctggcaggaaggacagctcctgagcccctcacacactgcctggccaccctcagagccaagactgtgggtcttttccagggccagccactgccatgcttgcaggtcctgaggtcagacccctgccctgggccccaagaagccctctggacaggaggcccatcctctgcaccaaggccagggcaggatcgtgggcggccgagggtggtagggaggtgggtggggggaggcagggaaaaaggggaagtaaggggagggggtggtagggaggcaggtaatggggaggcagggttgggggaggtggggaagggggtggtagggaggtgggtggggggaggcagggttgggggaggtggggaagggggtggtagggaggtgggtggggggaggcagggttgggggaggtaggggaggggtgatagtgaggtgggtggggggaggcagggttgggggaggtggggaagggggaggtggggaagggggtggtaggggtggtggggaagggggaaggcaggttactttggaggcaggggggaaggggaggttgggggagggggtccagtaccaacagatggtcagagggaggcgagagcatcagccctgagagagatgcccactccgacccaggactcacctatgacaggtgtatacctctccaccatcaggcacccaccctaccccatgtgctctgcccaccagagccccctgccctccagtcccgagggagtgcacagatggacagataggcctgggcagccagcagcccgggggctcctagcccaggccaccaggaaacccatcacaacaagcaatggccacagggggccaagcctggtgacctgtgacagccccgcctgcccacctggcacccagtggagagctgagcctgggacgccttggggacaacttcccctgcagcacccctgggtcactcaggccccatggtcaggggacgaggcctgccctacagctcccagagcagcaggtggggcagggtgaccaggcagacctcacctcacagagaggcccggagaagccctgggggcagtggcagtggaagccgtcggccaggtcctcgcagaggccgccgctgtggcaggggctgctggcacactcgtctcgttccagctcgcaatgccggcctccgaagccccgtgggcacacacactggtacccgttcaccaggtcctgggcgggccagccaggtgagcgtcccgcaggcaccctgacggccccgcagcacccacgccacacaccctcctggccccgcctcaccttgcaggtgcccccatgctgacactgcccgcgacagtcgttgacgtctgggggcagaggagcagggtcagaggcggggtcccatgtgcctcggcccacccgccggcgcccaccccccatactgactgatatggcagttgatgcccttccagcccgggatgcaatcacagtaatagccgccaatcaggtttttgcaagaaaaagcgttaaggcatggcttcccttcacactcattggcgtctgtgaaagagacaaggtgggagccgtggggctcgggccctgcctgccccctgcagcacgggcacctggcacccgcagcccagcagccccagcagccccagcagcccccgcagccccagcagcccccgcagcccgcatgcgcggcccacgttcccatgcactcgctcggagcccttacccagctggcaggtggcccccacccactgctcggggcagatgcactcaaagccgtccacctggtccacacaggtgccaccggccgcacacgggttcgaagcacactcatcgatgtctgcagagggtggagaaaggtggggccctggcagtgtgagccgtgggaataaggtccccatgggcaggtggcgctgcaagcctgggtcttcctgccatttgtcctcgccaagccagccgcagccacacgtgtggacttgaccactgcaccccatccccagcgagttgccccactcccagacccccactgatactaggcaggagtcccctactcacgtgcagacactcaccaagggcacaggtgggcccgctccagcccgatgggcagtggcattcgaagccggacggcacctcatggcaagagcccccgttggcacacgggttggaggtgcaggcgtgctcagctgtagaaccgcggggagggggcagagctggcagccaggcccccagctttccacaagcactcctccccaagcccacaggttcccaagctgggggtcaggggcccaccacacaggacgccagagggatggggcctgaccggctccccagggaaccagtccctgcctggccagaatttgggtggccagccccccacgtacccttctcacagttcctgcccgagtagccgtcagggcaggtgcagcggtactggtcaggctcggcgttgatgcacgtgcctccgttggtgcaggggtggtggctgccacagtagttcaggtctgggggcaggggtgggatgctcaggggaaaagccggccccccgctcccccacaacccacacttcgatggcagagcattaggcctgccgccccctaccactacctttgtcacagagcaggccgccccagttggtctcacagttgcactgccagggctccacacaactgccatgcacgcagccggggtaggggacacactcatcgcagaacctcccttgccagccgtagctgcacctgggggaaggaggaggggcgcaagacccagtgagctgtggtgcctgaaagggtggcaggggagccaggcacagtcacccacgccacacccagggccggcgggcggcctcaggcctttgaactggagcagccccagccaggcaggggttgcagccctgccggccagccccactgtcacgggcattcccggccgctggctgccgacggtcagccccagctgtcccgtcactcctccctgagctattttgggattcacccgtgagctgggccccgagagcaggcaccaggaaaggaaggccctgccgggaccccggggatgagaatgccggctcggactcacaaggtgctgccagggccgggaggcaccaggggctgggtaggccagcgggcagcaggggagcactcctggctctgcctcggccatgtggccctgggcacagcacgtgccctcgcccccacctcaaaggcagtcatttcgctcgctcccagtaaagtcccacaaggtacccatctcacagatggggctactgaggcccacaggctggcctgggccagccctgcccagggtagttcc

SEQ ID NO: 1885721 - DNA, 4001 bp, Homo sapiens
gtccacagaaatgatttatataaaagaaacagatatgccaaaggaaacctctccttgagcaccccaaagaaggaccatctgcagaaacacaaccctgagggtaggtcagatgtgctggtcagtggagcaggtgtgttcctggggaggtacatgccccgtggtgggccatccactcccttcccctggatcagggctggtgacaatgccctcccttcaagctggcatgacatcaaggattcctccagatttaaaggaagtcaactccacaattcctgtgagaaataaacaggtctcaacctgggccaattccagggcccccaaggtctcctcttgacctcagaatcagcttttcttccctaaggtgtcattatatccaggacatcctttcagaataaactgcaggctaggggcaggcgtgcaggacacctgcactatctgtccagggcatgctggcattcccctgctgtgggctgggctcattcaagcccatcactgagtgtggcaaggacgaggcatccccctacagcagggtcagatgccgaaagagcctgaattacacacacgatccgttgggagcacaacgaaggcaaccacagacaactcacctgcatgttccgtgacactgtcgtggtgacactgtcttcccccaggctgccatcacattgaaaagtcctcctaagaagggataagacattgagggttagcgcaatcggtggcaaaattcagaaacatggggcacgcttagtgatcagccatttgctcgtgtctccttatttatgtccacagcaccccttccctgaagctgaggtctggaccagaaggcctccaagatgggatttgatactggaaaagaggttaaccaggtgtgtttcgtcctcaataaagaaacagaaacccagaaaacctctcttcaggtaccaccaagtaacactgacaagaacaccactgattccttccccaaacttgacattcagtcctggaagtcctgttaaatacggattggacactggggttagtagaacagatgacatcagtcaaaataatacagcacaggcttcgtggttaaccatagatttctgtccagtggactggagctgagagtaacgcccttccctgaagctgaggtctggaccagaaggcctccaagatgggatttgatactggaaaagaggttaaccaggtgtgtttcgtcctcattaaagaaacagaaacccagaaaacctctcttcaggtaccactgattaacactgacaagaacaccactgattcttccccagacttgacattcagtgctggaagtcctgttaaatatggaattgcacactgagcgttagttagttgatttgccggaagaagccaagagttggatgcatgctgcttgccaaccatctatccaagtaccccagtggagcagaccccacatcacgtctggaagttgacatcacagccagaggtggtgatgccataaaaaggctggtcacagcagctatcgcgtttagggttaacctccagggccatcttttctcagttactcaagagaggcacagatgccccaaagcaaggctgactccaccaaaggtcctgctaaggacccagtggagactgaggtgtgacgggccaggcgaccttggttgtaaattaaagtgcatacactcaggtcagctgatcactggaggactttgggatggtatagacagcatgccccttcccttgaacttggatgcctccacatctaggaagccctccaaggaaagagatcggagtgaaaatcagtccaactcagccacatttggcatacatgtcgcaaacgcctcgcagatgctctcttcagagtctaacagagtgcagctggccccagtttactgtctctttcccaaaaagttgacacctcttccaggaagttctccaagggggcattagatactgagggttagtggaccaggtcacaaacggcacaaataaagcgtgtgctctctggtcaaccatctcatgtatccaggcacgtgctgacaccacgctccttgtccgcaagttaaccctgctgccaagccagagcagtgtgctgagaagaaggctgccacacgtgagttatcgtcacacacaagacaaacacatcacaaaccccgctgggtcacactgagcgcagacctagtggcccccacccccgcagttgatgttagctccaggaaagcttgcaaggcgggattagatactgcaaagaggtcgaccgtgtaatgtgcgccataaataaagcgaacgcgccacggaccacctctctccaagtaccaagcagcagccgtactgacaccaggacagtggctcttccgcaaagctgatatcacctcctggaagtcttccaaggcgagatgtgatattgagaagaagtagaccatgtgtcctacgtcacaaataaagcgtacacaccatggtcaaccgcatcttcaaataccaggaagtgacgctgacccctggctctcttcctttcacctgctatcacctccagaaagcctcacaatgcgcatcatgaactaccagccaccggcaatgtggcaatgaccacaaacccacatccaatgccactaccacctccaggatgccctgtaagggtgggaccggtactgagttcttggctggtggaccaaatggccaatgtaataaataaaggactgggtctgcagccaaccacccggtgacctgcactgcaccctggctaccactcaggcctggctctcaagtcggcatggcctccgggaagccccagggctggctgatactgagaatgagtggaccatgctacatctgtcattcaacaatgcatatgctttatgctctaccatctctccaagtactgtggaatggcgctgaagccagatcagtgtgtctcccacgaaggtgactttgcctctctctgggaagccctctatgactgaatttgatattgagaagatgtggaccatattacatacgacacagagatagcgcatgttctatggtcaaccatcttttcaggtaccttggagagggctgaggtcagagccggtgtctctttcctctcactagcatcacctccaggaagccctctgaggcctgatgtagtattgagaagaggccaccatgcaatgtctgccgcagatgcagtggacgcagcacaaaggagcccctcaagaatggagatgatgctggaactagtgctatgactgacactcgttcctgcctacagaaagccccccgaggtgcacgctgttataggaaggtggacgaagtaacatgcgttgtaagtaaaacatatgaagcatggccaacttctactaagtaccccgaggcagtacttgtaccagaactggtgctttgtctcctaagcttaacataacctccctggagactttccaggctgaatgggatacttcaaaagaagtagaccatgttacatacgtcatggggaaaagacatgcagtgtggctgaacccttttcaggtaccgtgaggtcagtgaagaggccagaaccagtgctctgtccctgaggctggcagcttcttcagcaagttctccaagcaagggttctgggatggagatagggaagaagtgggccatggaggcacttcctctgtaaacatacacgatggggtcgagcagctcttcatgaggatcagtgctgagtccagagctgggacatcttcccccgagatggctagacttgagatggaaaaaagatagactgtacacgcatcagcaaagacaaaaacgagtcagtgcgtcttcaagtacctggagtggcatcatctcctggacccatatctgctcctacatgggcgtactgtcctgaagtcatctgaggagggctctgaggatgagaggtgacctgtttcacatccctcgttcatgaacatttgcggcaccagccaccgtttcttcaattactccagagggatgtgccaacgtgggcagtaggacaccttcctggaggtcatccttgtcctgaggaagtcactggaggctgtgtt

SEQ ID NO: 1885722 - DNA, 4001 bp, Homo sapiens
tcaactgaattgtaccctctttgaaattcatatgatgaaaccttaaattcaatggatctatattggaattttaatgaaataattaaggttaaatgtggtcataattgtaagaccctaatgcaatagacgtgttgtctttataagaagaggaagagacaccagagacctctcacttttcacgtgcaggcagagaagaggccatgtggagacatagtgcactagaaggtggcccagtgcaagccaggaagaagccgcgccaagaaccagccctgccagcacactaatcttcaacattcagactgcagaattttaagaaaatcaatatttgttgtttaagccacccactcctgttgtcttcttatgaagatccagacagactaataccacataactctgttagtgctgtcccctggatggagaattagcctcctgaggctgggcacatctctcagatttccacataaaacaggtaaaaaatagtagttctgatataaaaacttgtcatgtccctgttggccaatttctgggcaaggtcttttaaataagccaagtttgcggggaaatggagaccatatgtttgtgggactctaaccgtggaatctactgcattgctctagcagaatcaaaaattgaacaccagtgagctctttattctcattaaaatgtgtgtctttggaaatgttaacattctgtccagaatctgtgctcacaaacaactgtgtttcttagtgcactcttggcctggtggagccctcgcagaccctctccctcacctgtgctgtctctggattttccatcacaaccagtgtttcctgctggagctggatccacgagtccacatgggaaggactggagtggaccaggcgcacacgtcatgaagggagcaaaaattcccacccactccttatgaatccagtcaccatctccaaattcgggtccaaaaaacacttgtttttacagtggagctatgtgagcaacaagctcacagccatgttttaaagaagagacagagtgaggggaccacggtgcgagctcacacccaaaccttcctggaggggtgcacaggacagcaggagtgccgatgatggaagggggtggtctggattccagggcacacgcaagaccattgtagaggcactcaggtcacccgggggctctcaggaaccatcgaggaaaatcaggacaccagaagagactcggtacagcagggggctcaggaccattgtggggactcagaaacagcaggttctaggctcagcctcagggcaggtgcagatggggtgaaaaggggctggatgaggggttttgtgtcaccatcatatttcaccactagacaccctccactacatgtgttctactgcatatgagtgtatgattagaaaatcatacttctataaatatataaccatacgaaggtgtgtcaagttttcctcttcaacttctatcggccttgttcgtaaggactaattccctgtaattacttgaggacctcataaattgtggtcagttttgtaggtttcctctctttccttgtctccctttccccttattctctctcacacaaatggacataatccccactccacacgcaaagaaatctataactttcattacctgatgtattgaataaaattgattaatgtgcagctttcccatctttgttgttgttcatgctgctgtaagtataagaaccatgagattctcagctgtgtacttctccaagctgagtggcagctttgcttatcatactgagatggccaacaatccaaatgtcaatcatcagcttaactggtaaacaaattgtggaaaagtcattcattggcatactactgactgtgaccacaatatactaatgttggatacgctcaacagtatggttaaattctcatatggtgagtaaaatgagccaaacaaataaaagtacacacatatgataccacttttatacattctcccatccaagtactaaccaggcccgaccctgcttagcttccgagatcagacgagatcgggcgcgttcagggtggtatggccgtagacacacttttatacattctatagaataaaaactaaagttacataaagaatcagtagttcactgtgaatattatagaagggaaagtgtagacaggaggaattacagaaaagagaaaattttaagcataattgacttgttatctatattgataataatgatgtctatgataatatttgtacaattgaacacttcatgtgaagatctttttttttagtttaacatcattaaagatagtactaactgtaacgtgtgtaatttggtagaaacggagtcagacagagataaaatacataaaaagtcagagacacctgaatattcacatgagtgagcctgcacttctctatgtttttatgaaaacactacaatacagcaaaataatgacatcattttatgacgtgaagggggtttattaaaccactccaggcacgttgtattagtttgttttcccactgctacaaagaactacctgagtttgggtaacttataaagaaaataggttattgactcatagttctacatggctggaaaggcctcaggaaacttgcaatcaaggcagagtgtgaaggggaagcaagagacatctcacatggcagcaggagaggtggggagaaccaccacacactttaaattatcagatctcctgagacctcaatctgagacctcaatcatgaaaacagcatggaggaaccaccccatgagcccatcccctctcaccaggtccctccctggacgtgtggcaattccaattcgagatcagatttgggtggggacacagaaccaaaccatatcacatgtccagttctgtcccagagttggttcaggaatcagatgtgtcctgttaacaggagctgtgacaccaagctcccagcaccacttgtagttgacgtcatgcaaaggccaagatatctcaactaagatttagtgtggatgtgatgttggatggtgacacaccctcagaccaagtggatatggaagggataattatctctattctagacgtgtctgctgagagcagggcagttctctcaggaaagtgcaaaatggcttgatagaacagggaaagagagggcctcagggtttggtggtgggggcagattgagtctttccactcacagaaaggggtttatagggtgggaaactcccactggcttcaaataaggaagctcctgtgattctggaccgatattcaccttgtgtgtaaaaaaggaggtaatggaggaatgagccttaagctatcagcagtcacacaccaaaatacagtgtgacaagttattctatgtagcaactataaaaataatgaataaaaaacgagataagggttcaatatgatgggcaacactcaggtctacagaaaatgagatgagtgtttataagtcaaagcaaataataatgagaagcaggaggagggtgtgcagaattagacaggggtccaggtccagtgacttgggtggaaaccttttgctattaaggattatcagcttagtctgaaggtcttaggtcagctatctgtttaaagacatcagaaacaccagagaatctttgaggatgctcagattaacatctcctattttagtagccttgcagttgtgtgaaaaccttttttatcttatttcattttattatttatttatttatctgttgagatggaatttcgctcttgttgcccaggctggagcgaaatggcacgatcttgactcaccgcctcttccacctcccagattcaagcgattctcctgcctcagcctcccagtagctgatattacaggcatgcaccaccaggcccagctaattttgtatttttagtagagatggggtttctccacattggtcaggctggtctcaaactctcaacctccggtgacccgcccaccttggcctcccgaagtgctgggattacaggtgtgagccactgctccgggccgaaaatcttattcattcttttttgtttgtttttagagacaga

SEQ ID NO: 1885723 - DNA, 4001 bp, Homo sapiens
acaaaaaaatacaaaaattggccaggcgtggtagcatgagcctgtagttccagctattcgaaaggatgaggtgaggtgggaggatcacctgagcccggggaggttgaggctacagtgagccgtgatcatgctaccgcactccagcctgggcgacagactgagacactgtttcaaaaaacgaaacaaaagcccacgaatgccttatgcctgctcacctcctatgttttccagtagatgaacacagcaaatagacttgcatacagacagctacctctagagccgccaaaggagacccagccatgtcaacccagtcattgtatgcagaaatcaggagtttccaggggagagaagaaaaaaaggagaaaaccagctcccaaccttgctccagcttctgtgtccctcttttccggagctggcagggctgtgcaatcaaaagcagcctcctggaactgaaaaatacttgtgttcaactcctctctggagaagcaatcggaggggagccaaagcaaacactcctccctcctaaggctccggacacacggctgaacccaaagaagttgggaaggaagtaagatctatcctcacctcctgtctcacgcttctacaaacacagatggtgctgctgttatctgcgctcatgctgggacaaggctgcgtcttgaattgtgttggggtgagaggctgagctcaagtttttgcacagcatgaaaaaggaaagatgcctgtaatcaagtcagaaagcagaagtgtctggctgggccaccagagcttacagggtgccctcccacctatgaatgactcaccaaagaaaaaggcccttagctctgtagaatcaagggaggggagatattccactgggttaacttgggaatggtgctaggtagaaagaagtcaggaggtcaagaaagaaagaagaggaaacaccacatatcaccttaaccctatggtgatggtgatggtggtggtggttgttgttttaatcatccttgatggcactccaacctacatcctgcaatccacacagggctgtttgatgttgaggcttggggggagttcaagtcaagggaaggacatcctgttaacagcattgttggaaaaagatcaagaacaaggagatggaaaatagctgtgaacacctgataagcctgggcgccccccgcccggtccccctacccctgcccgcttccttcagtctcaggtttgtgagactaaagtcttgtgcacaggcataggggttgacccagtgagtatctgtgtcaccccagagtctccaaagtcttcatcaccgcactctgggaatattacaccaacttcctgcacccatattgcttttagtttaagtagctctcaagaggcacaagtctccatcaggatactactgggatacttcctggaatggcccaacctcccctatgtaccaacccctggtcacttcactcattaggaatcagctcaaccttcaccttaaggaagctgccctgcttgtccacactgcacccacactggggcaatgtccggtagtattaggagagatttcagtattggcctctctttctagatccagaaccaacagaagacagaggcgattacctttattgatgatggtactgaaaacatctgttctttatttaatacttttttttttttaggtagagacagggatcttactatgttgcccaggctggtcttgaactcctaggcttaagcaatcctccctcttggcctctcaaagtgctgagattacaggcatgtgccatgacagcagacctcatttagcacttcttatctgagaaactactatctaaatgctgtccacatattgtctcattgaatcccttcctgtagcttctgcagttgccagtatgaatgctattttaccaaagaagcccaaacctatgaaagttatgagacttgtcaaagggtacacagcagatctagcgacagtattctcccatccaagtactaaccaggcccgaccctgcttagcttccgagatcaaacaagatcgggtgcatttagggtggtatggccgtagacgacagtattctcaacaccctcggcctggcacagtccaacgcacactgtaaggattcagtagctttttccacataaggaataagaacaagtcacatcaagaagacaacccaggcatgagaatcttctcctccaaccacctgaactctcagttaactgactggtcatcttaatttctttcaggaagtgaaaacttgttaatttgcccatccatctgcaagcagctgctatgcccagggccttgctctgagacacaggacagatgtgtcagtgaaacaggaaattttccttgacccctttgtgggcttcatgacaggggtgcctcacttagccctcagttctcaacccctcgagggagtgggagcacacaggcaagcgggcacaggagctggagtgatcgcttttgggcaccagcaggagaaaaactccatgagggtactgcggcagcatctaaggggggagtatctgtgacccctgaagctccagagtgtgtttgttacactgcgctcctttagcttaagtgtttaacagctcaatagaccctctgccttttcatgagggcagagagccagtgagacagctttctctatcctgagctcttacctggcatccaggaaaaaaatcagatagcacaaacgaattgaaagatggtaaatgcagaggattttattgccgatagaagtggctgtcagtgggaaggggagctggaaagcagatggagcaggaaggtattccacccctgaggtctggctgtccccagctgactcttctctgaagtcccgctgtccagccgtctctctaaagtaaacctgcttctctctgatgtctggctaatgcttctccccttctctgctctctgtcagtagagcctgggggttttaaggctataggatgggggttggccaggagtggttttggaaaaggcaatattccagcaggaaaatgatgtaaagttctcactttgggctgcggtttcaggcttgagggtggggccctcgccagggaccccacccttttctgcctagaatttctctgcctcctgtccctatcatcagccaaggttctggccctctggaagtttcccatttagtaggaagatgtggagatggaggggaggtggacaagagaagggataaggaagaaggagaaatagacgaaccaccagaaaacaaaggccagtgttggaacagacccagcaggtacacaggcttggaaatgcattctttagagcataaaggctgatgtggatgagggcagcaggggaacaggggttccagctagaagggaacatctcaaaagcagagtatcttttgttcgtttgcttggtggtggttaaatatacacaattgttgatttttaagcaatttttaactgtatagttcagcagcgttaagtacattcatactattgtgcaaccatcacctccatccatttctagaacttttttcatcttcccaatctgaaactctgtacccgttaaacagtaactccccattctctccttccctcagcttctgacaatcaccattctactttctgtttctactgcaggtaactgtggtataataaaaatattatttggtctttgtcctctgtgcttggtacagagctacaaaaatccttgggatttcctgagtgataggaatatctcatcatttcctaaggggcccctttccaagacaccagagtttatgctaatgaggtgacataggtagccctcctagacagcctcaggagggggctggtcaccagaaagaccagggattagaacttggaaatgtacaaccccatccctctaccccctccagggagtttatgctaatgaggcaacataggtagcgctcctaggtagcctcagaagggggctggtcaccagaaagatcatggattcgaacttggaaatgtacaaccccatccccctacccactccagggaggggaggggaggggagggggctagagaccgtg

SEQ ID NO: 1885724 - DNA, 4001 bp, Homo sapiens
tagcacttttcaagaatatatcataattaactatagtctccatgttgtataaaagatctcttgaaccaaagcttctttcaaaaaagggaaattaaatggaatttagaactaccaacagatataactcattaatctttcaattcttatattagatataatactacagagatgtcataacgtttatcacatttatgaagcttgttttcttatttttaaaatgcttttaatagtaaaaatcatttattcccatatcttacatttgatttctaaatttcttaaagagaaacacagagaggaaaagcacaaaagatcttcatacccgatccatacagtctcttcacttctgaacggggaggaaagcgtcgactcaaatcaggtgaaatgtgctgatacatatagaatgggttatacacatcatagctaggtccgtgctgggatgaactggaaagttctacctttcgatctccaaaagatgctctggcagatcctgaaagcaaatgtttctaaaagtttataacatccttttcttggagttattagccaacagctggtacacccagggtaaaagaaaaaatattttgtctcaagtaatactaaatcacatgtctttgatagctaaaaagatcagcacatatttagggagttctgtgtgaagtattatgccaaggatcagccattaagcctgcatttaagacagtctggtatatttctggcatttttctttgccccatagacaattctgtattgtgtgatctgagtttcctcttatttttctacttatatatagaacatcttttaaattacaagattggggggggagatacatccttttcaagaagacgtagaacatttattaaaattgaccacatgctgagatacaccgagaaactctcaaatttggaaggactgaaatcatacaaagtacgttttcttactacaatgcaattaagttggaaatcaaatagcaaaaataaaaataaaaactatttatatggaaacactaaagaccaagaataaccaaaaacttaatctttaagaagaaaaacaagactgaaagattcgctctactgggaattaggaatataatattggtaagtgatagaaaaagagatcaatagcaaagaaaagaaggcctagaaatagacacccgtttcatgaacacttactttataattaaggtggcactgcacaagaaagaatgatcttttcactaaaaggtgataagacaactggatatcaacagggaaaaaataagcctgcattcaactaaagatattcacaaaaaaattagttccatggggattgtagatctaaatgaaatattacagacaaaccaataaagcttctatattcaggttaactgataagaaagttttcatgaccttaggacagggaagcatttcttaaatggaacataaagagcattaatcatatacatacatatatacacacacacacacacacacacgtacatacatacacacacacacacacatatatatatataattttatttatttatttattattatttttgaagttgattctcactctgttgcccaggctggaatgcagtggcatgatctcggctcactgaaacctccaccttctgggttcaagctattctcctgcctcagcctccgaagtagctgggattacaggcacacgccaccacgccagctaagtttttgtatttttagtagagatggggtttcactcaccatgttggccaggctggtcttgaactcctgggttcaagtgatccaccgcctcagcctcccaaagtgctgggattacaggcatgaaccaccacgaccagcctaatcatagacatattttaataaactaaactacattaaaatttaaaattcccatttgtcaaagactatttaaggtaacccacagagtgaaagaagatatgtgcaacaagtataactgacaaagggctcatatgcatccaagtactaaccaggcccgaccctgcttagcttctgagatcagatgagatcaggagcattcagggtggtatggccataaagggctcatatccagaatacatgaggaacacctacaaatcataagaaatcaataagaaaaagacagacgagactatacataaattggcttaagacattgataggcacttcagaagacaatcaatctcattagtcatgaggaaaaaataagttgaaaacccaaggaaataccactacacactcaccagaatggttaaaagcaaaaagacggacaatagtacgtgttggcaagaaagtagaggaatgtaaacgatcatactctgctagtggaaatgtaaattgatataatcactatggaaaaagagtttggcaatttctactaaagccgaagatatttatattctatgacccaacaagccattctgaacatatacacaactgaagtgcttgtacatgtgcaccaagagataggtataagaatgttcgtaagtattattacccataatagccaaaaaattggaaaactcaaaattccatcaacagtaaaatagatatagtatatacttactacatacaaattccttataatatgctacacagaaacactactgtacactatgccatttagaatacagaacgaattataatatacacttactgtacagatacaaaaacaaactaaaactactgacaattacttgaattaatctaaaaaacataatgttgaatgagaaaaccataaacaaaagaatacagactgaataaattatttatattaagttcagaaaacagaaaaaattaaactacaatattcagggatatgagcttaggtggtaagaagaaaggcaagagagtcatgattgtaacaatggtgacactgaacactctagggtgactgaaaggcaaaaaaatggagagaagctatggggttactagtactactctatgtctttacctaggctgtacctacatgggtattctgctttgtaataaatcactgagctgtatgtttctgttttgtgcatttttctacgtgtataatatttcataatttaaaaaagaaaatataggtcaaattcctttcaaggttaataatcatgttgggaataatatgtagacataaagctaaattcttcaaaggtttaaattattgtaattctctgtataacaacattgtggtcaactatggaccacatatacgacagtggttccataagattataatgaagccaaaaagttcctatggtctagtgacatggcaatgattgtcatcaagatacgtaggcctaggctaatgtggatgtttgtgtctaagtttttaacaaaaaagtttaagaagtaaaaaaaaaagtttttaatagaaaaaagcttatagagtaaggatataaatatttttgtatagctgcacactgtgtttatatttaagccaagtattattacaaaaaagtcaaaagttttaaaatatttaaaagtttaggccaggcatggcggcttacgcctgtaatcccagcactttgaaagggcgaggtgggcagatcacgaggttaagagatcaagaccatcctggccaacatagtgaaatccagtctctactaaaaatacaaattagctgtgtgtggtggcccgcgcctgtagtcccagctacttgggaggctgaggcaggagaatcgcttgaacctgggaggcagaggttgcagtgagccaggatcgtgccactgcactccagcttggtgacagactgagactccgtttcaaaaaaaaaaaagtttatacagtaaaaagttacagtaagctaagggtgatttattgttgaagaaacaaaaatatatttaataaatttagtatatcctaagggtacagcatttataaaatccacagtagtatacagtaatgtcctagttttcacattcactcactactcactcactgactcacccaaaacaacttacagccctgcaagctccattcatgataaatgccctatacaggtgtgatatggcttggctgtgtccccatccaaatctc

SEQ ID NO: 1885725 - DNA, 4001 bp, Homo sapiens
agtgagctatgggctccctacatcccaaggacatctgggaccagtctcttcagaaagccatgacccaaaggacttggacaaacagttcacagaagataaaatacaatttgttaacaaacataggtcaaagtgttcacccatcattagtaattaaagcaatgcaagttaaagtaatgcaaaagtactttataacagagacaaactagccatatcttaattaagtggtcatacattgctgaacattgtaaaatgctgtaagcttactgaaattattcaacatccatacaaagatccatagcctttctttcaagagacttaaccaaaggaaattcattcattcattcaccaatccatccttccgcctatccttccaccctcttatccatcagccaaacactcactcactcgctccttcctccattcttccatccactcattcatcatttatttatagtctacaacatgttgggcatcagagatacaaaggccaattcaataagctccttgcccttatggggctcacagtctagcaggggaaactgatctgtagtgaagcaatgataatttctgggtggaagaacataattcttaagaatgaaaaaaagggtgttttaagcagttagttgtggcattattcataatatttttaaaaggtggttatacataagaataacagaatggttctgtgaatgatgccatagccactcaacaaggcacaacgcagcaagtgaggttatgaagattcatggaacaagggaaaatgttgatgacagaaaattaaatagaagaggcaggatacaaaaaaaaaaaagtgtatgtggtgaataatggcaattaggtttttttaaagaagggatgctcattaaagaatagacactctttttttaaaaaaagtatgcctgtaagaatgtaaaatgggtgacatgtcagaatgttgagtggtgcatgcatttcccactgctctaggtcaagtgccatccacaccatttatattaggaacacaacgggacacagcaggattcgtggcctgtctatcccagaggtcctgaggccaagcttcccaaggagggagttgggagtcacaagaggaggccaaggagagttgtagctcctggtgtcaccaggaaaggatttgtgtgtggggagcatgcaaatgacaatgtcaagagacagaattaattctcattgttaaaagtttaacgaacacataaagataggccctgaccagacaggagcactaggatcccaactcggaccttgtgggtctggtacagaaagaaccgggtagggagcacgtgaaggatgttttatctctggcttttgtgccattaggaaccctatcccgaatctcagcatcccagaactaaagaacctttgaattacagatacaaaactcttaagggtcaaaaccctaagagccctgatcccccctcatggcctccacatttccaaaaggacacacagaattcatccaacccaaacccacccagcctccagggcaccagtgggtctccccagagctgctctcattggctcagttcgacccactgtgacccgtcaggacagcccctagatgttgggagcaggctctcctagcagccaacgtcgcttgttccttccaatttcctcttggtgcatgcaatgggccctcccttccccgccttctgcacactttaagtcttcctgagcctctgctgactttttttaacagccgtacatgagttcttttgaaagaccctcccggtcttcttctgccctgaacccctcccgccccatcctcatccaacagtgacacagcttgtcagggagaagcttcagcaggtgtccccagggataataagtgcacccccagacctcagtccagccaaggcatagcctggagccccagattctgaaagagaagaagagcagacccctgaggccccagcaccacatcaggcccacgaggcccagctcatgtggccctgacacgtggtactggaggctcggaaggtggctcctgacacatgaattccatgtcctccgccttccaaatgctgttgccatccactcggccggagctagaagcgtgggaaccacccccttcttcttgcctccctccctccttcatatcctgtctataaccccatagctttgattcctgagcaccccactttgctgccatcagctcagacctcaagcatcacactagctaacagccccatccatgcctgcgcccgcactccccatcccacccagcgtctacagagtcactctgagcatgacgcctcccactccagatggcctggccccaccccactcccctgcctcccacgtgctccctgccacaagtcctgagtccatccaagctgtgctcctactgctccgggcgcttgttaagaatccagtgtttttatatgtcccaaataggaattgagaggtcaacaagggagactttggtccttgcttttacagacaaacacaggcacacaacacaaaactacacacatttcctccactacagagaaaggagactcaacagaaccggggaggccctgggggaggactgtcagcacgagcaactctccagatttaccccggcagtcccccggagggcgagtcagagaagagacaacctcgacacagcgaaacgcaatcccgccaagttacaaaacacgtcgtgaaacagccgagaagacagagaggccttgaaccaggctctggggatggcatgtcaaggaagccagggtccccggaccacttctgcaaccccaggggtgctgaggtgcacctgctgcccagggaaacctgagttgagaagggtgggcgccctgccccatggaagaccaggccagagggtggcctgggcacactgcagagagttgcaagaacaaggtttctggtggcttgcccagggctcctgggtcccggggcttctgggtcccccttctcaggtgcgcctggccaccttctggcctttccctgcaccaacccctggatgtgagtaggtgccacacccagggtggcacacagcaggcggggcccatgctccacccagggcctattgctccctgaccctctgctgccccctggtgggcaaaacctcctgtgcaggtgacccatgccgcgggagtggccaagctacccaacaggcttcacaccactcgttcatgcaaccttctgcggggctcagggtccaagcccttcctgcctatccaggccatagatggggtaccatcaacagagacacataagatcaactctagtaggcagctggtgccactccaggtttacagatggggaaactgaggaagagacagatgcagtgaaatggcccacacagccaagatagggcaacagcaccccaagaccagggtcttcctgagccagctcctccctgccagggcaagtgcatgtgacaagcacatgacatgcctacagccaccctccctggggaccacttcattccactgtctagaacacaggactggaaagaaggttccttcctctcttccctttttccctccttcctttcttcctaccttcctaccaccctttcttccagtcattcgttcatccatttagatctgagtcctttgtttatggacttcagtaacatagcttgaaattaatcatagcctttggcctaaaggcctccattcacaagtcctatttattgaccgttacattattttattctttattcatttctttttcatttcttcccaaattgcatctttctttcttcctctcactcttccttatgtttctctggttctttctccttctttttttttttttcttttttgatctaagatagtgtcttgctctgtagcccaggctggagtgcagtggtgcaatcttggctcactacaacctccacctcccgggttcaagcaattctcctctctcagcctcccgagtagctaggattacagacaggtgccaccacgcccataatttttgtatttttttagtagagatggaatttcaccatgttggccaggctgatctcaaactgg

SEQ ID NO: 1885726 - DNA, 4001 bp, Homo sapiens
cgcccctagctggcggccgcgactctgcgcctgcctgggagacagaccaaactgcagctccctgcagaactggctcctggagtcccgcccacgtggtgctccttgatagggctaaaggctttcaatttgtccaatcagcggccgcgccccaacgttgccccgcctttgtctccagcggactggaaagaacccaccattgtgaagcacagaaaattgcccgcactcttattggctaggttccccgacttccgctctcggttggtggttggctttgcctgttacctgtgttgcccactaccactcgctccgccgagccccaaggatggatcgctatcccgtagccgggtgttccggagcgctgcgggcaaagcagaccgccttgcgcctattatgggttgagtggctctgtactctagatcggctctgtcacttactaatgggccgtgttgccttcgcgactgcaggttttcttgcccttggtttatcttttgcccgtgttcctttaaggatttaatgagatatgtatgggggcaggcttccagccagtctagtgcttcgcagcacattcttatctcatattttatgacaggataaggccctgaattaaagaacaatcccatggagtttacagcaagatcacagcaaaggaacccttgtctctatcaccagcccagggctgaatcttgaaaagcagagataaagacagtgattggctgaaggggatatgggggaggacagtaagaaaaacttacagattcatccttcccataatgtcctgcgatgtatttccttcaccacagtgccttggaagcattattttttcccctcctagcccttaaggagggagtccaggcccggcgcggtggctcacgccttgtaatcccagcactttgggaggccgaggtgggtggatcgcctgaggtcaggagttcgagaccagcctggccaacatggcgaaaccccgtctctattaaaaatacaaaaaaattagccaggtgtggtggcacatgcctgtaattccagctactcgggaggctgaggcaggagaattgcttgaacccgggagacggaggtagcagtaagctgagatcgtgccattgcactccagcctgggcaacagagcaagactccatctcaaaaaaaaaaaaaaaagggtggggggagtccaatcattcatccgtagttctccatagttctcccagtgaaaccttattctccttctaggcttttcctgaactgatgaggattctttctttcttcattcctgatgttgaccacagaactttccccttgtgtatccaaagcctgattattcccataagggctctgtgcaaatgccatctcttccaataattcctgagacctctggatgaaaataatactgttacattccaaaatacaggttatctgcatggctgccatggcatgtaacaatccccaccctaggcactcagggtgaaggacttggactataaacccaatggagaagatagcccttcaacctctgtgacttttctaaagctactttcccccctttttgccttagatggaaacagataagcaggagaagaaagaaggtaagtgagataagaggtgactagggaaggggagatggcacattgactactggatgagaaagggcctgaatcccctctttctcacagtcaagattacagtgggcatctaagtcatctttgtctttgtgacacccaccccttcccaccacattcatcttcaggctggacataggtgccactcaataaatgctttttgaatgaatgacacacgccagaagggaatccacacaacatatagatcatttattttccttctagtcccgggttcagtacatagatggcttttcttcaccctttgggttgacaattttctccaggttgctgctgatgatatgataaagctcagcctgggagaaggccagagtgcaagagtcaggttcttagccaatcccctgcctgcccccactcatccacctcccctaaagccttactccacactcacatagaaggccctcaggtccagcaccatggccctgagctccccataggctgcctcatctcgctcatgcaccaaggcccggtaatccatctgcaatgtgggaggcaaagctgagtcagtcccatgggaggctgggacatgagtctggtttccttttataggaaataggttaacttgagaatgaaccccttcttagcaccaagaaataggatcccaaaggactgagcagagaaaagggtcaaggttgttgaagcccaaaccagtttttctaggtaatgcttttagcttaatattctccacattgggaaagtcacaaacaagacaaggaggacttcttcctccacacctcctcgtcccacacccagctaaaaggctggtggactatccactcactacatgagtctccttggaggccttggccacagcatccccacgttctgagaagtacctgccagaagcaagggaataccacaggaatgagtgttcagggagatgtactccctcagacccttcccaaagtctcccatcatcctgatagggctgcccagctctgggggtcccaaagaaatgctcctactgcccccaatgctggtcctccagctgccctcacttggaaatggttgtctggaaagcttccactttggtcttgacggcattcaccctctccagcaccttctcctgtggtgacacgggaggcaaagacaacacttcatgtcctccccatttcatacactatcttcctcctcctcctggttcatgtctagctcaccccctgaggctctccccactctaagtatcttcagttacccttttcttacctggattgctaccccaaaatcatttccatcttcaatcttggggatcaggtgttggatccatgtaatcacctgtgttaagaggtatcatgtaagaatcattcaacaaacatactgagttcttcctattactgtcacttcctaaaaaaagttatatttaattgggtacttattacataccaggtactgtgccatgtatttatttcatgtaatcatcacagcaaccttcagagatatgtatttattgtacccatttaacagatgaaaaaactgagtcacagaatgtctaagtgacttacttaaggctaccagctaggtaactgatagaatcacgatttgaacctaagcagtctctctctagggtccaatcttttaaaacaattcactcactatatcataccacctctactatgaacccaatacagcagtaggttctgaggttacagagtggatactgcacagtctctaattttgggggtaccgttgtgataagagaggtctaacagaacgaggagaacaaaggggatctaagcccaaggcacagaaggaagttttctttttcaggactaggtctctgtatgaaggacttgtatctacggaggagtccagggcctcaccttgtgtgtcttctctttctgcttcccccatttcccaggcttaccagaatgcatttctctttgagagtccagacttctggcttaaccagggcaagcagggacaggactttctcattcccagggagaaatccacacttatggactgtgagaaagaggggattcaggccctttctcatccagtagtcagtgtgccatcaccccttccctagtcacctcttatctctcttaccttctttcttctcctgcttatctgtttccatctaaggcaaaaaggggggaaagtagctttagaaaagtcacagaggttgaagggctatcttctccattgggtttatagtccaagtcctgcaccctgagtgcctcacctcatcatccttgggtggagggtctgggatggggatgtccagtggggcccggagggaagtcaagtcagccacattgagggagtcctcctgcacagagctcactgtcaagggctgcccaacctcttcccttcatcctaggtcacagccttccctccatacatcccacttgcactctgcctcccaaccta

SEQ ID NO: 1885727 - DNA, 4001 bp, Homo sapiens
ttattacaagccttcagattttgtaaaacactttgaggctttcctggaacaaataaagcatataactgcacattttggtttctatgtaatacataacccatctaggaaaacgatcctgggattttgctgtgcgcctatctgaaatggtttccactgatgaacttaaaaataaccaaatctgaaattttaactacccacaatgccttgaacttgtgttaataggtcaggcaatgaaggggacaaatgaacaccttatgacaaccacttgagtagataagcaaacctgggcgtcttcaaatgtatatctccctccatctttgacattttgactggttatctcatagctgtgagaatccaggttgattgcacttggagcccctggagccagaaactcttgccagatttcttctaccctcttggccacatcctgtaggggttgtttcttaagatcttggacagccagccagaacctgaagtgggagcagaaacacagtcagttccagggggctcagcatcgggatgttgcctgagatggccccagagctgatgtcccatgaaacccattctgctgcatctctcagcctgccctgatgccactacatgagctgcaaagaccatggagattgtgaaaacatcaaaggtgttcctatggtgcagaacagaaaagaattgcatattaaaagatcaatgtgcttctcgttatcagaacgggatttctctccttctacatgaaggtttctcaacctcagcactattgccacttcaggctggataattctttgttgttgaggctattctgtgaaatgtaggatgtttagcagcaaccttggcctctacccactagatgccaatagcaaccccccttcccaagttatgacaactaaaaatgtttccaaacattgcccaatgtcccctgggagatgaactcattcctggttgagaaccccagtgctacatacatgccaccatgcagacagtgtgagaccctttgtcaaatctagttgggatcaagtgatggcatcaaaatggaggagagatcccagaagcaggcagtgtcctggaatcataaagactatctgtgtaagaatgaaccagccattcctattatagatggagaaactgagccaattcacatcagtgctcagcacggtgcttggcaaatagtaggtgctcaatatatgggtttcagagtgaagacggacgcatctggagcaatgctgaagaggcatatgttgaaaacttctctgcagaatggttctccttctgctgagagcaagagagaaaaatctgctcacttccgtatttgcctctgtttaatccctcagcatccgcatgggagcagtgagctcttttctgctgagagcagcagcagccagagccaaagcttggacaacagctaccgggtcttaaggatggttcccaaggcagccttgcagcaggatccaggtctgggtgtcatatcctttgccctgtgcatggacaggccagctcccccatcagtgagtaagagagtaggtcctgtgctggttccgagagcagcgggaatcacaggtagtctagtcaacagaaagggagggacaagcgaagctgaaacatgacgtggtggaaagtgcagacagtgcattcaatctgtcatcaaatttcatccaaagtaagatgtacttgtttcttttttttttttttttagggttaaacatgtttttctgttgctgttcagagaaatgtctttggagccaagtgcatggcccaaaggtgccactcagtggcagactggagtaatgcaacccaatttctgcaaggcaagacgactgtgtgtgtgtgtgtgtgtccccaaatgctgggctccaactcttcccctgatttgccattttttgccatttaggattctgatgatctccttaaaggaacctctcagcgaccctgcagagccaagcgtaaggcagagaaggcttcatgacttccatcagatcaggaagctggctctgccctcatcctgtctacgccatatcttgccttggtgtacctttctgggtgcctctctcttcatctgtaaaatgggcactgagtggatggagggatatgtggcatggctctggaaaacttcctatgcagacttaactcagaaatgctttcaggtcctgtgagggggagctgaggaggggtcagtgtggtggccacaggctcaatgctggcccagtgtgatccctcggattccagccttctctccgcaggtggcctgggcagatgctgccgcccagctcttgctgctgccatctggtgtcccctgcccttccacagctctctgacagccacaagtcctgggtgctcaggtccttctggcttctgggtgagaggaaagcagtcgtgtttctttatccagagtccagagagggtggggaaggaagggcttgaaaggagctgttcccctacctcattgttcaggtgggcccttgactcttgagctggggcatgggtctcctccatctcccaggcctgccctaggttctgtagggctctctgtccactctctcaggtctgctgtgaaaagaaggaagtggccgggaggcttgccaagtgaaaatggccatctgctggtgagagtacctacaaggctttctctgcctggaaggccatgtctgaccagtaggtgaaagatgcggggaacctggctctataggaagaagccagtgttggcttttccaaggcccagaaggggtcaaatgtccagagacgaagtcagtgaggcttcctcagccccatgctaggcagacaggagaaccaggttcacagagggaggccgtctgggctgaatccctggctggaagcaaccttctgggtcagcgtcttcccacgccccctgggcccctgcaacttctcacacaaatggatgacacctgggtgatttcctgccccctcaatcaatgccacatgggaggtcactttctgtcacctctgtcagcactgaggaggagctgctgagcccctgtgggaaggccctgaggaccctgggagctctgcaggctccctgcggttcctgagggctcagggtcctttttgcaggatgatttgggtgccacatgaaaatgtacatcactcagctggatatagagatgaccggagctgatggaaatacaaatttcataatcaatttttttgagacagggtcatgatctgtcacccaaactggagtgcagtggctacatctcggctcactgcaacctccgcctctcaggttcaagctattctcctgcctcagcctcctgagtagctggaattacaggggcatgtcaccatgctcagctaatttttgcatttttagcagagatggggtttcaccatgttggccaggctggtcttgaactcctggcctcaagtgatccgcccgccttggcctcccaaagtgctgggatgacaggcgtgagccattgcaccaggccgcggaatcaaatttaataaacttttatgtaaaaataaaaaggttttctttgtcacataaaaccaagaatttttttaagtacaagtgaaaacaacaggcatgctggaggaagaggaaggggaggggagagaaagggagggaaggagggggaaagggcaagaagggagagggggaaggtatggggtaacattccctagacagcagttttctctccctgcacacactggggactctccctggccttctgtctgccttggagttgacctgccttgtctctctcaggcaacagcaaaactgctgtcacagcagcatcctgacatcccgtatgtgtttaccatcactggttttgaggaacctttgtgtcaatttgaaattcagaacaggctttggttagtgttggccatcttcgagccccacaggcctgagctgggaactcagagcccaggccacattccccgctgcagagagccacagcagctcctctctgcacatctgctgcccatgggaagccccttgaagctttggaagcttctgctcttataaaaaacctgcaggtaccgctcct

SEQ ID NO: 1885728 - DNA, 4001 bp, Homo sapiens
atggacagccatggtagagatgagcaaaggtagtgatttccacatctaattccagccacatttggacttgtccactgggcaaactcactacagaggggtcccttggttcgccatctataaggagtggaaacgaccactccccagtggttctgtccatccaaatgatgaggattaatggctcccctggaccactgtgatcatcttgcctattcctccagccctgtgcaggacagtgctggagccctggtgaaggcaatggaaagcaaacattaataactgctgtcctggcactggacactgaagctctaactagatgtcctcagtgtcctgggctgtccccagattcaggtgacccagaagaggcactgattctgaccaggtgtactaagactgactacatcaggagctctgaaggtttagctactatttagaaaagttgttcgctgccacgttctgtactgtcagcaagctttaggacagggtccacaccctgggtgaagcccatccaggcaagcctatctgagcagagcacccacccgccgcccaatcactttacttaccgcatcgatgttctctagccacccttcatgggaagccagctctgccacaaacgcctggtgctttagccatttattgtgaaggtttcgtgcttcatcataggagacatcctgagatgtcagcagcttgtcgttgatccagagagtgagctgtgtgcataaagagtgggctgactatccctgagtatatttctttggcagagcagaacctgctgcccatccctggctgcagaaggagaaggccatggggaggaagtgcaagcacagaagagaacccatctgcagttctggatccctctgtaccagcacaggcaactttacccatgacaggccagggctaaaatgtgggcacaggtgcatcttccccactggagtgtgtgtggtgtagaccagggatactttacgctcctctccatattttgaggacctaggacagggcctagcatattctaggaacccaacgagtgtttactggataggtggataaatccgtcctttggccgtagggtgagagatccttgataaacacaggaaaaaatgttatttgaggaagaagccaaggacagaggtcaatgaaaacaaagttgtctgggctgagagaaaaggagtatgacaagaaagaagtcagggaaaaccccattccatgtagaaagtactgtcaatggagggacctgggaaggcggattaaagaccttccttgtacagctggtcccaggttgagcaaggaccttctgagctagcagttttccaactggcaggtttgtttaaaatgttctttctctgtctcaccccgtaaagttctgattcatctggcctgagtgggacccaggggtctgctttaactaggaccaggactggctccataatttgcagggcccagtacaaaatggagttgttcaaaagcatgaagaatttcaagatggcaagagtagagcattaacctgagcccagggcccttctaagcaaagcacagggtgtgacacaggtcacacatcctcaaagctggcccagactgggtcctaggtgattctaaaatagactgtccctagactactcttaagaaactctggcctagacttgacaggttaaggatgacttttcagatttgaaaaaaaaaaaacagtgcaactgaagattccagagaatgacccaattaagtacccagaggtccccgctcatggaatcccacagctcttgagctagaaaggatccctgtggacttcctgccttgagggaactctgcttctagaaaggaatctccaggaaagcagccactccttgctggagcctcacctcctggcagttctggaggaagttctgtagctccaggttgtctctcagtaggacagaggcctcctgggccttctcgttgttcttcctgtgcctggaaaggaagccaaaagcacagtcacaatagtgccgagcttggggtcctcaccaagcttggggtcctcactacccccgtgtggctctgggggcctcgtggccctggggcccgggagtacctgtcctcaatcagctgcaccttctccttgatcttgtctgagtataggtttccctcagctaccagcttgtttccagagtccacaggactcaagaccttatcccggttgttctccatagaccccaagaaatcctcaaacttccggatcccagcctctgcagcttccagggagtctgggggctccaagtgagccagagtgtattcctgttggaacaagtttccagacaaggcatgaagacacacggaggaggtgatgagcacacctcccaagtgggagcaccacgtgcagccacacaggccacggtatgaatgagccccctagagtagtacagggaggaggcactactccccaggccttgcccccacccctaccccaggggcacacaataaacagtgtgcctaaagccacatggaaggctaaccacccagggcaaaatgcgcttctctagcctctgatagacccaagaacaaggcgtagtttgggacacaaggctggaaaaggcccctaatgagaaacaaagatttcccccatgagtgaatacagagtacaagacaagagtaatgtggtccctgagtcttacagcacatttgtggactcaccacaagagctactgccctgagagacccgcctgtcccagccctgaatgcctctctacctggttgctgaggatggcttcagcctgcttggcatctttctggaactcctggaagccaaggcactgagcgagggtgtggctgcggctctcccacatcctgcccagggcattccagccagtatccaggccctccagccgctggcccagaagcagatactctgggtccgtctggccttggatcactttctccccagactccttaacacgctggtagctgtcttggtgcccgtcaatctcatccttgatacctgcatgctgctgcaggagctgctcagcctctgggagggattcgggcatgtcctcagaggccacagccttctgggtgatggagagccaggcctggaagtcatccagatcctgcaggaaggcctgcagctggctgacttcccccagcaagtcctcctggccctgcagggattgctgcaggccctgccacagctcctccaagtgtttttgccgctgaccaatatcctccttctgctcagggtgcgagtccatcagctgctgggactcacgctccagggcatccacacgggcctggatggcggccacgtcacgctccagccctgacaacttcctctggatggcgatgatacctgccaggtcccgccccaggtcttttgtggactccactacctttgtcttgtccgtgatccacttgctggtctcctcgcaatctacgcagtagttgtgcactcggagggctgagtccacagcctcccgccgctccgacaccagggtctgaaatgcctgccacctgccggatggggacacagcccggaggagagagacaccttctcccttagctcttcttcccataggagaccctgaccccttcccacatttcccacaagtctccccccacagactttgtatgataaaaagaaaaaaaaaaatctacctaacgaagtgtaggtgagcaaaattcacttctccaattttactcaagacatatataactgtcaatcagatcttttgatcagcagggggcaattaattatgtgactccaaccataagtaaaggaacatgaaagcaaagtctatgcatgtagttggagttcaggcaaatatacaatttccccagagtttatgaaatatcaaaataattaaaaggctcacattaacttcaagaatgcttcaggacatagggtccccagctgccctagaggaaccaagtaaatgcccaaggccacatgcaacgtctcctagggcctgaaagagatcaccttggatctaagagaaaagatgccctggtgaaaaagaagaggaagaagaggacaggga

SEQ ID NO: 1885729 - DNA, 4001 bp, Homo sapiens
actcttcctgctaagcgtgtgctacagtgccaccgtcaccttcttcaaggtcggccgcacgttgtccccagctgtccttgacattgtcccccatgctgtcacacactgtccctgacactgtcccccactctctccacaaactgtccctgacactgtcccccatgctgtacacacctgtccaacagtgtcccccaggctgtctccacatgtccgacactgtcccccatgctatcccccatcctgacactgtcccccacactgtccccacctgtccttgatgctgtgccccacggtctccccacctctccctgattctgtcccccacgctgtacctgtccccaatgctctcccccagcctgtccccaacactgtccgccatgctgtcccacctttcccccacactgtcccccagtctccgcctgtccctgacgctgtcccacatgcggtcccccattcctgatactgtcccccatgctgtccccaccttccccaacactgtaccccacagtccccaccttccccaacactgtccccacctgtccctgacactcccccatgctgtccccacctgtcccccactcaccccccacactgtccctgtctctgacactgtcccccatgctgtccgcacctgtccccgtcccccacgctgtccctacctgtccctgacactgtcccccatgctgtcccccactttccccagctttccctgtcccccacgctgtccctacctgtccctgacactgacccccatgctgtccgcacctgtcccccactctccccacctctccctgtcacccacgctgtccctacctgtccctgacactgtcccccatgctgtccccacctgtcccccaatctccccacctctccctgtcccccacgctgtccccacctgtccctgacgttgtcttctgtgttatccacatgctgtcactaccatggctctgctctccatgtccaggcctgggggcaggcagtgtagagccccggtacctgggtggcctgaaaggcagatgggccttgggagcagggctgtggcctgggtggcctgaggggtgggtggggctcaggggcagggctgtggcctcgctcacccctgtgctgtgccttgcctacaggtgaagtggatcttctcctcagtggtggacctgaagcagaccatcgtccccgactacaggaacatgataaggcagggggcctagggccaccctctgcggggtgtccagggccgcccagaccccacacacgagccgtgggccatgctcagccaccacccaggccacacctgccccctgacctcaccgccctcaaccccatggctctctggcttcgcagtcgccctctgagccctgaaacgccccccttccagaccctgtgcatagcaggtctaccccagacctccgctgcttggtgcatgcagggcgctgagggccaggtgtcccctcagcaggacgtccctgccctctggaccaccaggtgctcacacaaaaggaggtaaccggcatcccaggcccccactcaggcaggacctcgccctggagccaaccccgtccacgccagcctcctgaacacaggcatggtttccagatggtgagtgggagcatcagtcgccaaggtagggaagccacagcaccatcaggccctgttggggaggcttccgagagctgcgaaggctcactcagacggccttcctcccagcccgcagccagccagcctccattccgggcactcccgtgaactcctgacatgaggaatgaggttgttctgatttcaagcaaagaacgctgctctctggctcctgggaacagtctcggtgccagcaccaccccttggctgcctgcccacactgctggattctcgggtggaactggacccgcagggacagccagccccagagtccgcactggggagagaaagggccaggcccaggacactgccacctaccacccactccagtccaccgagatcactcggagaagagcctgggccatgtggccgctgcaggagccccacagtgcaagggtgaggatagcccaaggaagggctgggcatctgcccagacaggcctcccacagaaggctggtgaccaggtcccaggcgggcaagactcagccttggtggggcctgaggacagaggaggcccaggagcatcggggagagaggtggagggacaccgggagagccaggagcgtggacacagccagaactcatcacagaggctggcgtccagtcccgggtcacgtgcagcaggaacaagcagccactctgggggcaccaggtggagaggcaagacgacaaagagggtgcccgtgttcttgcgaaagcggggctgctggccacgagtgctggacagaggcccccacgctctgctgcccccatcacaccgttccgtgactgtcacgcagaatccacagacaggaagggaggctcgagcgggactgcggccagcgcctgcctcggccgtcagggaggactcccgggctcactcgaaggaggtgtcaccatttcagctttggcttttcttcttcttttaaattttctaaagctcattaattgtctttgatgtttcttttgtgatgacaataaaatatcctttttaagtcttgtacttcgtgatgggagccgccttcctgtgtccacgcgcctcctgcccccggtgggaagcacggtcaggaggaggctggtcgagctgcacctcgggggctccctgcactcgccccccgcctcctgcagccacacgcattgcccgagcggccctccctggcccctgtcgctacatggacccccggggcttctcctcttttctacatggatgcagtttctcctcctgctgggcacggtgctgcctgccctggtcactctgcgggggacagggcctccagggaaagctgggtcgaggctgggagctggctcaggctggccaggcagagccacagggagggccttccagaaccaaccatggtccgaagcgagaggtgggtgtcagatctgtgtgcgtcagctcaggaccacagcggggcagctcccacggcagacatggatcctcccaggcctagagaccaggaatctgagatcaggatgcaggcagggctggtttctctcaagccctctctccttggcttgtagacaccgtctcctccctggtcctcacatggccatccctctgtgtgcccgtgtcctaagcttctcttcttataagaacacacatcgcattagattagtgaccccatatgaacttaatgacctctgtaaagaccccatctccaaatagtcacattgtgaggccagggattaagacttgaatatatgaatttgtaggggccacaatttaactcataacagtccatgctatggccccccaaatttcatgttcttctcacatgcaaaatacattcatctgtctcagcatcccccaagtcttagtcctttcagcatcaattctaagcctaaaatctcatcaaactgtcaccctcatcaggcacaggtgaaacctggtgtgtgattcattctatggtaaaattcagcccataggacacatggtgggtgccaggaacgaggacaaggcaggagaggcaaaggtggagagagacattttcaaagataaagctgggcactagatcatgtagcaaggacggattttcaacagaaataactattgcaacagaagaaagagtccggcatgacctggactcaccttcatctgtgcagaggccacagccttgtaaagggaggtggtagggggagcagggtgggtgctcggggctcagtcgtcggggaagggaaaagttgcccagcgctggtcagcgtccccgggatgggacctgctgtgtccgtgccggccactgttgaggtcaggattctgtcctcccagagcctggagacacaggccccatccttcacaaaggggacacttcagggagcggctctcaagtcttgagaaagaccctcctgggtcacaggaaatgcacagacatcgggaacggatagaaggacgtgtg

SEQ ID NO: 1885730 - DNA, 4001 bp, Homo sapiens
ccctctgggcctcagggagggacacaggagatggggagcgggtcctgctgagggccaggtcgctatctagggctgggtgtctggctgagtcccggggccaaagctggtgcccagggcaggcagctgtggggagctgacctcaggacactgttggcccatcccggccgggccctacatcctgggtcctgccacagagggaatcacccccagaggcccgagcccagcaggacacagtattgaccacccacttcctgtccagagctgcaactggaggagagctgtgcggaggcgcaggacggggagctggacgggctgtggaccaccatcaccatcttcatcacactcttcctgctaagcgtgtgctacagtgccaccatcaccttcttcaaggttggccgcacgttgtccccagctgtccttgacattgtcccccatgctgtcacacactgtccccatgctgtccccacatgtccctgacactgtcccccatgctgtccccacctgtcccggacactctcctccgcgctgtcttgacctgtgcccaacactgtcccccacgctatccccccatccccaacaatgtcccccacagtttcctcctgtcccctatccccgacactgtcctccacactgtccccacctctccctgtcactgtcgcccatgctgcccccacctgtcccaacactttcctccaagctgtcctcacctgtccccaacactctcccccacactctctccacctgtccctgacactctcccccatgctgtccccacctgtccctgatgctgtcctccacactgtccccacctctccctgtcactgtccccatgctgtcccctgtccctcacactttcctccatgctgtcctcacctgtccccaacactctcccccactgtctccacctgtccctgacactgtcccccacactgtccccacctgtccctgatgctgtcgtctgtgctgtccacatactgttggtgacctggctctgttctccaagttcaagcctcagagcaggcagtggtgaggccgtggcacctgggtggcctgaggggtgggcgggccttgggggcagggctgtggcctcgctcacccctgtgctgtgccttgcctacaggtgaagtggatcttctcctcagtggtggacctgaagcagaccatcgtccccgactacaggaacatgatcaggcagggggcctagggccaccctctgtggggtgtccagggccgcccagaccccacacaggagccgtgggccatgctcagccatcacccaggccacacctgcccccgacctcaccgccctcaaccccatggctctctggcctcgcagtcgccctctgaccctgacacgccccccttccagaccctgtgcatagcaggtctaccccagacctccgctgcttggtgcatgcagggcgctgggggccaagtgtcccctcagcaggacgtccctgccctccggcccgccaggtgctcacacaaaaggaggtagtgaccagcatcccaggcccccactcaggcaggacctcgccctggagccaaccctgtccacgccagcctcctgaacacaggcgtggtttccagatggtgagtgggagcatcagtcgccaaggtagggaagtcacagcaccatcaggccctgttggggaggcttccgagagctgcgaaggctcactcagacggccttcctcccagcccgcagccagccagcctccattccaggcactcccgtgaactcctgacatgaggaatgaggttgttctgatttcaagcaaagaacgctgctctctggctcctgggaacagtctcagtgccagcaccaccccttggctgcctgcccacactgctggattctcgggtggaactcgacccgcagggacagccagccccagagtccgcactggggagagaaggggccaggcccaggacactgccacctaccacccactccagtccaccgagatcactcggagaagagcctgggccatgtggccgctgcaggagccccacggtgcaagggtgaggatagcccaaggaagggctgggcatctgcccagacaggcctcccagagaaggctggtgaccaggtcccaggcgggcaagactcagccttggtggggcctgaggacagaggaggcccaggagcatcggggagagaggtggagggacaccgggagagccaggagcgtggacacagccagaactcatcacagaggctggcgtccagccccgggtcacgtgcagcaggaacaagcagccactctgggggcaccaggtggagaggcaagacgacaaagagggtgcccgtgttcttgtgaaagcggggctgctggccacgagtgctggacagaggcccccacgctctgctgcccccatcacgccgttccgtgactgtcacgcagaatccgcagacagggagactcgagcgggagtgcggccagcgcctgcctcagctgtcagggaggactcccgggctcactcgaaggaggtgccaccatttcagctttggtagcttttcttcttcttttaaattttctaaagctcattaattgtctttgatgtttcttttgtgatgacaataaaatatcctttttaagtcttgtacttcgtgatgggagccgccttcctgtgtccacgcgcctcctgcccccggtgggaagcacggtcaggaggaggctggtccagctgcacctcgggggctccctgcatacgccccccgcctcctgcagccacacgcattgcccgagcgaccctccctggcccctgtcgctacatggacccccggggtttctcctcttttctacatggatgcagtttctcctcctgctgggcacggtgctgcctgccctggtcactctgcgggggacagggcctccagggaaagctgggtcgaggctgggagctggctcaggctgcccaggcagagccacagggagggccttccagaaccaaccatggtccgaagcgagaggtgggtgtcagatctgtgtgagtcagctcaggaccacagcggggcggctcccacagcagacatggatcctcccaggcctagagaccaggaatctgagatcaggatgcaggcagggctggtttctctcaagccctctctccttggcttgtagacaccgtctcctccctggtcctcacatggccatccctctgtgtgcccgtgtcctaagcttctcttcttataagaacacacatcggattagattagtgaccccctatgaacttaatgacctctgtaaagaccccatctccaaatagtcacattgtgaggccagggattaagacttgaatatatgaatttgtaggggccacgatttaacccatcacagtccagactctggcccccaaaattcatgttcttctcacatgcaaaacacattcatcctgtctcagcatccccctgggcactaggtcatgtagcaaggacggattttcaacagaaataactattgcaacagaagaaagagtccggcatgacctggactcaccttcatctgtgcagaggccacagccttgtaaagggaggtggtagggggagcagggagggtgctcggggctcagtcgtcggggaagggaaaagttgcccagcgctggtcagcgtccccgggatgggacccgctgtgtctgtgccggccactgttgaggtcaggattctgtcctcccagagcctggagacacaggccccatccttcccaatggggacacttcagggagtggctctcaggtcccgagaaagaccctcctgggtcacaggaaatgcacagacatcgggaacggatagaaggtcgtgtggttgcggccctctcagcagataccctgagaaagggaggtcggggttggtccaaacggtgagttctggtgcacggagctttctcaggcaggtgttgacggggcaggggtcggcctaggggtacggccagaagctgttagaaactgttagtgtctgctcaagtctttacaagccaaggttgaggccgagtggagag

SEQ ID NO: 1885731 - DNA, 4001 bp, Homo sapiens; identical to SEQ ID NO: 1885729

SEQ ID NO: 1885732 - DNA, 4001 bp, Homo sapiens; identical to SEQ ID NO: 1885730

SEQ ID NO: 1885733 - DNA, 4001 bp, Homo sapiens
tagccctgtggctaagccacagacccagccactgggggaaggcacaagttggcattcaaagaggagggaacctcacataactcgcaaaaacacatcgcattcacagcaaacacagcaaagcaacccagggctcttccctccaccagcctcacttccaggaagcttccctcacgcagcacggagccggggcaggggctctcagctcacacaaggcacacactctcacgtctcctgtgggggcggccctccgaggcagagtctgatattcaaaaagaggttaaccatgtattattcatgatgaatgaagcgaacataacacggataacctctcctcaaatatccttgcatagttctgaaacgaaaaccatggcctcttccccaccgttgtctttgcttccagaagattcttcttgggatgagctgaatcccagggttggggcagggaggtgttcacatcctgcaaagaaagcacacgtactggcattgaccttccattcccgtacctcagtctcagggcccaggcagccctggcaccaaagtcaaaaccctgacattggaaccatgctcagaaagacttctaaggcaggttccattaaaaatatatgaaagcttcctccacggattcctgaaagacgggatttgatgacgagaaccagcagaatgcatgtcagagataagcaaagccatcatgaagaattctgtttccgataaaatggggtgtcactgatccctgaagacagggtccctaccgcagagatggtctcagttcctggaatttcctcccgatgactgcttggaaacggagggtcacagaattccagggcccagcacatcaataatgaataagcgtgccgttgacctgcacccgacaatcttgcagcagcttgacaccggcggcccctccctgaagcaggtcttgtatctgggaagccctttgaggcatgatttgattttaaagaaaagtaatctcatgctatttacgcatgtgaaagtgaacccttgttcacaaaccaaaacatggcacgttgattctgggccgttctcccacgatggacggtatatggcatgtggggagacaggcgacacatatcacagggaaagcacctggtctccagccccaaaccactgtgagtgttgtccacagaccggcggtattagcatcacttgagaacttgctaaaaatgcagaatcttggtccctgaatcagaatctgctttttaacaagatccctaggtgatgaaaatcttaggagcatttttaaagtttgagaaacactactctagccaactattcatatgcacacgcacacaaacacacacacacacacacacacaccccagaggtgctgtcgaccacaacgtcttattccatgagagtctgtctaagatggggtggttcccaaggaaggcacgaagccatgccacgtccaccaagaataatccaaatacccaacaggcagctgcttaggagctgccaaaaagtagtaatagtaacaggaaatgtacggagtttttactaatgtttgcattccctacaggaagtgtttcatactcagaatgaaggctacagataggagaggctggacccaggttccccggtccaccatctacctagagagaggcttgaccccggcatctctccaaggaattcctcgtggctaagatttaataacaagaagagaaagagagatgaaataattgtgaacatcttccaataaaaagatatggcaccaagcccctaaatggcatctccaccccaaagctagcatttgtccaaggaaatcacactggtggcttgcattctgagatcactggattcatcattataaatcatcaacacagtcacactccatggtggggcaggcaccaatgtcccctcactgaagtcagcactgtgctttcaaaaacttctgaagcaaatttggatactaaaacaatggttgtccgatattaatcatcataaatatagagaccatactacggacagccattctttaagcaccaaagaactgtgccatcaagaagagctgggcatcttctccaaagttggtgtctcttccagaaagttcttctcaggtagtccaaacaatgaggattagcaggtcagcttcacacattgagagtcaagcccatgcctgggggtcagtcacactcttgggcaggggaagggggtctggccccaatgatcggtccctaaggtttgcttcatgtccaagaagtgcctccaagaagcaggatttgataagtagcttgaatgctgcgtcacccacaacacacacccatggccaatgcaaatccctgatagcaccaaggagtcccgtggccccctgccaagcgtggccccgcctccagggttctgaggttagggcacaagtgtccccaccacaaaccaactgcatgcgccctcatccccacccaggcgtgagcccctgggaagggctgatgcgtgcatccctttacagaacttgtcatggcgtccaggaagtctgccgaggcaagatttgatactcaaaaagaaattgtccttgtatgattcatcataaataaagcgaacacaccaaggataatttctcctcaagtatgaaacagcagcacggaccaccacctccaggtctttggctcaaggttagatggtgactgcttcgtggcaaacccagtcacacactcgctcatgcacacacaccacgcacacacaggcatgcacaatgcatgcaccaagtttgacctctctttaagcaccagggaagcaagatgccatagaatcctcactcagcttggcatcctcgctcaagactccttcaaagcgtagatagtggccgaggtcaagaacccagggactgtctctcttaagtggagcaaatgttctcggcacccctgctgacccccactgcatgtggcattctgtatcaaaagccactgtgtgaatggcttagctgccaagcatcaagagcatcactagcccccattgtaaacaccgtgtatgctctgggcttcctagtccattccatacccgatgaaggacttgacttccatgttttgacactgttccaaaaacccatggagagattttagtcataaaaccaccaccaccaccaccaccaccaccaccaatgatagtttcacagcacacaagggtcctggctaccacctacgaagtgccgaccacggggctctgctctgagccgtgtacaagtcttaactcgttcagccccagcagccccaagaaatggacgccaatgtgattcccctttgacatgtgagacaatgggcacagcacgatgagatccttgcccaaggttggacggttagtaaatgtcagaggtgggatccaaacacaggaaatcgagctccagagtctgcgctcttgatactgaaaaagtggatgaccctgtacgattcgacatgagcaaaacgaacaggacagggataaccactctccaagtaccaaaggttagcacggaaaagaaagccactgccttgggtggacttggtacgtcttcaaggcgcggtcctggggatgaattagatgctgagggttagtggaccgggtcacataccccaagcagaacatgcacactcacggaccgagtaacagcagggaccacaaagccactaccccacacgagcgccaccccagccatcggcccgggctgatgacttcccgctcaggaagcagggacccagaccacacacatcgtgcatgcttttggccccgcccacactgcaccaggagaggggatgtcccagaggccactgccttccctaaagtcatccaggtgcccgtgaagtcctctctgtgaagtggggacccgtgaacgatttgccacacacaaaacggatacacacggtcatgcacacacataccgcatcccttgctgagtgtggactgggtccaagacaaggtttgatactcacagagagcttgcccttgtatattccatgtcaataaaccgaatatacaaagggcaacctcgctttaagtaccaaacaatagcactgggc

SEQ ID NO: 1885734 - DNA, 4001 bp, Homo sapiens
aaagcctcattactataacaaggagccttcctccagggggactggatagataaggaccagaagctagaccttccccagggccaaaccgacaaaatcctgacatctctccaccaatccttccatattggtgcatgtcccctatatctcctcctccgcccatatttcttctcccctcacctatttacctcactaaaaagtataacttcaaaatgtcatatatgctctgtcacctcctctcaaggagccctccattccccatctattcctacacaccagctaagaggaacactcccaggggaagactggcaaatagacttcacccacatgcctcccgtcaaaaacacaagactacttctcactcttatagacatcttctctgggtgggtggaggcatttcctacctcttcagaaaaagctgcagtagtctcccagatccccacaagagaaatcatccctagctttggtctccctcgctccaatcaatcagacaatggccctggcttcatttcccaaatcacccaacagctctcccagtccctcagcatccagtggcacctccatatcccatatcgaccccaatcatcaggaaaagtcgaaagggcaaatggaaaccttaacactcagttgatcaaactcactctagaagtccagaggccctggacttccctcctacccatagctctagccagcgtcagagccagcccaaaggcaccctccttcctcagcccatttgaattaatgtatggatgccctttcctcttacaaaacaggcctccttctgagaccctttcctcttacaaaacaggcctccttctgattctcaattaggagagtacctcccagcactctccctcatccgccatctcctctgcaaacaggcacaccaggccctcccaataccacataaaggcctcactgaccagaccctcctaccaggagaacatgtttttctaaaaacccttaacccggctgggcacagtggctcacgcctgtaatcccagtacagtgggaggccaagcctggtgaatcacaaggtcaagagattgagaccatcctggccaacatggtgaaaccccttctctactaaaaatacaaaaattagccgggcatggtggcaggcacctgtagtcccagctactcgggaggctgaggcaggagaatcacttgaacctgggaggcaaaggttgcagtgagctgagattgtgccctgcactccagcctggcgacagggcaggactctgtctcaaaacaaaaaacaaaaatcaaacaaaaaaaaacccttaacccaaccagccttaaaccaaaatgggaaggccctttccaggtcatccttactgtcaggcctctgagcccaagcctgcagtatacatccagatggcccgaagcaagtgaagaatcacaaaagaagtgaaaatggccagccctgccttaactgatgacattaccttgtgaaattccttctcctggctcagaagcttccacactgagcaccttgtgatcccctagcccctgcccgccagagaacaaccccctttgactgtaattttccactacctacccaaatcctataaaacgacccacccctatctccctttgctgactctgttttcggactcagcccgcctgcacccaggtgaaataaacagccttgttgctcacacaaagcccgtttggtggtctcttcacagggacgcgcgtgacatttggtgccgaaacccgggacaggaggactccttcgggagaccagtcccctgtccttgccctcactccgtgaggagatctacctacaacctcgggtcctcagaccaaccagcccaaggaacatctcaccaatttcaaatcaggtaagcggtcttttcactctcttctccagcctctcttgctacccttcagtctccctgttcttccaattccagttctttttcctctctagtagagacgaaggagacacattttatctgtggactcaaaactccagcaccagtcacagactcaggaatagtcttctcttggtgtttaatcactgcggggatgcctgcctgattattcacccacactccattggtgtctgatcaccgcgaggatgcctgccttggtcattcacccacattcccttggtggcaagtcaactgcggggatgcctgctttggctgctcacccacattgcagcccagggctgctcaccaccctccttatctgtgtctctaccctctcttttctctgggcttgcctgcttcactatgggcaaccttccaccctccattcccccttcttcttccttaggctgtattctcaaaaacttaaaacctcttcaactcttgcctgacctaaaacctaagtgtcttcgccaacaccacttggccccaatacaaactcgataatggttctaaacagccagaaaatggcacttttgatttctccattttacaagacctggatgatttttgtcgaaaaatgggcaaatggtctgaggtgcctgacgtccaggcattcttttacacatcggtccctccctagtctctgctcccaatgcaactcatcccaaatctttcttctttctctcctgtctattccttcagtctccactccaagctctgagtcctttgaatccttttctacagacccatctgacccctcccttcctccccaggctaatcctcgccaggctgagccaggtctcaattcttcctcagcctccactcccccaccctataatcctttaatcacctcccatcctcacacagggtccagcttacagtttcacgtggggagactagccctcccgcacctgctcaacaatttcctcttaaggaggtggctggagccgaaggcttagccaaggttaatgctcctttttctttatctgacctctcccaaatcagtgtttaggctctttttcatcaaatataaaaactcaacccagttcatggcccgtttggcaacaacccttagatgctttaccgccctagacccagaggggccagaaggccatcttattctcaataggcattttattacccaatctgctcctgacattagaaaaagctccaaaaattagattccggccctcaaaccccacaacaggacttaattaacctcaccttcaaggtgtacaataatagagtagaggcagccaagtagcaatgaatttctgaattgcaattcctgcctccactgtgagacaaaccccagccacatctccaggacacaagaacttccaaacgtctgaaccgcagtggccaggcgttcctccagaactgcctccccaaggatcttacttctagcgccggaaatctggccactgggccaagaaatgcccacagcccagaattcctcctaagccatgtcccatctgtgcaggaccccactggaaatcggactgtccaactcgcccagcagccactcccagagtccctggaactctggcccaaggctctctgactgactccttcccagatcttcttggctttagcggctgaagactaatgctacctgattgcctcggaagcctcctggaccatcacagacgctttgggtaactcttacagtggagggtaagtccatccccttcttaatcaatacggagcttacccactccacattaccttcttttcccttgcctccacaattgtgggtattgacggccaggcttctaaaccttttaaaactccccaactctggtgccaacttggacaacattcttctgtgcactcctttttagttatcctcacctgcccagctcccttattaggtggagacattttaactaaattatctgcttccctgactattcctagactatagccacacctcattgctgcccttttcctcagttcaaagcctccttcacatcttccccttgtatctccccaccttaatccacaagtatgggacacctctactctcccctggcaactgatcacacaccccttactatcccattaaaacctaatcacccttaacccactcaacgccaatatcccatcccacagtacacttta

SEQ ID NO: 1885735 - DNA, 4001 bp, Homo sapiens
gaaagcaaaacaaaaacaatgataaaaacgtttaaaatccaaggacaaaaaccggagtcggtctcaaaatccgcgccgttcagtgctccactcggtagtcgactcggctgcaggccccggcctggccggagcaacgcgggggacacccccgattccgctggggagcgcagcccacagctccccctcgccaggcgcccaaggaccctcaaggcgcggggcccacacttgaagcctgggaacgcgcagacaggaaaccctcttcctcctaagcagtttcttgctcgtcggatgagaggcgcccaattgaagcagaatgatcctcatctactaatatccagcgtggccacaaagcgactggccatttacgccaccactttaaacaaagatatttggttattcccgggaagcaagagcacttttgcatggctgagctgcgggcggaggcgagcctcggcccagcctcccgcccgctgagctgcccgcacctcggcattcgccccctcctggccagcgctccagccgccggggttcaggctcagttccgcccggcaacagacagacgggcactcacgccgctccctgctcgcgcgctccctgaagcatcagaggggaaaacagcgtggctctgggctcgggtgctggggctgtgatgtcctcggaaagtcagctccagccccagatccccgcgtgtctgggagatgggcgagggtcagggacaccaggtttgttcgaggtggggcaacttcagtgacggaccctcccgtgagaccccttcccatcctcccagctctgggggccagtgctgtgtttgctcggccgggggtggggggggggggggaagaccttgggggaggcgtgttagcgggggtggcccactgaaaaacccctgagctgcgggggcgggttgtggctcggggatccgggacagcctccgggaggcagtcgatcccctactcagcgccccctccgcccgctcggattctctccggtagggggaaagggggcggggagcagaggtgtccctctgacggcggcagaagagaggcagacagactgacagacacgtagaccaacagtgcggccccagggttcgtccccagactcgctcgctcatttgttggcgactggggctcagcgcagcgaagcccgatgtggtccggaggcagtgggaaggcgcggggctgggaggccgcggcgggagggaggagcagccccggcaggctcaggtgaaacccccaccctgtccctcagccccctcctcctaaagacctgtccgtgcccggggaaccccgaccgaattggaaagtggttccactttgtaactccgcaagttggttgcaaagcagcattcaccttccttcctctcaaccatctctcctcctctgttactcccccaccccacctcctgccctccccgctctcggttccctcctccttcccctcccctccacctcctccccgcgctccgctggtaccccacaaaaaatgggggtgggggtgtccaagggaggggggaaatgctttgggtctcgtctctgcctctctctctctctctttgagacctaaaaatcctgacaagtgaaacttaaaggtgtttaccttgtcatcagcatgtaagctaattatctcgggcaagatgtaggcttctattgtcttgttgctttagcgcttacgccccgcctctggtggctgcctaaaacctggcgccgggctaaaacaaacgcgaggcagcccccgagcctccactcaagccaattaaggaggactcggtccactccgttacgtgtacatccaacaagatcggcgttaaggtaacaccagaatatttggcaaagggagaaaaaaaaagcagcgaggcttcgccttccccctctcccttttttttcctcctcttccttcctcctccagccgccgccgaatcatgtcgatgagtccaaagcacacgactccgttctcagtgtctgacatcttgagtcccctggaggaaagctacaagaaagtgggcatggagggcggcggcctcggggctccgctggcggcgtacaggcagggccaggcggcaccgccaacagcggccatgcagcagcacgccgtggggcaccacggcgccgtcaccgccgcctaccacatgacggcggcgggggtgccccagctctcgcactccgccgtggggggctactgcaacggcaacctgggcaacatgagcgagctgccgccgtaccaggacaccatgaggaacagcgcctctggccccggatggtacggcgccaacccagacccgcgcttccccgccagtaagtgaggccgccccactgcggggccgcgggctgagctcaggaggtgcggcgagagccgtccagaaggcgcggcgccggcaggctgcgcgctgggcatcagggagggcggcccggcagcggcgccagggacttgggtgcgggagctggggatgcttccccctgctcggctgggggtccaagaacaggcacttggtagcgctggggtcctgcggtcagatgcgggtactcggcgtctcctaggcgcggtggactggcagctctgctcggcgcagaagacctcggggagccaagggaagcgaccccgagctcaaggagcaggggcgagcagagcgcggagaggctagaccgggccaggagggaggctgccctgttgggaggcactcgagcgcccggcccggccctctctccagcggagtctgggcaggtgggaggactcgcagttccagaggggactctaagggtccgagcaggtgccctcactggggcctgacaggagagaagccaagaggcaaagcgtctgggggctccagcttttggaagtcaacaccccctctcctaacctctccaaactggggtctaccgtaggaccccagctcccggcctgagcccagttcgccgcctgtggccagctaatcctaatgctctgacccgggctgggcacgaaaggagcagaagcggcctttcccccactgcgtcttttggttcgaaagagggaactgagactgagggagggcagccagggttggggctgtgagcgctccagtacagccccctcgacggtacggcctggggcaggcgctggcagttccccgcggatgggcctcttgggccccagcgctaggctgcctgggtcaggagggcgccgtcggttggggcgggccgggcgggccaatggcgcggaaaacaggggtggcctggctcggcctggccccggccgacgctgtgcgtttgtcgcttacagtctcccgcttcatgggcccggcgagcggcatgaacatgagcggcatgggcggcctgggctcgctgggggacgtgagcaagaacatggccccgctgccaagcgcgccgcgcaggaagcgccgggtgctcttctcgcaggcgcaggtgtacgagctggagcgacgcttcaagcaacagaagtacctgtcggcgccggagcgcgagcacctggccagcatgatccacctgacgcccacgcaggtcaagatctggttccagaaccaccgctacaaaatgaagcgccaggccaaggacaaggcggcgcagcagcaactgcagcaggacagcggcggcggcgggggcggcgggggcaccgggtgcccgcagcagcaacaggctcagcagcagtcgccgcgacgcgtggcggtgccggtcctggtgaaagacggcaaaccgtgccaggcgggtgcccccgcgccgggcgccgccagcctacaaggccacgcgcagcagcaggcgcagcaccaggcgcaggccgcgcaggcggcggcagcggccatctccgtgggcagcggtggcgccggccttggcgcacacccgggccaccagccaggcagcgcaggccagtctccggacctggcgcaccacgccgccagccccgcggcgctgcagggccaggtatccagcctgtcccacctgaactcctcgggctcggactacggcaccatgtcctgctccaccttgctatacggtcggacctggtga

SEQ ID NO: 1885736 - DNA, 4001 bp, Homo sapiens
ttttaacttgaaaggcgatgcagaagcccttgaacgatgaaggaaggctctacccagaacggcaaattaataaagagccagttctccagcctccccagactaacctccaggtgcccccagatagactatcctgggtaccaagtcacgcagcgtgctgggagttcaaatttccactggaaccttcatcacaaaggcaaacggtcatctgacccccaaaattacaccatcctccaggtgtgacaaggagtgccccctctccctcccagggccatccacaggacccagcggagaggaagaaagaagaatgttggggtggcttgtagtggtaaaagaaaaactatctccccaaagcgggaaccgaaggaagcggggagaagacagctcttgtcctaccagctcttttatttgccctgactctatcttgctccatcctaagctagctctcaatgatctctgacctttgcattaaaaaaaaaagtattaacaataaagatcagagaagagcaatcctactttacctaaaccccaataatggttagcaaaaatatgatgttctcattgcatgatgatatttctacatccaaattaaaagaggcagacatttaatggaggaagggaaaattttatttttttttaacaagtaatcacagggtaagtcacctgcaaagcagccgagcccttaggttggtattacatcactggcctaagaagggatggggggtggggggacacatttttttccttgtcatcaggatgatgtttctaaagcagttaagttttgtggttaaaaaagagagagggaaagagctgaaactctgggtacagcacaatgcctggaaaaaacaatacatcgaaccaggctttaaggtcactgagagcttgcaaaacccacagtgcttacacagagtggaagttttcaggcaagcctgctactaaatcattaatataaacaaatggaaggcagtggaggaagattcccttgtaaccgatccaaacaggagcacacacccgcgcacacacacacacacacactcacacacacactcccttttcaccttctccaagtatgcccaccttcacaagacaggagtccaacctgaatttttagactctaggaccacctcctcacaccccctcaaaaaaaaaaaaaaaaagcacacacacactcacatacacgtcaattcctcaacagctagggaaatccctgtctcaattcaattttgttttcttgtgatcctcagagtgtcctttctgtttctcattttaaccagcccaaataaataaatgaataaatgaggggggaagtgactacaaaatgtcaaaaaaaaagtatctgcccaaaatgaagtgatgagcacacatcatttcagactaacaattcaagcaaataggagaaagactcaaaaaaaaaaaaaaaaaaagaagaagaagataaaaatctaaaacattctctgacttttccaacatctggaggaaaaggacccaacttccaggagaaactgaaggaaaagaaaggcagttgaaaagccatttccacagtcagccaaggctcatggatacagtattcaaaaaagaaaatctaggttggttgctcccaactgaaaacttctaccctctcaggagcaacctcttcccagaacggacaagaaccttgagttgtttcatgccctgactgccttcctttccccgcaaaccttacctttccagttgaacagaagatttgggatctgtctgtatgtctgtttgatgtttaatcaactgagtttgctgggtatgtttcctctttgggtaggttcaaattccagaatctttctctctccttttcctttctctctgggagggagtggcagggtagaagggaggggttgttggaggtgcgaaaagcaggtccttggtggctggagatgccgaggctgagagaggggaggacaggttgcctctccctctctgtgagttgcatgcaagaggcgatgtgtagggctgagcgctgagcctgagactgctggaggagcccaggaatttcacgcactccagagccggcccctccctctcccacacagaccccagcatttaaagagacagacaggccgcctggctcagggcttcacctcctccctgactgttttgcaaacagctgagaagatatcatgagggaggggcagtttgcagcccccacaactaagaggcagtgtctgagctcagttctccccttactccagcctgagaggagagttcttccctagaatcagagtaggaattaatataaagacaaaattcttatttacagcttcagtaaccaaaccacttccccactgctgaggatgtgtgtgtctccttgcagactgagggactctaacctacaagtgtgcctcagtttccctgagtagttgctcttccttgcaaaatcagggcaatctttgagcatctagtggaagtcagggctgtaactaggacacaaatctattccttcaacaagcactttgaatgcctgcttaggatgaagcatactgcaaggggctggggacatagaaatgaaagtgacaaatggggcttcctctctcagagcccctagcagcaaagacagacccaggcacagcccatcctatcctaaggggctgccagctaagggtcagaggcccgaatcaagtgttttggtgactcaggaagatggctctcttttgtggcttgcactctgagctctgagcctagactgcacccctaaacccttgaaaatcccttgccagccttgacaaactagttcatgtctgtggaaacgtttccccagtcaaacctaaacaagagatgacagtcggtggcacccaatacaaaggttttgctcagcatcaggccctggcaccttatgtgaaaatgcagccccaaactcctttcttctccagctccctttttaagggctgcactggcatgtcctcccttggaccagcaccaatccactaatagctgttgagcacttaccatatgccactacgtgggtcatctcattcagtccagtgaggtttgtgctatttgacagttgagatccattccacagtcttaaaagttgaagctttagagagggtgcccaaggttacacagctggaagctgctaagaatgaatttgaactcaagtctatcccactccagagcctgcctgttagccacagtactctattgcctccagccaaggatggtagttcttatatttctgccctttactggatgttcttgcagcatcctagcactttcctgacccagcaaactttaatagcacatgtacccggcatcatgctcatgagaaacaaaatgaatctatcaaggtctgaaccccaaggactccactaagcattggaggaggacagaaatgtgtttctataaagcaaagggaaaataatcatgagagcaatgtaaaggaagctctatgggattgtcgataagcaagtgattaattgtgatttggaggtgggggatatcaaggcaagcttggtggactaaagtggcatctgggctgggactagacggacatatgcacttccatcattactagcctacttttcagtctattttgcctttcagatcacaatctcattttcttatgtgtcttcgggtctccagccttcaacacctccacggtatccagtagttttaggaacacaaacgaacatgccttcatggattaattttatatgacatctgacctcccacctatttactctagacctgaactgccctggccaccagttccatatcctccttacctggccttcctagaagtctctgtaccaaatttgtccacagaatgtggaagggaagttcagaaggcacagtgcatgggattgctctagatgtcaggagctcctgagggaagaaccatgtaaaggagccaccatgatccagcaggacatcgggaatagccagggaaactgtacgctcatctcgggggcagcaggaagagacctgaaggacctaagggatgagagggcggaagcctcaagggagagcctgag

SEQ ID NO: 1885737 - DNA, 4001 bp, Homo sapiens; identical to SEQ ID NO: 1241499

SEQ ID NO: 1885738 - DNA, 4001 bp, Homo sapiens; identical to SEQ ID NO: 1241503

SEQ ID NO: 1885739 - DNA, 4001 bp, Homo sapiens; identical to SEQ ID NO: 1241532

SEQ ID NO: 1885740 - DNA, 4001 bp, Homo sapiens; identical to SEQ ID NO: 1241531

SEQ ID NO: 1885741 - DNA, 4001 bp, Homo sapiens
atggactctaattaaaaatccaaaggaaaagtctgtcgtgcccatataaaagaagcttttcatatacgggaaataaagcttgtaaaaggttacaaataaaagattagagatttatccaaactagtttaaagcttcactgtggttttcttttcttcttttttcctttcttacaaaaccattcctgggtcttttttttccccagttttaaatgaagtttgcaaacaggcaagatattggactgtaatggttgttttatatcagctctgtaagctcaaggctgctgcctgcagtagaattgatttcaaggaaacttcaggaccaggagatgaaaattatgtaaactgacagctaccacccttcatcaatccatccacattcccgtccacacccttctaacacacacacacacacacacacacacacacactctgcctcacacttctctctgtctcacatccacacatgcccttcctatccctcaccctaaccttgctctgcacacacccttggtccccacactctcagggacagaggcacagctcccggctcacactccgctcataaatgtctcacagcaccacatctcgcacttgtcacacaatcttaatccgtttcattccggaacaacatggtcctcttttcctctttttcgcatttggagtttgcctccctactcttttatcgagacagcccaatcctatctttgaagttgtttctttctcccttaccctcttttttgaggcaaccgcaatgcagggagtgagagacccaagcttaatttataagtgatctgttgccttattttttcccctaaattttgtctgcatttccagtcttaaatccttgttaaaaaaattaaggttaatctcctcaaagtttataataaagatatatctaaaaacctaatgaaaaaatgacttctttctaggtattatggtgcttctaaggcaaaatgtagtccctcactgtccagtgaattgctgaaaagattggaaattaatgttcatatttctgaattcagtgttaaggaagtctaactggctcctttcccccaaaaggctatgttctcacggaatatgggttttgttcttcttttttaattagcctggaagaatcccgggatgtcttctctcccctccccctcccccactccccccaccaaagttaataaacttggaggaaagtttggaatattttaaactggcctggcttgtgcggtggagaaattgagcctagttagtgccacacatgaatcttgatttcaaaatatgcatattagacatattctagaaactgcacacaagctctgacaaataatttgattcccttcgtattggctttcttaatttagcttctgaatgcttatatctcatatgcgtagcaaaataattgtacaagtggcaattaaaaaccatccactttttaatgaaaattatttaaaaacacaaagcatgctaccataagtcagattcatagaaaaaaaatgttaacgacacaggacacagaaaaaaagttaaacacagaaatacaatgaacagatactaggtaaattggaagttcaagaacttactgaaaatcaagagttagacttttcatccaaagagtctttttctcccaccaagcatctaaggttttcagtaaaagagcccagcccccttcccccaaagccagtggcttttgtcctgacctagaatagggtttgtggggactgtacctgagccgggcagtctgcaatttccaaattgacaagaagagactggaagataaagagcatgttcttacaggtgaagagcaattttgcaacttttcaaggcgacacccaggagaaagcttgcctgctaccaactgctgcagagtctgggcagaattcctctagaaagaaaaagaaagtctttcaccccccccccccttccttgtctgcctctctctgtctctagttctctttctcctctctgtctctctctctcagatccaatcttttaagagcttcagcacattgctaagctaaagggaaattctctttgataaagcggtgtttccagcttctgggttttaaaacctaaatctatattcaaatctggctgaaggtgtgttctgggatttatgaaagcctcttaaaggggtaaatttaccaaaccgtgacaaaatcatcacaatcttactttagacatctgaagtggatgagaattttaaagagacccttgtttatttaacactgtccatttccaactcgtagtttattggccctgtatttctgcgaagttattagactagagggcaaaggagaagcgggagctgtctgctgccggccgctggaagggcaaaaccctctcacgccccaccatgcataaatctgcccctgtcgaatagaacagggggatttttagggagattcagctgcccccgccatctgggaggacatcgcaaacctctacatcgggcttgaaaggttaccctggacactggaccctacggcagatggatctcccagtccaaaatggtttacttggtttagctcacaagcgcatgttctgatcattctccatcccaccccatgcccactgtccccaaggccttcctccggccttcccctctgccagattcacaacgtccatttttctttttcggctcttttatgctttaaacatcattgtgatcaaactgggggaaacgttgtcttttctaggggtaggaaggagactctgcttcaggtgatcgaggtggatttgcctttccttcatcgaaagcatcatgactctgaccaagcgcacccaaccagtgcctccgacagccagcgccacgagggtcataacgcccggggcatttgttaccccctcctcaccaccatccccattaaaggcttcgggggcggccgccaggtgtttcagtacagtgggggtggggtgagaaaaaaggtcggtactcaccctcccccccgcccgggcccctagaaactcttgactcctgggaacgcgacagccagcgggtctccggactggagctgctgcagagggccgggaaggagctgggcgggctccgggcccctcgggggctcgaggggccgccagggcccaaagctctagggacacctgtgacaggggccgctgccgcggagtccccagccccaggccgagcccgagccggagcccggctgccgagagcttgctgcctcgtgcgcactcccgtaattcgttaattgctgtaaatcccaaggacggccacatttgagtacacatacagtataagaaccgacaacaaagcgacgaattaattaccaacttcattaacataggtccccaaattaaaggcagcgagctgtttctttgggcccactggccgtggtggtgatggtagttggtggtgggtgggtggcggggggtggggtatttaggaagagattttatttttcttttcctgcactgggtgttgtgaagcaagagctgtcttctgctcccacccccacccagcttattcacacacactcaccagttccactagccaccccccaccccacactccgcccagtctgtttttgcttttctagggactcggatccgtttgaaacctgtccggtccctgctttctatgccaggcaaaaaagttgggctgggggtcgcactctccggctcgggcccccaggtcccatcacttcccagcctctgggctcgcagcccggggctcgggcggcgccagcccaggtagctccaggcctcgcagtgtcggtcgtttggtggcgtttgttctaacacagaaactgtttccaacgggggcctccctcgttcgctctcttccacgatatcttgtcgacctcacactcgcatcctcgaggcccgatgtggtcccagctacttctcctaaatgggccctgagattagattccggggttcgtgttccctgcagtctgtcgtgggcttctcaattccaaaaaaccccaggaacctaccagaagccggggtctctcactcggggatcatttatttatatgtgtaaggatatttata

SEQ ID NO: 1885742 - DNA, 4001 bp, Homo sapiens; identical to SEQ ID NO: 1241558

SEQ ID NO: 1885743 - DNA, 4001 bp, Homo sapiens; identical to SEQ ID NO: 1885610

SEQ ID NO: 1885744 - DNA, 4001 bp, Homo sapiens; identical to SEQ ID NO: 1241568

SEQ ID NO: 1885745 - DNA, 4001 bp, Homo sapiens
tgcttcagccttatggaccttctttttgttctaattgtctatcttctttcctacctcaggctttcatgcctttctcttgcctgtagagttctttgcttgtctcttcacacagttaacctatcttctaggtcttctttaaacatttttattgtgagataaactttctctgatctcctagactaggttagtgttccctttcataggtgtttttctgactctgtacatgttcacagctctcaccacacctttgattatttgtgttctgataggcttcaaataactttcatgagggttgggacagtcttgtcatgtttatcattttatctccacacctaccttaatacattgccatgtataattcatagcttcaccctgaaccttcctgtctttcttcttacagcagcccataacggtacgtgaaggccaaaccatctgtgtgcgtttctggcgatgcagcaattccaagaaggtgtggtatgagtgggctgtgacagcaccagtctgttctgctattcataaccccacaggccgctcatataccattggcctctagccctgcgtgccaagtgtccagagccttggaagcagcttcaggttctgctcctgtagtacagaaggtgcagtacatctatgggctgtgattccccttgcccatcagagaggagcatttcaatctgctttcctgccttacatcaaggtgggcaagggattataattaattgcagggctcaagccaccaatctatgaagacctcaggccagggggtgaggaattagtgctggatttgaagctacgcactcagcctcaagaactccctggaatatccctgagaacatggggtttgaacggattttcagcctttttctgttcttgttttgatggttttgtgtaagaggaaatacaaataaagttatagccctttactgcacgaccatgctgccccctgccactattttcccacacctcacttagacccaggcatgttcagatctgtcctcttagcctatccaagacccaaaggggcctagttgtattccctacttaggaagctgagcaatgactattgtagtcctggatataggcctttctgaccagctacagtgagctcttgtccattagaacctacagttaggcttttctctggggaggaggcatagagtttgccaccttggaaaaagatggaatagtgagtgaagccagtttctcttctgtattcttgagctactgcacgggcaactggttacctctcctttgttacctcttgggaagactggaatccatccaggaatctccagcaagaagctacctgttttttttgaataaaaccacagggttacagtttgaagtcctaagagatcatctagtccaattttccattttacagagggggagtttgaaatgggtacaatgatgtgatattagtatccaagtcagaattggaagtcaggtcctccgactctggctctccccatgttataaccagctacatttttggtagctacagtagaccacagaagtgtctaggggctcctggaggcccctggaaagtgagggtggacatcagttccttctttccggttagaggactcagtactgctacatccaaggagtcacctgagaaactttcaaatttacccttgcagtgggaaatgtgggggtactgatttgaacggaagttatgacctgtgggagcaggccatgacgatagggcagagtgtgggccaagacaagtctgtggcaagatctgcttttccctggtcccaagcaccgaggtcaggagaggtggtcgggaaggttgtttaggtagccggctcagaacggggatttcgagttcagcatccccggacgttaaacaaacgccgctgttctctacaaagcttaaccttaacgaccgacgtgactccttcagcaaatccgagtagggacggccaaggatgtaaattgtgcctcctcgttggctccgcccatcgcactggtctagtctacgcgagcaccaggagtggggttggtggcttcttcactcccgttttcagtcccgttttccccgccctccgcaagtcatttaaccaatgagagagtgatgggcggctaccaaaggacgcttccattttctggagtctctgaggttagccaatcaatgggaactcggtggttgctaagacgcatttgagtttgctccacccatacttaggactttagccaatgagaacctgtactttggacggttgccgcgaaaccagtgaggttatttccaaagccggggagtcttggcgcatgcgcagattggggaaggttctggaagacggcagagctgccgccattttgcgggaagaggaggctctgtacctgcagtgctgcttttcttgcctagactctaggaactatccgagctccactccccacaacatactcaaaggaacggagagaaccgggacccccctgcggggacccggaactggtgagaaaccccaaaacccggtccccaccagacgtcaccaatgcgtgacgttgctgcacggcgcctcccccctgacgtcacgggcagaaaatggcgtcacgaagagattcaggcgaacttttaacattaaaaaaacctttgtttgttttgacctggaagtgttagctacttaaatgtagcccactgccacgattttagagttgggcaccctcgtggctgtatcttgcaccgataaagatgcggtttctagaatcctgtgatttttctttccgggtctctgcagccgtgacacttagggtcgcccacactggagagggagcatcgaccctccgcggcctgagaggacacgcatcatcagtttcagccactcgcaccaccattcagagagagagaagggaattgagctttcttcctcaatctctagtctgtcgaagattcatgttcactatgttgacctttatgggcttttcccatttaactttttcaagcactcattccagtaggcgtattatgatgccacatatgaagattgagccctgggacactggctcccgcagagattgtgccagttggttgcctataggacctctttttttttatttttttaaggcggagtgtcgctttgtcacccaggctggagtggagtggcgcgatctcggctcactgcatcctgtctcccgggttctagcgattcccctgcctcagcctcccgagtagctgggattacaggcgcctgccacaacgcccggctaatttttgtatttttaatagagatggggttttgccatgttagccaggctgacctcgaactcctgacctcaggtgatccacccgcctcggcctcccaaagtgctgggattacaggcgtgagccaccgcgcccggcctataggaccattttttaaagctacacaacatggggagggtggtccttcaagtagcttttatcgttctcattgttcctcttttgttaagctgccttcagtttgtaggtgtttgtgcccagctaagtgatcagaccctggggatggcgctaccatcacccctggggctccagcttttcgtgaattcttcccgaattggtctgacagtggttctctctgctcctttagcagtggggtctatctgttggcttgtgctatgacgaggtctaggaactgacgtgattgtgggtctctaatactgtttttggagcaggatggaagaaaacatactctatgtggatgagattgagtggaccttgacccataagttgggacatgaagagagcgtttgaaaactaccaacctgggccgggtgcagtggctcacgcctgtaatcccagcactttgggtggccgaggcgggcggatcacgaggtcaggagatcgcgaccatcctggctaacacggcgaaaccccgtctctactaaaaatacaaaaaaaaaacaaaaaagaagaaaaaagaaaaaactaccagcctgaaaatgcatagtgtttgctaccttattgcttttagcacatctagaaagacactaaacccagtgagattgcaagtttcaaaata

SEQ ID NO: 1885746 - DNA, 4001 bp, Homo sapiens; identical to SEQ ID NO: 1241578

SEQ ID NO: 1885747 - DNA, 4001 bp, Homo sapiens
acgataagatatttccaatattcccaatgttttctataaagaatagacggtaatgaacaacactagaatatttggtaaaacaaaaccaacaaaaaagacaaagccttttgtataatatataactatagtgtaaaccgtaactaccttttggaggagggaagacatttttgtattcttctttgggctttttaataatttccaaatgtccatgcattatttggattcaataataacagtttaaactttgatcgtagaattatggatgcttaccccctagaaaattcagtaatatattgttttataaggtcttttaaaaaactgcttcactcctacgagattgcgccactgcactccagcctcgatgacagagagagactctgtctccaaaaaaaaaaaaaaaaaaaaaaaaaaagcctcactcctaaacactcccatttacaagatcttttctatataagaactttttaaataggcgggtgggggggaggaaatcacaaaaatacgcataatgttttataacaaaaacatgaggtatatcaaagtccagaaatgagaaccacgtaaatgggtaaacaagtccataaggatgtcctaattttgggatttcattctaaaatattacactagaaagctaattatacagactcatttgaatctgaccaaacaaaacatcttttaactacccttcctcccattctggtatttctttactaatccatagaaagtttttccaggtagtcccccgcaattctaaggatttttagactttatgactcacctcagtaatcactgagatgttctgttttcttcagcacaactgccaaaaaacccagtaattgttaagtcacacaatcattttctagttatgggcgccaccaatatagcagtagggtttaaaacagaggtattgagggtaactattaggatctatccagtgtgactaggtcactcactagaaatgccaacatgcatttcacgtttttatgaatacttttgagcaaaattactgttacgaataaaaaactgattctgctcggctgttttcttactgagaaaatttagtccacgtggattactgacgatatgtcacattttaaaaattactccattctataaaactagtcaattttatactccaattccgctatttaaaaatgtgtgtttcgtttaacagaatataagatgttaacagaaaaagatcaacgtctatcttatcggggacgtccttttgtctaagatgttttcagtccctgcaaaaccactgtttgctttcaaaaagtagcataagcctcgtgcagagtgacagacccttgtctaaggtcacagaagaagcgtctgcgctggcaagtaaattcctcagcatccagaaagccagcgctttctccagtttcctcatagctttatcccgtgaggagcacgcggaaacctctacccatgcaggatgtttctaagaaccacttcttccctgtcttaactaagaaggctcccacagctggtgccaatcaggtggagaacatggcaagtccccgaaatgcacttccaaagacaggaaagattgcagtgggacagaacccagaaaatctctcacattctcgaaaacccgaaagagaacctccaagaaagacgtttgcctctcctccacctctttatctcggcgggagaggaagcctcgcccccattcatcccgccccttctccccaccccgccgcagggagaagtttaccatggctgcctgcggccccttcacttccggtgccggtgccgctagggctgcgccatccccccagtcaatcggacaaccatagcctccaactgacctttctgacagctctgagactcctccggccacgactaggtgctgtcctggaggaaacggtggaggacggccgcacaaaaaccaatctacctgatgaaaactccgttcccttctcgccagaaacataaaatgcgatggagctacggccaccgctgccgagacaaaatggcgccgacaagctggtttagcgcaagcgccttggacagaccctgccccgcccccgtgcaagcccctggctgcaattctgggttccgtttccatgggacactccgccgccaatcctcgtgtcgaactgctcttcctgacccctcaattcaccaatcagtgcccagtcaagcacatccggagtcgtctctaccaatcatttctcaggacttgcttactcaataaccaactctccaataaagttggttttcggaaaaagccaatcataagtggaagatgtcctacctgctgtttttctcaccaatccatgaagtttcacagctacatccaatgaggacggcaggtagcgaggtcctatccgaagctcttcggcgtcatgagcagccaataggagttcgtgtagaagcgagtctgctcaacagcttgttatttggtggattgtggcagtaaatcggggcgagtggggaacccggcgcaggaactgcagccgcggctgggagtggtgctgcccggacgggggcccacggaggtcagaggggaggaggactctggagctgacagcgcgcacttcacccgcagttggtaggtggggagaggggaatccggggatactgaatggacgaagtggcagtagcagcagctgctgctgcccgaggtcccggtgcagttggaagctttggaggtggggagagggatgctaggcaagtggcacggcgagcgcaagggaaggggccagccattgaccagcggcagcaactgcaggaaccgccgccgcagttgcagccgcctcctcgtccgcttcctcgggttcccgggaaaatggctgtggggctggccgcgccgctaagtttgcttccgcgcggtgaagagcgggctgcttgggggagccgtcccccaactccgcggcgcgtccacctctgcggagtccgtggcaggactcgaggggctacgagctgatacctctctgggctgtacaaaaagttgaggcgggcgctgggaggaggcagcggctgctgcggtgcggctcccctcccctcccacaccctgtccgggccacctcccctcctcctcccctccgccccccgccccctcccccacgcgggtcccccggggctctggcggctcccggctgaaggccgcggcccctgcccctttgggtgaaggagcgcttctcctttctgacatggtgcagagcgaaggaaggagagcaatggcgccgtgacactccgctgccgccaccgcgggcccggggcgggccgagggggccgagcggcggaggcggggcgcgggccgaagtcggggtatccgggggaccgcggagcggaggctcggcggtcgtctccgcgggggacctggggaagcccgaagggagctctggccttttccggagctatctgtcctggagctccgagttgagcattccgggtcaaagtggccagcgaggcgggggcgcggtgggccgctggcgagctccggggcggaacgggctgccctttggcgctcgtggggttctcgctgccccctcagctcctgcgtcctggctgccctcgtaaggggtcttgtcccttggctggtgaggattctgcccctccccgctggcgtttgtttactttctttcccttggtcgctccccgcagttgactgattatgtctgtgcctgtctttccccctccccatagttctagcgactgcgaagatagctcgctgagctggaaccccacagatcaccaacaaaaatgaaggtaagtggagtcaactctgccccgatcctcgcgccctgaacactgccaatcctaaggctagtgccgtggaatgtcatttgttttgctactcaaaattgatgttcctactgatcagcagtttcggcataggaggatgtgttgaatgggtgaaaaatgatctgtgtgtctaaatgcggagtttaggccctctctgtagcagtactttggaaaggctggtgcagcctttcaattgttgtccattcggatagtatttttaaacacttcctgtgttggcagca

SEQ ID NO: 1885748 - DNA, 4001 bp, Homo sapiens; identical to SEQ ID NO: 1241579

SEQ ID NO: 1885749 - DNA, 4001 bp, Homo sapiens
agtatagatctgtggacagtccaaggtgttttcaagatcttctaacctttcagtagtcactttccaaactgtgtctcctgtataaatcttgtcggggtttggtttcaggctttgttggggtgagtctagagttggtctttctcaaggggcatattccttaatcctaatatgtgcactttgtggtgtctcagagctggatgtcaggagttttaacaagatgttaataaatctctcctctctggcagggccagaactctgacatctctgccactgcttttccccaagcactgctcaacctctagaatcttggttccactttcaactgcatagcatctgacatctagtaaagctcgggtcgcctcacactgcacatgtacaatccaactctcagtcactgatttgcaggagatccctgctggattctggggtcctctctctctacatagctccctccattcaggctccatagtttctacttgcttcagttaccctgaacgctgatgtctgcctccccagctcaacaggactgccatgctctgctcagactccaggtctctgtaccatggtcaggaaattgtctccaggcacagagctgaggcaatcatgtagcttacctcatgcacttcccttctctcaaggagcacagccttacagtgcttgttatccactgcctgaaatcggatgcttcacatattctgtcccgttttagagtagttttgggctagtacagtatcagtcatcccattatggttagagatggaagttcaggagtcagtatcttgatttcaaccctacctgaaatcacatttccacgttgggaagaacataagaaccacagcactttctatgaaatgtcataaaataggtcccagccagttgcaaaaactcaaaagttcatgtggcttaaaatcatataggctatgcctagcaaaatgcccgatatgcccgacagaagcatgtagttttataaattattaagtcatttgctggatacagaaagaaaggaggaagaacccactccttagagttatgacttatctaccaattaactctatgatcttgggcctacagctatatttaacttgtctttgggatcactggagtaacttcattgaacactaagaaaacctagttagaaatttgtatttgtaatttgctttgattatgtcctctgaaagatactttccaaaatgagacatgattgttgtggttttcttccagaattaaacaggtttccaagttggcaactgggatgacaacttgggagggcttctcccaatttcagaaagagctttattcccataagtgtattaaattcatgtagaaagaaaagaaccaacaacagaagacaaatgtgggtagcaaatagcagtttgggagtgtcaaggaggtgggagaaggactttcagttaagaaaacgatacaaatacatacatatgtacataatgtcatgtgagtgattaaactgtcctttctccagagagcaatattaaggttttcagaggccaaaacagtatactaatgcaatataattatacctttgggtgaaacatcaaagatgcaatgagtgagagctaaggaggctacaacccagctgaaatgccattatttaatgaaagaccaacagatgcaacaagaacacttaccaccatggtctagtgttccctctcagtgcagtcttaagcctaattcctcttctgcttggcctttgacctggtctctccagttgacttttccacaacagtcttcactcacaggcagagtagaaatgggatgcaagaaaaacaacaggtcccagatcacttttttcctctttctctattcctctttcagttatgaattctgttttgctttggagaagaaaaatgcgatccccctggatattttttctgggccatcaccaatttatcctgttccccctacccacccctgccagtattttatactttactcttcaaaaacttgagatgtcttgagtactgagaagtctgaaggagtttgtactggggcctggcctccgatatttctgctggataagctattccttcatgcctgacggtgaatgtgcgttatggacttgcccaaggaatttctggaactgggcctgcaagtctgttttagattaatgcaaatgggatttggggtagctgtgcctacaaatatcctgcaaagatattttgtatcaaaatgacaatattaagatgaatcaactcaatgaagtctttgggtaccgcaaaaatgttgaatgttgcataatcactttctgttgatctttttcttattactattatatgtgaatatacacgaggcttcctgccttcattgccacaatttaatgggacaaactgcaggcacacagtccttcctcactttctgtgcccatttctctgacatacatcattgctgaagtctgttgtttaagcagtgaaaaaaacatgtaatgtttcatataaggattatccataaaaccccaaagtccttaactcttctgtccttctgaggccatccttttctttaacagccatcccctaaattgtgggaagtctaacgtgttcttcaattttccagcagattctagagttgagacttggttcttcccatttttctcttgctcctgactttttcaatttcttccctccatctgcccactgcctttccaggctgccccagcccattctagtttgctttgcttcaaaatatggactcaccacccttttcttcatgataatgctcttgtgattagcagtgtgttattgtattttcttgttttatatgagcaatgtagaggaatgatagcacaaaacatggactgacttaaaattgaatcctggtcacactattgctaaagttttctgaagtctccccctcgaggagtccttactggtggcactctcaactgggtatttctggggcctgctccctggactctaagaaagctttttgttttcaatgtctctctctcatggtctgaccttcctcagccctgcagtggtgggtggaacccactccaaaattcctgtgacttgatggtgcagagaaacttggctctctttcaggctgaccctctcctacccagactctcctggggtccacccccacactcagaaaagcccactgaatgctttcccaacaaaagagcagtttgctctttaagaggaattctgccaccctcttagagcaaccagttaaaatgactgtcagcttacaatttttagttataaccagagtttctctaagtttgcaaaatgttttaaataaagcaatttgacagaagatttaataaggtgatagacaaaaatggggggtcctgttgtcaagagtggtaattctaaatgaggcaggaaaagttatggatagaagaaaaagagtttgtgatttactgtttcttccagtgacctccgcaatgtgtggaagagaataggttagacaggcagcaataattatctcacttgtagcttctcaaaacctggaaaataaggcaaggtctggtggctcatacctgtaacccagtcctttaggaggcaaaggcaggaggatctcttgaagccaggagttcaagacaaggctgggtaacatcaagagaccctctctctaccaaaaataagaaattggtcaggatagttgtgcgtgcctgtagtcccaactaccccagaggctgaggtgggaggatcacctgagcctgggaggttgagtcatgattgcactattgcactattgcctggacaacagagcaagaccccatttcaaaaaaaacaaacctagaaaagaaagctattctaaattgaagtaaccaaggagcagagccataatccacagagagagacacaggttcaacagaggctgtggaaaagcaattccaagcaacttctcatattccaggaacgcaactgaggcctggggagccaaaaggctgctctcagaggcaggcacattccaggtgtcaccttaggattccactcgggaccatgatggccctgggagggaggggaatgggctttgca

SEQ ID NO: 1885750 - DNA, 4001 bp, Homo sapiens; identical to SEQ ID NO: 1241597

SEQ ID NO: 1885751 - DNA, 4001 bp, Homo sapiens
actccagcctgggcgacagagtgagactccgtctcaaaaaaaaaggaaaaaaaacaaaacaaaacataaaagctcttgataaacaccgagttaaaatgaacttttaaagctgtgttctcagtttgttgaaaaagaaatggataatttcatggtttgggatagatggtgtcacattatcttaaaactgaaaggaagtacgacgtcttagctgcacttttgcaatatctctatcaaagagaataatgtatagactagaataagtattaagaattacttaagtattcagattaagattgttgaagtgcaactaattgcttctcatttgtctttttttctctcctaaatgaattcacttctttaggcccaaaggcttatatatcagagtactaaaaatattaatggaattgatctcagaaccactgtaatgttttaaatattgtggagaccaactagaagaggcctaagaaagtgtggacaaatgttagattagcttttgagaggcaaatggcttttggaaaccacacattagtgactgatataaattataggaaagttgtaaaagcttgacattggatcttgcccaatgaggctttaaaataaaataccttttcattcctatcactaggccttttgtccatcttctattctagttacacaaagttgttcaccttaccttggctcaagcgcttcctttcaccaggcattcccttctgtcaagtgctgcctgtagaaatcccattcttcaaggtctacctcaaaggtctctcaaatgtacctcgaactggaattaatttctcttcttggctcctttcgtacttcatgagcacacccatgatttaatacagaatattttccttagctgtacatatgttgttggtgcacaaacgttgtatgttgaagtcttggagataatcctgtttcccacagattagaaaattttgagggcaaggagcaagttatatctagtttacaaatctctgactcccctccttccttaatcatataatacaatgcctaacttaatgattgggtagggggaccccactagaaccctgacataacataccttaaagaagtgttgtatttcaatttataaaagtttatatgtaaaagtttctggaattgttgcaccctgtgctacattttataaatctagttaaagctttgatttcagagcagttttatctggaggcattataaatgaccatatggaatgtaggtatctttcagcagaaattcgtttattgacattggttttttgcatttttgcatttgcttttcattacttgttttgtcaccaaattatctggtcaaagcaacatacactgcacattacttgtttattactttacattcagccaattacatttaagaatcaaatacactaaatgccaaagaatctcatttttttttggaatggtgtaggtgtatttcttggaggagtgtgtcaaaaaaataaatttgaaaacgtactctctttaacaaaataaaagcaaaccctaccgttgactcgtgatcattacagctgattttaagttgttttgtaaatttattccagtaggtgtcactggtgagtcgaggaaaaactcctttcccaagtgtaacgttttaattaaaagaaagtaaaaggtttaatcaataaaaaagactatgagaatattcatctcttgagagtccaaaattaacgtatttattgttcaaaagagacggggtctcgctatgttgcccaggctggagtgcagtggctattcacaggcgcgatcccactactgatcagcacgggagttttgacctgctccgtttccgacctgggccggttcacccctccttaggcaacctggtggtcccccgctcccgggaggtcaccatattgatgccgaacttagtgcggacacccgatcggcatagcgcactacagcccagaactcctggactcaagcgatcctccagcctcagcctcccgagtagctgggactacaggcacgcgccaccgcgcccggcggtcggataccggcgcagaatagcactagaagctgtggtatggtgacgtcatcaactgggccagcccacaacgcctctaagatttcattttactcacccagcgaaacaacctgaccacactgcgcacgcgtttcctttgagcactgcattctgggtaaactgtctcaaaaatttgaagagcgcatgcgtgggccagcttcttccttttacctcgttgcactgctgagagcaagatgggtcaccagcagctgtactggagccacccgcgaaaattcggccagggttctcgctcttggtgagaaatagtttgtgattttggggaagcgttgccgtggagcgctaggctgcttaaaatctcaagtagaggaggccacgggcggcacgagggagcacgccgactgggagtcgctggtgccgccattacaggcctgtactgtggcttgggagtcccgggatgcgggtagtagccgtctgagtgcggagtcttgtaatttctatgacctgcaaaaccgctgtctcttttcttacagtcgtgtctgttcaaaccggcacggtctgatccggaaatatggcctcaatatgtgccgccagtgtttccgtcagtacgcgaaggatatcggtttcattaaggtaggcgtctgcaggcgtactccatgttgtttgggcagagaaggttgtgggggttattttttccgcgaaagacaaacggacagatcttccctggagtggtaattctgagcattcgaccaagagcttttcctctttttttagttggtagctggtgacagtgttgatggtttgggcaatcaaattaatagaatggagaaggtgaaggacttagtctttcctactcccttttttacctagatagcttagccagttttaggtgccgtgtattgtgtttggtgaaattcactttagagaagccactaaaattgttttacatttgtttcatttatcaatcttgtaagtacctattctcttttttttttttttagagatagggtctccctctgtcgcccaggttgaagtgcagtggcgttgttacggctcactgcagcctcgaactcctcctggtctcaggcgatcctcttgccttggcgtcccgagtagctgggactaaaggctcttgccaccacgcgcggctgtacctagatattttctaaccaaatatatgtattaaccgctgaccccaagtttttttttttttttttttgagtcggagtcgcactcacccaacctggagtgcgatggcgtgatctccgctcagtgcaacctccgcctccccggttcaagcgattctcctgcctcagcctcctgaatagctgggattacaggcgcctgccaccatgtccggctaatttttttatttttagtagagacggggttttaccatgttggtcaggctggtctcgaactgctgacctcgtgatccgcctgcttcggcctcccaaagtgctgagattacaggcgtgagccaccgcgcccggccaacccaaaatgtttgaaagcgtcatacactggaatgaacttaaagtttggggccggaaagacattgttaagattcagcaaacaatggtctgccatttagtgcttctatctcttgatcatcttagtcaagctagtgtttatatgaaacttttgactgtgaaacttttggcttctgaaaatcttttaaatagtagtttgggtttttttttttaaggtgaaaacgaatttattattggctctttgagataaaaatcaccagctttctgatcaattattttgtattggatagtactgttctataatgatgtaaatttttttttttgttttgaaattgggtctccctctgtttcccaggctggagtgcagtggcgtgatctcagctcactagcctccccctcccggattcaagcgattctcctgtctcagcctccctagtacctgggattacaggcgtctgccaccacgcccggcctatttttattattttgtggagatgggatttcaccatg

SEQ ID NO: 1885752 - DNA, 4001 bp, Homo sapiens
ggcttgaggcaggtgaagcgcttgaacccgggaggcagaggttgcagtgagcagagatcgctccccggaactccagcctgggagacagagcaagactctgtctcaaaaaaaaaaaaaaaaagatataccaaaattattttgcttcttattttaaggttggtgagaaggtaaagtttttttttttttaaaatagcatctctacctattttcattttgtaaaaatgcattcatttggaggtgattttttaattcttgaaaagttgtcctgaagaaccggaatcagacctattccatgtggttgcagagggcagacccagaagcagccatgggggagatacctgttttattcaaagaggatcttttctgacagttatccttgttcaaaatgcaatgaactacctcaaaaaaaaaaaagggaatacaattagctttataaaaaatttagtacaatgcttctttcctctttcattttatagacagtgaggaaaatctgtgtttagtgcttagagtctttaaactcccagtagattatcagattaatgttaagactgatgtgaatgcttaaccagtttccactggccctaaaatgcctgaatttaacagtaagccctccaaaacagttatttcatatagatgaaatttctaatcacagaccaccaagaacttttgaaaaatttaaaggttgtcttctttcatagcttactcacttatttctgtttttaaaatgaagcatgattatgagacatgctcaaggacagctcagtggaggatgcagaggtttttgctctcattaacactgggttcaagacccaggcggctgggcgcgttctttaaactccctttgcttcagttacttttcggcgtctaggtgccgttccctttttggcaatccgacggagagagaagcaagcgaggagacagggtggtgcattctgccacgctggcccctcacctctgtcatcacagggcgttctgggttcctctgagaggagtttttcccttataaggaggcagtagtgggattcctcttcggaagattagccctgcctgtagccaagtagaacgaaaggatttgtgtgtaagactgttgattagcccgtctttggtctatagcattctaaagcaaaaaccttgacaggacaggggtgaaagaaggtgacatccgtgacaggaggtaggcagggaagctcaggtcagctcagtgcaggggaataatgttggtaactgcaagcagcatcctgaacggccgcgggaagaacttggaaattctttaagagaacgtactttttgctctctgtgatccggcggccatttttttccgactgtctgtgggtaaacgagcagcccctgttggctccgaaggtaataacagcttttcgcagagacgttttgaatatgcgccggtagggggcagcgatgaggcggttgcaaatccccaagcatcccgtcaactggtgagctttcgcgctgaaggaaacgtaaaacagtggataaatataagagtggagagagaaagccaactataaacctcagtaacatctttctctatatattttttcctttagaggaagagaggactcgtctttaaatgtgcacattagtatgtttcttaatacgtatgaaccggaaaggaggcaaacttcttaacttcaaagacactatttacttacaaaggtacccttaatgagggaggggggcaaaagagacggggtctcgctatgttgctcaggctggagtgcagtggctattcacaggcgcgatcccactactgatcagcacgggagttttgacctgctccgtttccgacctgggccggttcacccctccttaggcaacctggtggtcccccgctcccgggaggtcaccatattgatgccgaacttagtgcggacacccgatcggcatagcgcactacagcccagaactcctgggctcaagcgatcctcccacctcagcctcccgagtagctgggactacaggcacgcgccaccgcgcccggcggtcggagacgctgcgaaaagctactagaagctgcagggcagttacgtcattggggagcgggggggccacgccgggcgacgtgagcttggacacacccacactgggcggtctggaggctacgttagtgtggcgtcatccgagctgggcagccgttctgccttacagggttgggaccccggaagcttatcggcgcggttgcggccgcggctccctgtgttttgatcagaacaccacgttcctgcttaacagaaattggtcagtatgcgcttaatgctcatagtgtggcgtccggacacgcagcgagagaaaaacgcaataacctggtccgtcagcgttgcttgcttcagcaggccttaaatatgtgctgcatcttttgggggacgttacttaagaggcaaacatctggctcgaagtcttccattattttcagcaagcatttaggaggtgactgcactataaggagaataacccacagtagcacaggttgggagtctgcacagtgccgaggccagctcagtcttcactattcgaacgaaggaagcctggggcaactgtttgttttctctgccctgcgtgttagttgcccgttgtttttggagaaaaaactagtatcggggtatattggtggaaaaatttggatttggcagcttgaagccttttttgcgacaagcttaggttaggaagggatagaggggaggaaagaaaaaataattttcgaccatagtagatctgcgaaagcagaccttctgtttgtcctcttatctatagtctttccctcaccccccaccccttgtctcctaaaaaccagtccagactttccccgccacctccgtccttgtagcagataacgttgctccttccttcatggataaattgaaggccaacagacaaaaacttttcaactctttgctgctctgtccgctctaaatttatctttacaccttcagagaagagcacccttctgttttcccctcctacctcaaacccagtaggtcaaaattcttccatcaatcatttttacccattctatctctctctttcatttatacagattccaagctgcctttcttctaaaaaaaaaaaaaaaaaaaaagtaaaaaaactcctttgaccttgcctttctaaatgaaatctgtctgttgttttcatggctgcacttcttgaaaccatgttctacaattgctacatttgcttcttaaccttctgtcttcagtccatagcccaccaatccactgaaactattctagctaaggctacgatacccaagcctcctaattggcaggtctaagggaccctttctgacataggtgatgtaatttaccaccaatctctgtcacttgtgactgctgtttcctccctgaacgtttcttctccctggttcttgttcacagcccctgatatttcctcccaggctctctcttctgcccacccagcaaatgtttttgttccttacagttccctcctaaatgttctctgttctctcaccgtgttcttcatgagtgatgtaataaattctcaaggctctcaaatctgtagttccaatctgatgctgtttccagagcttcagattcacatttttagttgccttctggatgtcaccttgaaatcattcaaaacttcaaattcagtatttgcaaacaaaactgatcatcttctcttcttcctccaagcttacccattttttctttttatcaatatgtttatttatttattttttgagacagagtcttgctccgttgcccaggctggagtgcagtggcacgatctcggctcactgcaacctccgcttcctgggttcaagtgattctcctgcctcagcctcctcagtagctgggattacaggtgcccaccaccgcacccagctaatttttgtattttcagtaaagatggggtttcacaatgttggccaggctggtcttgaactcctgacctcatgatccacctgcctcggcctcccaaagtgctgggattacaggcgtgagccactgtgcctggctcat

SEQ ID NO: 1885753 - DNA, 4001 bp, Homo sapiens
atggcaccaggggcacatgtttttgttttttcttttttgaggcaggctcttgtcactcgggtgggagtgcagtggcgccatcaccgctcactgcagcctcctcctgccttctgttttgttttggtttgttttgttttaatttagagacgaggtctcttgctgtgttgcccaagctggtctccaactcctgggctcaagtgatcctctcgcctcagcctcccaaagcgctaggattacaggcgtgagccaccgtgcctggccaacatttttctttccttctaccagttttgtattatttactttttttttttttttttgagacagagtctcgctctgttgcccaggctggctggagtggtacaagtggcatgatctcagctcactgcaacctctccgcctcctgggttcaagcgattctcctgcctcagcctcccgagtagctgggattacagacacacaccaccatgcccggctaatttttgtatttttagtagagacaggatttcgccacgttggtcaagctggtctcaaactcctgacctcaggtgatccgcccacctcggcctcccaaggcgctgggattacaggcgtgagccaccgcgcctggcgtgtatttacccttctattacacatatcccgggggtgctgaggtctgggaaggcttggacataagggtcttaagacagcaaaatggcaacattataactggaggaaaggtccatgtcaggatggtggccctgaacatcagagtctcttgtttcctcctggggacatgtacagaggctgtcacgagactctcctaaaagcattcatgaaaagcctttttctttccttctttctttctttcttttttttttttttttgagacggagtcttgctctgttgcccaggctggagtgcaatggcgcgatctcggctcaccgcaacctccgcctcccgggttcaagcaattctcatggctcagcctctggagcaggtggaattacaggcacgcgccacgccgcctggctaatttttgtatttttagtagagacgggggtttcaccatgttgcccaggttggtctcgaacttcctgacctcaagtgatccgctcgcctcgccctctcaaagtgctgggattacaggcgtgagccaccgcgcgcggcccatgaaaagcctttctacctggcttttctgaccagtcttgcgtggtctcccaaggccgttagcgaggacccaaagtctcctgttcttgagggccttgtagtccggccttcactgtcatgcatgacacgcctgcttctctgggagtgggatgactccgttctagtccttccagaagacgctgctgccaacaagcccagcagctgcctgggtgggatcagcagctcccgcggactcgatctccccctgggtggggaactcaaccccgacaggtccttcctaaacctctaagccggatacttccctggaccaggattaattgcccgccccgtacgtattctgtcgtttctgccagcggttaccaagaccctgggatattttccccagggaagagaaagcagttctggctttttcctctacacaccccaaacttgcaggaaaaacgcggctttggcctggagaaagcacgagatcgtgacgttttcacgacaataccctggagaacataaacccacagtataattggcgcgttactaaaggatcccccgcggggtgagaaaaaagcagcaatcgccctacccccacaaaaacgtgaaaacgaaagcgaactgcccagcagcccgtgttttgaacaccacacatccagacccagcgccgatcataataacagctacctttcaacttccagtaaggcaggggaaagcgcgaacgcagtcccccactaccacaaattatgcagtcgagtttcccacatttggggaaatcgcaggggtcagcacatccggagtgcaatggataagcctcgccctgggaaaaccaccttcgtgatcatggtatctcccctgccaggtaagtatggactggccgtgcggcttcctctcataccctcgcgcccaccacactctcaacacacggtcacttctctcgtgcggccccagccccctcaccctctccagccccctcgctccaccgttgccgctaggggaagacaccccgacagcactcggatatcgcgcgcgggacatggggtcccaggccgagcgtgaccggcagcctccgcgcgccgtgctcatctgcatacgccacgcccttgccggggtcgtccccggcgctccggtctctcccgctcccggaccggggacctaccgacggcgtgggacaggcctgggtgtctccggggctggttgggcgcaagtgggcgcgcggccgggagtctgggacctgaaagggaggcctgagaggacgagagagtgccagagagagagagagagacagtgacagagagaagagagagacagaaagacagtgacagagagaagagagagagagagacaggagagaggggagagagaagacagagagagagagagagagagagagacagtgacagagggaagatagagagagagagaaggaagaaaagagggggagagagagcgagcgagcgagcgagcgagcgaaagagagtttgcggccccaccgcccagtccccaagggatctagcgtctgggccgggcagggctcgggtttgggctcaccttcctttcagcaaaaagcaagtttcggccccttctcttctcgccagcccaacagaagtcttccccacagggcacaactattatgaggttcgcctcctccccccggttaaacattaagcactaagatttccccaagcagcttgacagaacatcgttttccttgagcatcttccctggtaggcctgtcagaaacggctgtaactaacataggcggcgacgaaacctaggaaaacctaaaggaggggggccgggtggagtcgggggggaatcaagcctcttactttgagggaaaaaaaaatcaggacaaagtacaaagttgtccactatgcaaaccgtgcaccggtcgagttaagtgtataacgctggacaacaaaccatttttgaacacttgggaaaatctgtaaatacactattattattattgtattcttcttcttcttcttcttcttcttcttcttcttcttcttcttcttcttcttatgtgagacggagtttcgctcttgttgtccaggctggagtgcaatggcgcgatctcggctcaccgcaacctccgcctcccgggttcaagcgattctcttgcctcagcctcccgagtagctgggattacgggcatgcgccaccacgcccggctaattttgtatttttagtagacacgggatttctccatgttggtcaggctggtctcgaactcccgacctcaggtgatctgcccacctcagcctctcaaagtgttgggattacaggcgtgaagcaccacgtccagccactgttatgttttatagtcaactcacacgatctgagatattctatgtaatctgttcaaccttcgttttatgcttagatggtgagtcgtcctcgattttttttttttttctgagacggaatctcgctcagccgcccaggctggagtgcagtggcgtgatctcggctcactgcaaccaccgtctcccgggttcaagcgattctcccgtctcagcctcccgagtagctgggattacaggcatccgccatcatgcccggctaatttttgtattttagtggaccaggctggtcttgaacttctgacctcaggtgatccgcccgcctcggcctcccaaagtgctagggttacaggcgtgagagcaaccgcgcccagccgatttttttggacagtagcctgagaagtttcttatctttactacttctcccatcgagaagtagagtccaattcccctctccttggatctggtttggccttagtgactaccttgcacaacggcatgtggcagaagtgatgtccagggtctcccgaggctgggtcggaggcatccttacagctc

SEQ ID NO: 1885754 - DNA, 4001 bp, Homo sapiens
gcgaacagcaaggaggccctgtgtcgggagcaaaattaaagagagttgtatgaaatgtcagtcacagaggtgactgggtgggggtaagatcatgagggtcttgtagacaccacagtaaagctttaaatctgggtgaaccaggttttgagcagaggtgtggcatgttctgataaaaaaatgaaatgaagtgaaaagcagggagaccaatcaggagacttgccaatccaggcaagatgatgttggctcaaaccaggttaaaccactgggtaaatacaaggggcaggggtgtgagaaaaataaggtgcttacccccaacttgcctttttctgatgcctgtaacaacgatcacattctcctcaagcgagaaggggctgaagaggctgacagaggtcgagggtgtggactagtggatcctcccactgggctcagggactagttttgtagctctcacccaggagctcgagcaaatggtattaagtgctgatgaagctgagcagggaggatttgcaactctgtgatttctctgtaggaaagacacagtattaatctcccctgggctcagagctagaacctgggcacctgatgtcaatagattaatccaacaaatatattgaaagccaggcagctttctagtcacctgtggatggaagcagtcaacaaaataggcaagaatcgctgacctggagcttacattccaagtgggtgacgttagatagaaaactaaaacatacagcacgttcgatcagtgcttcttaaacttcactgtggacagaatgcacattcggactcagcagatacagcaaaggtggggcctaagagtctgcactctttaattaattaatttatttatttatttatttttgagacggagtcttgctctgttgcccaggctggagtgcaatggcgcgatctcggctcaccgcaacctccgcctcccgggttcaagcaattctcatggctcagcctctggagcaggtggaattacaggcacgcgccacgccgcctggctaatttttgtatttttagtagagacgggggtttcaccatgttgcccaggttggtctcgaacttcctgacctcaagtgatccgctcgcctcgccctctcaaagtgctgggattacaggcgtgagccaccgcgcgcggcccatgaaaagcctttctacctggcttttctgaccagtcttgcgtggtctcccaaggccgttagcgaggacccaaagtctcctgttcttgagggccttgtagtccggccttcactgtcatgcatgacacgcctgcttctctgggagtgggatgactccgttctagtccttccagaagacgctgctgccaacaagcccagcagctgcctgggtgggatcagcagctcccgcggactcgatctccccctgggtggggaactcaaccccgacaggtccttcctaaacctctaagccggatacttccctggaccaggattaattgcccgccccgtacgtattctgtcgtttctgccagcggttaccaagaccctgggatattttccccagggaagagaaagcagttctggctttttcctctacacaccccaaacttgcaggaaaaacgcggctttggcctggagaaagcacgagatcgtgacgttttcacgacaataccctggagaacataaacccacagtataattggcgcgttactaaaggatcccccgcggggtgagaaaaaagcagcaatcgccctacccccacaaaaacgtgaaaacgaaagcgaactgcccagcagcccgtgttttgaacaccacacatccagacccagcgccgatcataataacagctacctttcaacttccagtaaggcaggggaaagcgcgaacgcagtcccccactaccacaaattatgcagtcgagtttcccacatttggggaaatcgcaggggtcagcacatccggagtgcaatggataagcctcgccctgggaaaaccaccttcgtgatcatggtatctcccctgccaggtaagtatggactggccgtgcggcttcctctcataccctcgcgcccaccacactctcaacacacggtcacttctctcgtgcggccccagccccctcaccctctccagccccctcgctccaccgttgccgctaggggaagacaccccgacagcactcggatatcgcgcgcgggacatggggtcccaggccgagcgtgaccggcagcctccgcgcgccgtgctcatctgcatacgccacgcccttgccggggtcgtccccggcgctccggtctctcccgctcccggaccggggacctaccgacggcgtgggacaggcctgggtgtctccggggctggttgggcgcaagtgggcgcgcggccgggagtctgggacctgaaagggaggcctgagaggacgagagagtgccagagagagagagagagacagtgacagagagaagagagagacagaaagacagtgacagagagaagagagagagagagacaggagagaggggagagagaagacagagagagagagagagagagagagacagtgacagagggaagatagagagagagagaaggaagaaaagagggggagagagagcgagcgagcgagcgagcgagcgaaagagagtttgcggccccaccgcccagtccccaagggatctagcgtctgggccgggcagggctcgggtttgggctcaccttcctttcagcaaaaagcaagtttcggccccttctcttctcgccagcccaacagaagtcttccccacagggcacaactattatgaggttcgcctcctccccccggttaaacattaagcactaagatttccccaagcagcttgacagaacatcgttttccttgagcatcttccctggtaggcctgtcagaaacggctgtaactaacataggcggcgacgaaacctaggaaaacctaaaggaggggggccgggtggagtcgggggggaatcaagcctcttactttgagggaaaaaaaaatcaggacaaagtacaaagttgtccactatgcaaaccgtgcaccggtcgagttaagtgtataacgctggacaacaaaccatttttgaacacttgggaaaatctgtaaatacactattattattattgtattcttcttcttcttcttcttcttcttcttcttcttcttcttcttcttcttcttcttcttatgtgagacggagtttcgctcttgttgtccaggctggagtgcaatggcgcgatctcggctcaccgcaacctccgcctcccgggttcaagcgattctcttgcctcagcctcccgagtagctgggattacgggcatgcgccaccacgcccggctaattttgtatttttagtagacacgggatttctccatgttggtcaggctggtctcgaactcccgacctcaggtgatctgcccacctcagcctctcaaagtgttgggattacaggcgtgaagcaccacgtccagccactgttatgttttatagtcaactcacacgatctgagatattctatgtaatctgttcaaccttcgttttatgcttagatggtgagtcgtcctcgattttttttttttttctgagacggaatctcgctcagccgcccaggctggagtgcagtggcgtgatctcggctcactgcaaccaccgtctcccgggttcaagcgattctcccgtctcagcctcccgagtagctgggattacaggcatccgccatcatgcccggctaatttttgtattttagtggaccaggctggtcttgaacttctgacctcaggtgatccgcccgcctcggcctcccaaagtgctagggttacaggcgtgagagcaaccgcgcccagccgatttttttggacagtagcctgagaagtttcttatctttactacttctcccatcgagaagtagagtccaattcccctctccttggatctggtttggccttagtgactaccttgcacaacggcatgtggcagaagtgatgtccagggtctcccgaggctgggtcggaggcatccttac

SEQ ID NO: 1885755 - DNA, 4001 bp, Homo sapiens; identical to SEQ ID NO: 1885753

SEQ ID NO: 1885756 - DNA, 4001 bp, Homo sapiens; identical to SEQ ID NO: 1885754

SEQ ID NO: 1885757 - DNA, 4001 bp, Homo sapiens; identical to SEQ ID NO: 1885753

SEQ ID NO: 1885758 - DNA, 4001 bp, Homo sapiens; identical to SEQ ID NO: 1885754

SEQ ID NO: 1885759 - DNA, 4001 bp, Homo sapiens; identical to SEQ ID NO: 1885753

SEQ ID NO: 1885760 - DNA, 4001 bp, Homo sapiens; identical to SEQ ID NO: 1885754

SEQ ID NO: 1885761 - DNA, 4001 bp, Homo sapiens; identical to SEQ ID NO: 1885753

SEQ ID NO: 1885762 - DNA, 4001 bp, Homo sapiens; identical to SEQ ID NO: 1885754

SEQ ID NO: 1885763 - DNA, 4001 bp, Homo sapiens; identical to SEQ ID NO: 1885753

SEQ ID NO: 1885764 - DNA, 4001 bp, Homo sapiens; identical to SEQ ID NO: 1885754

SEQ ID NO: 1885765 - DNA, 4001 bp, Homo sapiens
atgggccaaatcccaagatctgcgacaatccacagggcaaatatccctcagtatacgaatgacgtgaagaaaaacgaggcgagggcaattagaggacaatagacacccagggtcgtagcaaccgaatacaacctgggaccttgtttggatctctatgacaattcgactgtaataaggaatttctgaaataaggaaatttgaaagtagactgaatattaggtgccatgaaggaattaccttaacttttctaggtgtgataatggtcggttaattacttttttaaaaaaaattactcatcagaggaagttaatggtgaaacgacctgttctaaaggtgcgcgccgaccccgggccggccctctcggtgccgcagcagcctcgttatcggggcgtctccagctcgcctgggcgctggaccccgccgcgcgctcagaggcggccgcagcattggcagctcccggcatgctccgcgggctgagctccgcggcacgagaactcaaagcccccggcctgggtcctacgcggggccctttacccagggtgccccgggcgctcatttgcatgtcccacccaacaggtaaacctgacaggtcatcgcggccaggtacgacctggcggtcagagcaccaaacatacgagccttgtgatgagttccgttgcatgaaattctcccaaaggctccaagatggacaggaaagggcgcggttcggtcaccgtaagtagaataggtgaaagactcccgtgccttataaggcctgtgggtgacttcttctcaacgtgctcgcttcggcagcacatatactaaaattggaacgatacagagaagattagcatggcccctgcgcaaggatgacacgcaaattcgtgaagcgttccatattttgcgcagtctgtcaagatcatttcagtatctgctaattagtactaaggaaacagtgtgaatctaagcgaaaacgtgtggcacccaatgacgaaacagtggttttcattacaaaaaatttgtgaaatctatgaagtgggaacgaagcagagtcacccgaggaatgttgtgtgcgaatagatcgttaatacgcattttggaaatggaaaaaggtcaccttgtgccttcttcattgaacttttcattctgaaatagacttacggtcttgtctcaccaaacaacacaaactccagagccccagcttgtttggcttttgttcagtagaagaccaactggcatatgaattgttcaataaatccttactaaatctttcctaacctaataaatctctactaaaggaaggaaacattagcgctcatttcttgcgcctactttgtgccattctccatcatcttagacctgagtgcttacaccctttctcttagactgcgagctgcacaaaggaaaggaatgttactaagggctggtattattggaaatcaatgttggcctttgcctatagattcaagagctccaggacccatgtgaatactggccacaagtagcaagcccatctggatctgttttcacgagtcttctgttttcatgtatcctctaagaagtacttagaaagggccgatttacataaatcggacagattctgtgatgggaaatttgattaggaggaatgttcattgcccagcctgaaagcatattttaatcaatgaaaacaagtatttggacgcagatacgaggatcacctaggtaacttaatagtaacgtaactaggcgcctcgaagatggaggctgtcgaggaagtgtgcccactgtgcgacaggactggtgggaggcccggacagcatcgtaggtgtctactgggccaagctcgcgagcaggaaaatgcaggccccgagagatcttgaacaacctctaggaacaccaccgtatcttgcccaacgaccttcgttgaaccgcgcaaaatatggaacgcttcacgaatttgcgtgtcatccttgcgcaggggccatgctaatcttctctgtatcgttccaattttagtatatgtgctgccgaagcgagcacgcaaataagtccgtccccaggtcttataaggcacgggagtttctcatttgttttccttacggtaacctaatcgagcgctttcctgtccatcttggagcctttaggagaatttcatgtaacggaactcatcacaaggctcgtaagattggtgctctgaccgccaggccgtatctggccgcgaccgatctgtcaggtttacctgttgggtgggacatgcaaatgagcgcccggggcaccctgggtaagggaccccgcgtgggacccaggccccggggctttgatttctcgtgccgcggacttcagtccgcagagcatgccgggagtctggcagtccgtgcggcagcagtggagcgcagaggacagggccggcctggagcgcttggcgtctccccgaagtctctctgagagctggggaggcggttggcccgctaggtcactaggtcgggcaggggtcttcccccaaacatggaagttttcaccgatatttcgccggtgacattggggccttgtgccaacagactttgctgaagtgaacccaaagttcaaccctccgggagagtccttgcaacgattcggccactcagttctggagccgtcggcactacattctaagttgcggtggactccactggcatctgcgtgactatctccggccggtgtgcataggcgcccgtcgggtcgggggctgaggaccttggacagggcggccacacccctctcgtacagcagcgcctctgtccattctgcgcaggcgcctctggggtcagggacggaggaacccgggcgagtagccacgccccttcacaggtgtcttccctcgaccgctactttcgcccctggcagccaaacacaggaacgctgaaaaacaggctgagaggtggatttgaggaattacatcgttcacttagagttgaactggagaagcattcttgtacgtccttatacctccctgcactctcatcctaaccctgttaggatacaaaagtacgggacagacctactcgtaagaaatactgttagtgttaaatattctgatttttaactacagcaaaaatcgtactgttcaagtcatatccctgagcgttgtgagatgagggccaaagatcaaagcctctggtatttatttggttacagtatttcatatattgaagaaagtaaagggcaaatgtttgcctgtgttgcgttaaaacggcacgttgaatgaggaatatggcacatttaccaataactggagttttgctttttctccttcctgtggtcgttttaccccttcctgtaacaatattttgaagtaagaacctactaaaaatcagtaattgagaaaaattttaattggtatccaattttctgatgtaccaaaagaaaatagtgtgaaatcatatacgagtttctggtattgctgagccaaaaacagaaagaggaacagaaagttaagcccacaggaattattgctaaccctatgtttttctgtgtttgaggttataattcttttctttcacagcttttgaaaagtaatagaaacactgttctttccccctcaaaaaaattaggcaaaaacgacattcctgttgagttaaattttccaattacaaataaaatgtgctttgatatatttcttctaacgccctgtctttccaataagctatttctgctttgtgacttcaaagctaggaagcagtaaattgatgttcaattttatgattgtagaagtatatcaaaattctttcatgttctctcttaaaaaccttacaactaatcagtttattaaaggatacatggttagaagaatctatagttagaaggacgatcagagttacagggtcatgaacttgatgtccctacaagctatatgcgccttcagagttaggctgcattcccagatgacgacttataaactctttccattctgaaaagtgggaaaagacttagcacatacaagaaaaagaaatgtttgaaggttggcaggagataaatccattaggggagaaaaatctttataa

SEQ ID NO: 1885766 - DNA, 4001 bp, Homo sapiens
ctccgtccctgaccccagaggcgcctgcgcagaatggacagaggcgctgctgtacgagaggggtgtggccgccctgtccaaggtcctcagcccccgacccgacgggcgcctatgcacaccggccggagatagtcacgcagatgccagtggagtccaccgcaacttagaatgtagtgccgacggctccagaactgagtggccgaatcgttgcaaggactctcccggagggttgaactttgggttcacttcagcaaagtctgttggcacaaggccccaatgtcaccggcgaaatatcggtgaaaacttccatgtttgggggaagacccctgcccgacctagtgacctagcgggccaaccgcctccccagctctcagagagacttcggggagacgccaagcgctccaggccggccctgtcctctgcgctccactgctgccgcacggactgccagactcccggcatgctctgcggactgaagtccgcggcacgagaaatcaaagccccggggcctgggtcccacgcggggtcccttacccagggtgccccgggcgctcatttgcatgtcccacccaacaggtaaacctgacagatcggtcgcggccagatacggcctggcggtcagagcaccaatcttacgagccttgtgatgagttccgttacatgaaattctcctaaaggctccaagatggacaggaaagcgctcgattaggttaccgtaaggaaaacaaatgagaaactcccgtgccttataagacctggggacggacttatttgcgtgctcgcttcggcagcacatatactaaaattggaacgatacagagaagattagcatggcccctgcgcaaggatgacacgcaaattcgtgaagcgttccatattttgcgcggttcaacgaaggtcgttgggcaagatacggtggtgttcctagaggttgttcaagatctctcggggcctgcattttcctgctcgcgagcttggcccagtagacacctacgatgctgtccgggcctcccaccagtcctgtcgcacagtgggcacacttcctcgacagcctccatcttcgaggcgcctagttacgttactattaagttacctaggtgatcctcgtatctgcgtccaaatacttgttttcattgattaaaatatgctttcaggctgggcaatgaacattcctcctaatcaaatttcccatcacagaatctgtccgatttatgtaaatcggccctttctaagtacttcttagaggatacatgaaaacagaagactcgtgaaaacagatccagatgggcttgctacttgtggccagtattcacatgggtcctggagctcttgaatctataggcaaaggccaacattgatttccaataataccagcccttagtaacattcctttcctttgtgcagctcgcagtctaagagaaagggtgtaagcactcaggtctaagatgatggagaatggcacaaagtaggcgcaagaaatgagcgctaatgtttccttcctttagtagagatttattaggttaggaaagatttagtaaggatttattgaacaattcatatgccagttggtcttctactgaacaaaagccaaacaagctggggctctggagtttgtgttgtttggtgagacaagaccgtaagtctatttcagaatgaaaagttcaatgaagaaggcacaaggtgacctttttccatttccaaaatgcgtattaacgatctattcgcacacaacattcctcgggtgactctgcttcgttcccacttcatagatttcacaaattttttgtaatgaaaaccactgtttcgtcattgggtgccacacgttttcgcttagattcacactgtttccttagtactaattagcagatactgaaatgatcttgacagactgcgcaaaatatggaacgcttcacgaatttgcgtgtcatccttgcgcaggggccatgctaatcttctctgtatcgttccaattttagtatatgtgctgccgaagcgagcacgttgagaagaagtcacccacaggccttataaggcacgggagtctttcacctattctacttacggtgaccgaaccgcgccctttcctgtccatcttggagcctttgggagaatttcatgcaacggaactcatcacaaggctcgtatgtttggtgctctgaccgccaggtcgtacctggccgcgatgacctgtcaggtttacctgttgggtgggacatgcaaatgagcgcccggggcaccctgggtaaagggccccgcgtaggacccaggccgggggctttgagttctcgtgccgcggagctcagcccgcggagcatgccgggagctgccaatgctgcggccgcctctgagcgcgcggcggggtccagcgcccaggcgagctggagacgccccgataacgaggctgctgcggcaccgagagggccggcccggggtcggcgcgcacctttagaacaggtcgtttcaccattaacttcctctgatgagtaattttttttaaaaaagtaattaaccgaccattatcacacctagaaaagttaaggtaattccttcatggcacctaatattcagtctactttcaaatttccttatttcagaaattccttattacagtcgaattgtcatagagatccaaacaaggtcccaggttgtattcggttgctacgaccctgggtgtctattgtcctctaattgccctcgcctcgtttttcttcacgtcattcgtatactgagggatatttgccctgtggattgtcgcagatcttgggatttggcccattacttactgatggtgtcgtttaacttgtttctctagcctccatgtttcttgaaaatttatggttaggggtaatggactcattagattctggttgtgttgtgttttgttttgacgcccgcacggcttcaaacacagtggtagggtgtgtgcttactgcacctcagcaagagtagtgtatccgctggctgtccccgtgtgagtgatgcctacccctgacctgtgggtgcaggtgcggtcagccgtctgacccctcacactataaagtctcccagaaatctttcctttaatgattttaggatacacccatgaacaagccaagtagaaggtctggtctggtggtttgcttgctttttgttttgttttgaggacacgttgtaattgtacatatttatggggtgcaatttgatgtttcgatacatatctatgttgtataacgatccaatcaaggtagtgtatccaccacctcatgcatttatcctttctctgtggtgagaacattcagtagcctctcttctattttgtggtatacaaaattttactgttaaccattttcaccctaccgtgcaatagagcatcagaattttttccctcttctttaattgtatctttgtacccattaaccaatgtttataaacaaacattgtgagtttgtgagttataagtttacttgtgagttataaggatttaacccctggcctgtggtggccaagttctgtatcccatggaagagaattgagagaataataggatcagggaaagaaattaggaaagagtgttgatgtcatttgagtctctggatcatttgatcccatgagcaggtgctttccatagttgtttggttactcgttctaacaaattacttttattaggctagattaaagttgtttttgccaaatgcaaatatgagatcttaaacatttgtgagtttagcatgtcttcacactgcacacttgcaacattaaaacattattggcttctgctaaactcaaaaatatttaagatgccgtatttgcattttgacaaaaacaactctagtgttagtacccgtggttaagcatatatgaatttccaatcacgtttttttttaggaggaaatagtgttctttatcacatccttataggaaagttatgaggtaggtggctatttaattaaataatattttgtatgatttgactcatttgagaacgatgagtctttttttttttgagacggagtctcactctg

SEQ ID NO: 1885767 - DNA, 4001 bp, Homo sapiens; identical to SEQ ID NO: 1885765

SEQ ID NO: 1885768 - DNA, 4001 bp, Homo sapiens; identical to SEQ ID NO: 1885766

SEQ ID NO: 1885769 - DNA, 4001 bp, Homo sapiens; identical to SEQ ID NO: 1885765

SEQ ID NO: 1885770 - DNA, 4001 bp, Homo sapiens; identical to SEQ ID NO: 1885766

SEQ ID NO: 1885771 - DNA, 4001 bp, Homo sapiens; identical to SEQ ID NO: 1885765

SEQ ID NO: 1885772 - DNA, 4001 bp, Homo sapiens; identical to SEQ ID NO: 1885766

SEQ ID NO: 1885773 - DNA, 4001 bp, Homo sapiens; identical to SEQ ID NO: 1885765

SEQ ID NO: 1885774 - DNA, 4001 bp, Homo sapiens; identical to SEQ ID NO: 1885766

SEQ ID NO: 1885775 - DNA, 4001 bp, Homo sapiens; identical to SEQ ID NO: 1885753

SEQ ID NO: 1885776 - DNA, 4001 bp, Homo sapiens; identical to SEQ ID NO: 1885754

SEQ ID NO: 1885777 - DNA, 4001 bp, Homo sapiens
taatgccacaataaacatgggagtgcagatatctctctgacatactgttttcagattctttggacatatacgcatgtatcagtctatcttcatactgctataaacaactgcccgagactaggtaattcacaaaggaaagaggtttaattgactcacagttcagcatggctggggaggcttcaggaaacttccaatcatggcagaaggtgaaggggaagcaagacaccttcctcacaagggaacaaggagaaatgcctagcgaagtgggaagagccccttataaaaccatcagatctcgtgagaactcactcactgtcacgagaacagcatggggaaaaccacctccatgattcaagtaccttcacctggtatctcccttgaaacacggggattatggagatgaccattcaagatgagatgtaggtggggacacaaagcctaatcatatcaaagcagaaatgggattgctagattatatggtcactctatttttagttttttgaaaaaccttcatacaattttccataatggctgtactaatttactttcccactttattggctttatttagcatatatattccaaatacaactatttatcattaattcaccactatcatcctagtccaggcctctatcaatcagttcttgcctgggctaatataataccctctggactaatataaaactctgagtctatcgtcagtgccctttattctccacatagcagtcagggtcattgtttcaaaacttaggtcagatcctgttatttctctgctcaaagtcttccaatgactacacaatactgaaagtaaaacttgaagtcttcaccatagcttcataaagctatttgtcccaacttcgctctgcccttcactctttctgctctagtcatactggtctttttgcttgaagcctagaaagctcttctcccaaacatttacatgagttgctccttcactttgttttttttttctttaaaagtaatttgatcctgattacaaaatacaggtgaggagcataggcaatgcctgtatcccctttgttgcccatcttcccagtctatgctgctataaataccctgtgtacaacagcaagctcatgctgtctccaagcgcttgcacattctaacagctgcagagtatagtatatgaccaggtagaaagttaaacaggagctccactcacaagggagggcccctccaattagtcttccggctcccttgtgctaatagtaactggtttctcttcctattggtcataaataaattacacctgcacaattctccgagcgctttcaagtaacgtcagaaggcagtaactaagaccctttcctatgtcccaggctgcctgtggcacctggactgctgctgcccctgggtcccgcacattccagggcgacgacggaggaagggcaggccaggccaagcatgagaaattaacagtctttactgggctcagaccaggagtccgtgggtcttgaggacctctgtgtatttgtcagtttttcttcacgttcttctcggcctgtttccgtagcctcatgagctgtttcttcttccagtagtggatcttggctttctccttcctcttctcctccagggtggctgtcactgcctggtacttccacctaacctcttgagcctgtcgccccagaagggcaaactttcttgtaggcttcagacgcacgaccttgagggcagcaggaaccaccatccgctttttcttatcgtagggcggtgggatgccgtcaaacaccttgaggcagtccagggaggcatggcctcgcttggtcttgtggcgcagcatgtatgcctcgcactgtcggccagaagatgcggctgggggcccggaagtggtaggcgcttcgaaaagggttggtgttcatccgcttgccgaggaaagccagattcttcaacttgtttctgtagaaattgccagagatgttgatgccctcgcagcgtacgactaccaccttccggcccagcagtaactacttagccacgatggccgccaggcggcccaggagatggccttgaccatcgagcaccaggacctgcacctctgccatcttccgcagccgcctgggagaggctccttcactttatttagataactgctcaaacactacctcctctgacagaaggcccccgatctatttctccgaaaaggttattttatgcctcctatcctcttacctgcttcatttttcctcaaagtccttatcatttgtttgatgtctgtctcctacccttagaatgtaagtcccaagaggacaggcaccagtgttgaactgcctttttccactaacagtcgaagggtctaagaagagctaagactacagggacagtaaaatatgagtcctactactacctcttccttcataaatttgggcaagtatcttgacctctttgcctctgtgtttcctccctgtaaagcagatgagataaaatgtgttctgtaaaatgaaaagataaagctctgtcttcctggcttcattattcaaggttggtatagtgtctattattatttcatccagccaaaagatctaatgaattacaaaatatgctttggaacttagaacagttttattttgattctttactctcttttcctttttttatgttaatctaccatttctatttcttctaggaaatacttgtttatgccttttgcccattctttaaaatatttatttatctttctgccattgaaatatagttctttatttgcctggaatgtctctttctaggctaaacttttgaacaattttttaatgtaaaattctagcttgatgatgattttcttattttattttattttattttatttttgagacagggtctggctctgtcacccaggctagagtgcagtggtgcaatctcagctcactgcaatctccacctcccaggctcaagcaatcctcccacttcagcctcccaagtagctggaactataggcatgcacctccacacctggctaagattattttctttcagcactttatagatatcttgccactgccttctggatcttattgtttctgttatgaaattagctttctgtcttattgtagttcctttaaaagtaacatatctttttatttcctctgacttttcttaagatttttttctttgtttttggttttcatcagttttattataatgtgtctaggcatggttttcattgtatttattctgcatggggttcacagtgagtttctgtatctatggcttgatgtctttcatcagttttggaaaattcttgactatctctgcaaatattcttctaccccattgttaaatgcattcccttgttaaatgcaaattcaaatgttagacctattcaccatgttctgcacgtctcatacttattcatgtatttttctatctttttttctccatgcttcactatgaatatttctagtcacctattgtacaactcactaatactctttttacctgtgtcttatttgctgttaaactcatctactcagctctaaatttcaggtgtagtgttttttatttccagaatttgaatttggttctttttaaatataaattcttattctcagttaaattcttcattttgtcatgtattctcttgaataattaatcccagttattttaataccaatgtctgatctttccggtgtctgggtcatttcttgatctgtttttccagtttacttttttctcttggtataattcataatttttaattgaatgctgaatattgtacatgaaaagctgtagaagctctacattatataatagcccctcagaggaggtgcaccctattctctgccaagcattttatggaggctcatctcctcagcccagtcaagatccatggttcccaacgtagaatctagtatgtttcctgtggctattccttcttgatgggccctgaaatgaaatttttgtctcttcaaaactgcctttgattccattctgtttcatcggctttctagttgcgttttttttgccttagtattaatcag

SEQ ID NO: 1885778 - DNA, 4001 bp, Homo sapiens
gacctttaccttgggcctctagccgccagaattacgacaatgtatgtagttatagcagccctagcaatacactgtgtgatcttgaataaattaaatttttctaaagctcagtttcctcaactataaatggagataataacatatgcctcatgaggttgttgtgagaattaaataatgtatgtaaagctcatagcatagtaagaactaaataaattctggctattattcttatgaagattaaatgaggttatgcatgtaaagcattagctcagcctctagtacacaagaaagttctactaagtattagctatttttaataaattttcatttcataaaggcttatatttttcctatctccaaagtatttccttttagacctagtctaatttatttgtgtcataattaagtcagatgtaacaggctttgtaccgctgaaacaggttaagcaatcctatccaacaacatttattgagcacttacattttgttagatttatttccaactacttgatatgctttggtgttattgtaaatgctaccttatccaaaaattttatttatagttgtttgaagctcttttataagcatggaatttattttcacacgctattttctatcagtcttgctaggctttgtattaaggtaaaatttttatcctgtagtttcttctagcttttaaaatattcataatcaaattacatgcaaataatgagattttgggttttttctttctaaactttacatcttttgatgaacaaaaattaaaatgtatcaatttttttttctttgtttttttcagacggagtctcactctgtcacccaggctggagttcagtggcgggatctcggctcactgcaacctccgcctcccgggttcaagcgactctcgtgcctcagcctcccaagtagctgggattacaggcgcccgcgaccacgcctggctaatttttcactttttttttttttttttttgtaatagagacgaggtttcgctattttgctcaggttgctctataacagatactatgctatcctaacaatatgtttctaaatgatattagtgccaaaaccaggattacccagtgattttgttaatacaggcttattgaatcggagggtctggggtggggaatttgcttaagtatgcagtccccatactcggtgattctcatgaagccaaacatttgggcgcccctcacctgatgtcaccaagaaccagaagaccaattagaattttcgtgggcttcctgccccatggttccctctgttcccaaagggtttctgcagtttcacggagcttttcacattccactcggtttttttttttttgagactcgctctgtcgcccaggctggaatgcagtggcgcgatctcggctcactgcaagctccgcctcccgggttcacgccattctgcttcagcctcccaagtagctgggattataggcgcccgccaccacgcccggctaatggctaattttttgtattttttttttttagtagagatgggggggggtttcaccgtgttagcctggatggtctcgacctcctgaccttgtgatccgcccgcctcggcctcccaaagtgctgggattataggcgtgaaccaccgcgcccggcccggtttcgttttgttttttttttttttttttttttccaaaaatgggcggaggagagtagtctgaattgggttatgaggtcccctgcggggtacctcacctcagccattgaactcacttcgctggccgtgagtctgttccaagctccggcaaaggaggcatccgccgggcccctccccgaagggcggggtccacggcatctcctgcccagtctgacctcgcgcggagccccgttctctgggaactcacctccccgaagctcagggagagccctgttagggccgcctctggccctagtctcagaccttcccaagggacatgggagtggagtgacaggacgcactcagctcgtggccccactgatgagcttccctccgccctatgggaaaaagtggtctcatacagaacttataagattcccaaatccaaagacatttcacgtttatggtgatttcccagaacacatagcgacatgcaaatattgcagggcgccactcccctgtccctcacagccatcttcctgccagggcgcacgcgcgctgggtgttcccgcctagtgacactgggcccgcgattccttggagcgggttgatgacgtcagcgttcgaattccatggcggcgcggcggcgacggagcaccggcggcggcagggcgagaggttcggagctcaatatcgcgggacggcatgcggggggcgggcagtcagaaaggaacgatgccacctactgtgacccccttccccttccagctccctataacctgcacttggctaccaaaccagttggggtgctaaattttgtaaatttcggttttcagagctttggggattacataattgtgcataaagccttgcggagctgtaacaactaatgtgccagtactgttgttaatacctaatgtcatccaatttacaaaaagtaattgtaaggcacaccattattttatacacaacaaaggataagcactgaaaatggtgaactgtgattcactgcttatgtcatccattgtaagatgcatcccagttccagagagtaaaatgcgagtcttagacctattgagatacggtattatgtgtataatgttcttaaatgcataggtgcaccctataaattaggttctattgtacttctctagaagtacagtattgtacaatattctaatattggagtaagtgaagtaggaagagatcaaatacttctccaagtttccacagagaaaagcagcagagctaggctctaaattaggcacagacccttgagcacttaactaacctttatcccatacggcctcatgtatgaggtgggtatttgggggacattgggacacaagtaaaacagataagcaggcctcaatctatgagcttacaagactcctgggactcccttttattttgttttatttcatttggctagaatagcaatttaggaagaattacacagactgttacacaaaagtagtgtgggacagttgttattgcctctgtaaacttagaaaattatcttaaaccggcggggtgaggtggctcacgcctgtaatcccttgggaggccgaggagggcagatcacttgaggtcacgagttcgagaccagcctggccaacatggtgaaaccctgtctctactaaaaatacaaaaattaactgggcatggtggtgcacgcctgtaatcccagctactcaggaggctgaggcacgagaatcacttgaacccaggaggcggaggttgcagtgagccaagatcgcaccactgcagtccagcctgggcgagagagtgagactccacctcaaaacaaaaaaagagagaaaattatcttaaaccatttctttaaaagatttttttcaatctttaaaatctacacgtattcgggtgtgtactcattctttgctaatttccaaattctgtagcattaaatgaaagcaaaagagttaataatggcaacacggctccagaagactcttcccctgccaagaaaactcgtagatgccagagacaggagtcgaaaaagatgcctgtggctggaggaaaagctaataaggacaggacagaagacaagcaagatggtatgccaggaaggtcatgggccagcaaaagggtctctggtaggagtggatctggggatgatatcttgttatttcaactcctatttcgtccttctttcagggaataattaatttctctatcctttgggcataccacagcactaatctactgccttgaatcttcattttcatgtatttgagatggattggggtctaaggaaagaccaggattggttgggcgggcaaagttaatcctgacaagtttctgttttaccacaacagctgtttttgattcccataaagtagtacctatctgtctttcctcagaatctgtgaaggccttgct

SEQ ID NO: 1885779 - DNA, 4001 bp, Homo sapiens; identical to SEQ ID NO: 1241641

SEQ ID NO: 1885780 - DNA, 4001 bp, Homo sapiens; identical to SEQ ID NO: 1241640

SEQ ID NO: 1885781 - DNA, 4001 bp, Homo sapiens
tagcgtttaaaaacaaagagaaagagactgcttgaggcgcgtggacgcctgtctcttctccaatggagtttaagtttctcgccttttaacttgttaatggacagctgagaccccagttctcagcagatagagtccaacccatcaccttaaggtttgctccctcccgctttgctacctgagaatcttccctcctcccctctcctttcgggagagtgctcactgttttcctttgccatatgttaaatattcttgaaataacattctttttttttgtgattaaacagaaaaatgcaggaacaagcaaaaacctaaaacccaaaactcaaacaatcttatcttggaaagagaaaacagttaccttcagatttaacacatacttaagcttacctgaagtggctacccaactgtaattaaagtatggttaggtgatattgggtactctcccttctttactgccattagtggttgccattaaaaagataaataagtagacagagagactctggctctttgcttactataataaggcatggaaattagttactataataaggcatggaaatgtataccacctcccttcatctggtcccgtcctttccatgctaacttagaagatcagtgttttatgagactgacataagtagacccaagtagaaacactcgtggattaacacaaggcaaatttactttaagtttctatataatttattttaattagtgatttaaaattgattattggttttaaaatgccatggcttatttacagtagaaacattctttggtggtggggggaggggagcagtggggggttggtggtggtttaagacctgagctgatatgcatgtgggatattaaaggggggaaaaaacagtctagactacatatttttactgacataagccattaagtgtcaggattcttaaagaatattgaaatgttaaagaacatttcatagacatccttgatagaaaatctgcagatgccagccaggatgcctgtaaaatcaaccttctagatgttcttttcttgttattaagtgtttttacaaacttaactactctcctttttttccccctcaaggaaaaactttagttgctttgcaataattcagttttaatttgagttgccagttttccaaatagtctaaataccaggaaaagacaatgggattgtgaacacctccttacctcttcccttccaccccccaaaagagccaacaaaccaaaccaaacccacgtaattgtgacattttgtgttggccttcacacagctattatattaaactctgtatgcagtcatattcctcttaacttttgcagcacttttgcctgtgatagtggtggggactggtagtggtggggacttggtggagtgcttgtagagaaaatgcacatgtatgagggtgagatggcagcctgcaatactttacaaaaggtaattttacctttaaatcaaggaggtagttacaaggaagacagcattagctctgtatttatttaaaatgccttggagatgaaagtaggtaacaagctttttaaaaaattaagctcgatagaagatcaacatgccttagtatctatgaagtgaaaagaacatttaaacaattgaagctttgtcttcagatatgtgtggtgaatattttctatgcattgcagatgttatataaacataacatgcttcctcctaaagtcaagttcttgattttaattgaagaataatattgctcagggctctacctctgagtacaaatagctaatctaagaaaatcagctctgggaatctggaaccaatggctattttaaaaataaacagacaaaatcttcatgaagaggaccaggaggattattttacatacagtatatctcctgattcctctctctgtctgtctgtctgtctctctctctctctctctcacacacacacacacacatgcacacaaaacttttatggaagaactgaaaggcagaatgacaatactggccccttaccatatttctacttaaaaaaaaaaaaaaaatcagtctggttgaagattcccaagccatcttgcctaacttttccagtatcaatatatcttagaagcaagtccagatgaatttcctctttttctttctttctttctattttctagggaagggaaagagatgtaaaaaagggaaaagtagaactaaacaaaataaagatacactttgaaatttgtattgtaatatttaataagtagccattaaacagtatctacaaaaacaacgccagtatgctgaactttcttagttcaactaaggcaagaagtaatttttttaaaaaaaactgttaggattaagttagaattgaaatgaatggggagatttcaaaagcatttggattttctaacacagaagccaacatggatgctcaacatgattgacttagggaagaggctgggggaagcaaaacactaatttacagaaatttcttagaaattcctgttggagtagagattttctgttttagtaggatcaagcccaactgcattgacacccagccaagaaggagatgttgaaatctacctgagttcagggaccacacctggggctccatccagtagtaggaccaggtaacatgagaatgcctcattctctaccagtttccccaagttctaaatcctaccaagatgagaatcccacaaactaagaaattgcaaggtagggcgggatgtaagatgttccttccaactcccattttgtcatttggtgagaaacgtgtgtgttttagttattttctaaaaccgtatttttaattcccctgggtgacaagaaagagttaatttgtttgctgataggtttcgcactgtgggcaggtctgccaaaaaggagaggaaacagagaacagtcctatgattaattctacctgtttttcccatgagcgatcacctgctccaggggtcatgaatagcaggtagctctccctctcctgggctctgagagcttcgtttgtttggtgacagctgagtgacaaggcctgaaactcgagcccatcgcccggcctgatgtggggataaaaaccctggatgttccctcaaacatttcaggaaatgaaagttgtaacgcgatccctcctgcgcccacatctcccccagcaaacacaaaagctcaaaggagccttctcggattgaattcggcttggagttgatggagggaaagcggagcccagcacaggctggggggagggctggggccgcggctggaaggctttctgagcccgagaaggaggaggaggagagctgggagagagccgggcgcgtgaggcctgggcccccctccgggccagtttcgccgccgcatcccaggcgccctgctcctccagacagcgtgggcagctgccgccgccacgttaaatcgtgtctttagggtcaacccggagtgggaaggaaaagccgctgcctccggccctgcgtcgacccctgcaggctagcgcggcctctgctctaggggcttgggccgcgcggcctccaggccatgagggcccagaggcccccgagggcctcagcggaggcccagcccagcctttgcggcccctacttgcccgcttggaggctccaggactccaggccagctcttaggagaggcgtcccttccgatcgggccccgcgggctggctcaggatgactgcgcacagctccggcgtccacagctgcaggggtccggggtgcaaccgcctagggcgcaagggcctcactcagctccctcgcgctcggcagcccccatcagtcagcagcttccatctgccagggggcctcgccggcactggggggtaggggtggaggaagctcccagtgggcggctgaagatggtgtggggggtgagggtcatgggagaaggggagctgagaagttggcgctccgacccccacgcggccatctctgcgtgggccgtaggcgcctgccaatcaccacgcctgatgcaggcgcagcctagccgtagataggaggaagtatacccaggacccctcaaggcgagttttcc

SEQ ID NO: 1885782 - DNA, 4001 bp, Homo sapiens
tttaaccaatcctgtgactcaaatcccaggattctcagaagttcctgagtacttcccaccctcacctcttcactaatgttcacgaggcaggaagccatcacatgctaagacaggccatttactcaaaacacccaaaacatctggtcatagatgcagactgatgacaactgtttatttaagatgtatattttgtcatgttttcatcataggactaaagaggaatctcaaaaccaaaatgccaaactttatgcaaaagtctgatactttggacgaagtattttgaatactgttttctttgcttcttaagatcactgatgtttggtgctaagtatttcactatattttgggttgttttattaaaaatttaaatttagatgtattgtttcaatttctttggttcagatacatgatctgtttcctgcccttgctcatgctatcaaaatagctccttgaaagagcaccaacatgcttttccatatccttagcatttcacacactgtatgttcttatcatattctacaaaaacacggcaacttcactatgatttagcaaaacacaggctttgtactcttccttctcaaggattactcttaatctttaatggcagctgcattctcaacttaatacaacgttcaacaaataaaaaagacaactgcttctgagcccaatattatacattaggtaaggaacacgatactcctcattactgttctgtctcaggatataagtttgcaaattcttctcctgatctcagtcaacataaaagcagaattacagtttagagtgggcaatgagaaaggtggaatcaaaatagacacagggaaggccataaagagttcgcaagcataaatgcctgatagcaaaaacgatcacagaagattccaaaaccacaatcctgcacaaaggccatctcaatcttacacaaaaaatacttctgcaatgcctgccgagcacctgcctgtccaacctgggactggtgtcacctttgttactgatccttgtagtcaaaaataattatctcaaaacaattatgtaaccctcctcatttttcctttaaagacctttgtcttcctctatctcccaggatacacacagttaactatcgcatgcattttctcattgcagtgctctattcctgaataaatgccattttcttttagagagcctctctctgttcgttatttaagttgacagcaacaaacagtttaggtttttggcaacaaatcaccaatatttacttaaaaacaaacaaaacacttacaacacaggtaggaacaacaggttattttggaaagagtttaatatattctctattgttaagtgcaccagatgctggacttctgaaacaacaattatgcttctgcataatagctttttctacatatttctgttcatgttgcttgttcctctgatttacctggaatcaatgaatctgaaaaacaaaaagattctttaagcacctggtaaatttcaggtcccacattagaaaatgagcaatcatcaataatattgatgggggtgaaaatatgacattgagactttcgggtaatgtgccgagtttactttcatagtttactaggctcaggtttcatgccgaaggattatttgaaagactcactcactgacatgattttctgattttaaattcgaacactctcaaagcataaacagatcacctccagcaacattgtaaaaaaatactcaaagtttaaaaaaaaaaaagtaacttgtggcagtacttagtgttcaacagaaaacactccatctgctaaacaatatctcgactgcaaagcttctcttactgttggcggatagataatgacatagcccagtcattatcaccgtggcaacagtgaccagaaactatcagaggaaaattgcacatggaacagctggctctcgagcaggcatgcctcagcttcctctggagtatgctttttctgcaagtctggtgtgctcgagggtaccaccaaccctgtgcggctccaagactacagattatgtagcaagtccactggtcctgctcttccggatttattcttcccgccaataggagcacttaccacgttccaagcatcgtcctaggcactgaggatacagcagtgaataaaactgagtgctgggtaggaagtcaataaccaagctagtaaataactgtatattgtcaagcactggtaagtacaagggagagcagagcaagcaatgggcctgatgaggcttgctttgtctcctctgcactcccacactgctttgtatctgcttctcatttctcacgatgggtccaagctttgggcaccaggtctccctggacattccgcgctggcactgcgcctagcacccagcggctgctcaggaaacgtttgtcgaacgaacgaattcacttcttagttccccattcaacaaacctttcctgatcctaggcccaacaggttaaaaggctggagggccaacgaggctggaaactcagaggcggccgggggcggtggctcacgcctgtaatcccagcactttaagaggccgaggcaggaggatcccttgaagccaggagttcgagaccagcctgggcaaaaaagtgagacatcgaccccccgcccccgccgccaattccgtctctacaaaaaggaagaaaaaaaaaaaaaacccagaggaaatcacacaggcaaaagcgctttacaaattttaaaaatgaaaactgttctagagaaataatcgcgcgccggaggcggaagccccagagcctcagctcccacgtggcggcggagccagggaaagtccaggagccaaggctacggcccgagcgctggaaccccggtcaggctccggctccccgccacgacgaactgcatgcggccgcggcgctccggaggcgcccggggacgctcacctaagctgggagaggcggatacccgcccggcctagccccgctacctcccaagagaccaacacgacaagcgcgcgcccaccgcattgccatggcaattcaaccgccgctgacaccggaaccggaaacttcatcaggaggtgaccccttcccggcgttccgcggaacgggcgagtcccgcgcctctcccagttgtctcggcgtagtccagctggcctcattggctcacaggaggaaagtcgtcttccctcttgttttgcctctcgttgccctgcaagcgtgaccctgatggacatccagtctctccaattaactaacaaagcggttgccgacgaccaatagtaaggcagtaggatgaggctccggcataaggcccacctcctacctgccgggcgggacgagcaacatgattggtggaatcgagtaattactgatcagtattgtccaatcacggagggcagtttagagccggcccaatgagggcctccagggggcgggtcggactgccgcgggccggggagcgctctgggtggccagctgtgggcccgggccgtcgtgggctccggcttgcgtgcggagatgagcgggtccctcggccgagctgcggcggctctgctccgctgggggcgcggcgcgggcggcggtggcctttggggtccgggcgtgcgggcggcgggctcgggcgcgggcggcggcggctcggcggagcagttggacgcgctggtgaagaaggacaaggtggtggtcttcctcaaggggacgccggagcagccccagtgcggcttcagcaacgccgtggtgcagatcctgcggctgcacggcgtccgcgattacgcggcctacaacgtgctggacgacccggagctccgacaaggtcaggccagtgtgccgggcaggcgccctccgccccgggcccaggagcatcgctgcacgaggccgaggggttccgccgcgccgggctggggagcggggctccatccgccggggtctgtctgaaggttcgagccgggttagggcgaggagtactgccctggagtagagtctgggctgagggtgtagttgatttcactgggtcttgaggatctggggctctgtactgttgccaacttgagcagtaggt

SEQ ID NO: 1885783 - DNA, 4001 bp, Homo sapiens
tccgtttcacccaagtgagagagtcaagggagattgtggggtacacacgctttgagacccacagagcactgtacaaatgtgagaactgagttcacctcctgagtcctgaatgagaacaaggggataacaacacgcgtccccctgcctgcccccaaatggccaccatggcgtcagtattaaactaagccaggcattaacagcggtgggttgaatgtcatgaccgtattatttaaacacactcaatggtggggacatgcagcctgtttgctctcttggaaaaaattaaggactttaaaaaaatttaggattcttcctgctctaatccgtgcctcctaaggcctgccagaggaaggaaattcaggttccttaatacagtggtggcttctagagttgctcaaaggggagctcagccttccattagcagaatcacctgtgtggggaagggaggcgagcttcttcaaacgcaaagtcatgggtcttggacttactccactgaaatcagaatcacttaggataggtacgagatacctgcatttaagcaaactctctagagagttcatatgcacattaagtttgaaaaagtcttctttaaaaacaaactcttccagtatcattaacatagagaaggggatgagttccctgttacgggaggcattcaagtagagatatcaaggattcaggggcagacactcaccgagtgtcatctatatccaagtcaggaggggacactttccagatgctgtgatgggtggggctaggctgtggttggagcctgggttctgggattctgagaaggagatctgcattgggcacacacgctcttacctctgaggagcatgtgattcaccagaaccgctgtggtttcactgccgaggtccttctcccaggccccgagcttcccctgggtctgctgctctgtatattcgtcaatgtgtttttgggcctcctctaggctctggttggccctcgcgcccaggccgctgaacctgcgctggtccatggtcaggaggagccggggaccctgcccacggagcctgatcagcagatcccagaagccttcctggatctcctcctcaggcaccacggtgagggtgaaccccaggccctccaggagttgggtcctgctggccactggggccccccaagaaagcatggccaaggccagggagatgctcactggggagaagagaatgttctccccgggggcgttcaaagccaactgtctgtagagcttgaaggcaaagtctatgttgctcacagagattttgtggcagggcagggcaggcccagggctgctgtcctgggggccagaatggatgagatcagaagcttcttggtcaaccagggccacacaatgagccccagccatgagcacagtgaccagcagccaccaccgagaggcctccatcctctggggtccttggtctgaaagcagcgtggcagagaggacaacagcaatgtcaatggtaatgataatgacaatgtgtgatattcaccacatgtctgccctgtcccaggcaccccgcaaatacttcaaggctccccttgcctctcctgggggctcccttcccatgccctcctccccacccctcagcttcctgctcacaaacagacatgggggatctctggacaaagtcagagcccctcctccagaggacccttctatgaatcctggctgcaccagatcccagatctatgacctcgggcgattcacttagcccatctgagtcccacttcttatccctgaccttagacttacaggaagctgtgaggaggggagggccaggaggtgactcatggtacagggaggagtccagggctgggctcatataagcccagcaccttaggcaggtggccttgcctctcaggaccttggcttccactctgtggcatgctgctaagaatccccacatcacaaggttacagaaattcaaagcaatcatgcacggagcacactcagcccaggacctggcacagagagccccaggagtggcagcggacgtggggcctcccttccagtggtctgactcagcaggcctccacggagtctggaatccattttggcaagggtctgagctggtcctgggccccccttagggaaccattgtgatcctttcaacaggtaaatcagatgcgttcactccctgctggagacttccaatgaccctatagcaactaagagaaatcccgtgtttctcaccacaccttaggaggccctacatgacaaggccctgctagcctttctcacctcctcctttttttttttttttttttaacagagtcttgctctgtcacctaggctggaatgcagtggcatgatctaggctcactgcaacctccacctcccaggttcaagcaattcccctgcctcagcttcccaagtagctgggattacgggtgtgtgccaccatatccagctaatttttttttgtatttttagtagagacggggtttcaccatattgtccaggctggtcttgaactcctgacctcaggagatctgcccacctcggcctcccaaagtgttgggattacaggcgtgagccaccgtgcctggcctctgacctccttctgaccatcctttccctccttccctctgctccaaccatcctggccttcttgctagtctagaacttaccaagcttcttcctgcttaggacctgtgctcttgccattggctgcccggagcagccttgctctcgccctttccacagctcgcttccttccttcactcagttgtctgctcaaaggtcacctccccagagagaccccacctctgcccttgccaccctcaccctgcctggtttttctgatgcccatctggcatggtaggacatgtttgtctggtttccccactagaagataagctccgtgagagcagatactctgtctcgtgcatggttcattcctagtgctcactcaacaatatttgttgaaaaaacaaatggttcatgggctaacctttgggggggcctccttctagggcttcagcctttacctagagcacaggcattttcctgcctctctgggaccttaacactggaccattcctagctttctctgccacaagtgcttggcctcgcatgtccagtctaggcttgggttaataactgacagaatcgaccatcatcacaaccccttgtcctgcctctgattttccatgggacctcggacagccctgggcctttctgaacttgagcttcctcatcagtgtaagaaacaatcagctcagcctcagcctccaggaaagcctctgttccccgtgatttacttatcgacagagaaccaaccatctccatttgcccatttgcctggtaatctgctttggtgaatatcttggttttgctgaagtttgcactttcattctcttattatatttaaccttcattcattcactcattcattcattgaacaaacatagacaaaacggctgctacatgtcaggacttgaattgtatgctggggacacaagatgagtgagacacaatggctcccttggggaggctcgggtcctgtgggacagacatgcagagatctgcgcagggtggcgtgtgctccatggccaggctggtgacaagctgtctcgggtccagtgtcctgtccacgctcacattctttaggtggggttccattgtgccttgctggtgagggtgtagatggaacctagcagcagcagaggcttcctctgaggccccaaaactatggagcttttgagcagaaaggatgccctggtccaacctgggctctggacagacaggaacactgaggccccaagagaagctcgttcatgtacttgctgactcactcactgaaccaatattcagcagtcagggcaacagggactggcagcctgggccctgcctggaaggagcatgccagtgatcgcagggaaatgtggggagctgattacagctcagtgaggaaagggcgatggcagttagaggtgaactgcaaagggtgaatgaggagcctgcaggaggcatggaaggtagaagttcctgg

SEQ ID NO: 1885784 - DNA, 4001 bp, Homo sapiens; identical to SEQ ID NO: 1241659

SEQ ID NO: 1885785 - DNA, 4001 bp, Homo sapiens; identical to SEQ ID NO: 1241677

SEQ ID NO: 1885786 - DNA, 4001 bp, Homo sapiens
ttgaaaaatgaggaaaacattttctatgagctctgaaattctgtttctatacctagtatataacaggttctcaatatttgttgaataagtgattctatattgcactcaagattccctatttaattagtaaaaagtctgaaagatattgctcaaaagcctttatcaagttagcaaaatttctgaaaactatttcttggtaaacattttcaaacttagcagttttaatcaaatatttaatgaaatgaaaaactttatttttgtatatctgatcacataagcagcaagtctccccaattcctcaagcactttaaataattttgccatatatcactgatcaacttttaatgactcagcctaagaaataaaaaatcaagtatgaaaccaaattattgtactttgtacatttgattagaaaccacataaattgaaccatactaaattgctgatattcaacggtttttgacctccaaaaatggcaatttttacatggctcacactaaatatatttagcaataaataatgtgttttaagaaatattacaatagggcttctaaagcctcccaattctctcttttactcttatcatctcctgtctgttaggggtgtggcaggtatttttggaaaatttcacaatcttatatctctcctacataacacaggcaacttgtagttttaaaagagtataaattagtagttttgttttggtaactatcctaaggggctagtaagaataatcaaacattttattgagagaatatactgttaagttccttaatgttcctcaattgtttaagtcagtggttcacaacctttaaagttcatgacaatcaacagagaactcgtttctgggccctatccccagagattctgattccgtttaggtcggggtgggacccacgaatttgacttcctaacacattcacaaattatgctgatgctgtgggtactaaaaccacttttaagaaccactgacctgggtatagaagaaactatttgtaaccaggctttttcttcttttggtccttaggtaaataaaactcaagttgatgaggtatgattttaccttaaatcaaaaccatttttggtaaagtactaccttagctctattgtaaggtaagtgtaaattagatttgctttgacttagttgctacagaccacaattataggacaactaactgaggaatttattcacttgtcccttcttttgaacctcactgtgctctggcttgccaggaggtgcaagtgtcgtccccgctttgtacttggcgctccaggcctgggtcacttcacttgagttatcagaggcaaccgtctagtttgacaaactaccggaggctcctgatagagaagggcgtgggcgccaatctaggagacaaagcctgagccgctgcggtgagccaacccaaacccatccgcgggtcttctttccagagacattttcggagccgagggcgcctctgcgagagcgctgcgaacaggttccgacgcgccggagatcgcgcgacgaatctgcgcctcgaaccctcgctttccagcagtcgccggattgctgctccacagggagccaacgcgcttgaggaccagcccagccggggctctctggatcagtaggctgtgcaggctgcgagctcgttgacgcatctcagcccactcccttgtcctcccgcctggcgaagatgtccgccaagcctgaagtcagcttagtgcgcgaggcttctcggcagatcgtggccggtggttctgcaggtaaggacagcccgccctgccccgccggaggctagtcgctttccccaccgcgtgtcctgaaaccgttgcccagacaggtctccttactgaagttctgccctcttcctcaaaattcagcgctcccggagcagtgcttgagcccctagaggcgcgagagcagaggaggccgggagttgattgcgagtagtgggtgccccaagtaaagttgcctcggcgtccgcgccggccgctctcgggttcccggcattgtccgttcctagcctgtaaagcaagtggcagagccccaagggcagcgactttgaggcggtctttttgccttgctacctattttacttgaaaatgatccagttcggtctgacttagttttatcaattgtagagtctttcttcaagctcgctcaggtcttacataaatcctgcattcctcatcaaagtacttacaggactccacaggacttcttattgcatactgtgcttgcttggggatattcgtgccttaaataaggatattaaaattaaatgcatatgtaacacacataaacacctttgatataatgggctcacgttaatttatagagttatgctgtggggaaaaaataaacctttagaaaaaaatgttgtaattaatcttagaaatacttttaaatgtagctggagaaagttactaaccacgacatgtgttatgtgcaagtattttaaagctattttaaaatataaattatgatttggtttaaaattttatcttacagtcatgcatttttattataaatatataattaaaataattgccataattggctcataaccagaaaacattttataaatctagccattctttcaataaattatagtaactctaataaatcctgttaaggcaatgactagaaaatgtttaatgtttaacttcgactagtaaaagtttctgtattttcaaacaaatttggactttttgtaagggattactgcaaattatgactggttatcattatgtcatgatctacttgcatctcaggagtaacgtaagcagccacgtgtcacttacaatctgtacactttcttaaagatggtatttcatcaatatcacattagagccattcattgcttacaggaaattgtaaaatctttcccctcccctccccacccctcccctcccctcccctcccctcccccctttttcttttcgatggagtctctctctgttgcccagactggaaggcaccggagctggattgccatggcgcgatctcggctcgctgctccaactcccgggttcaagcaatcctcccatctcagcctcctgagtagctggaattaccgatgcgcatcaccatgccggctatttttttttttaattttttttgtagagacgggctttcgccatgttgcccaggctggtctcaacctcccgggctcaagtgatcctctcactgcagcttccagagtagctgggactacaggagcccaccaccatgcccggctagttttttggggaggtgggggaaggggatttttttttttgtagagtcagggtttcaccatgttgtccaggctggtctccaacgcctgggttcaagcaatctgacccccttgacctcccaaagtggtgggactacaggcgtgagccaccacccgttattataattgcagtggccccactgcttgctctttcagttttccaattgtgatgatgaatttgcaccaatttatttaccatttttggtcaaattccgcaatgcctaaggttctgtcttctgtacctgactcgttgatttgtagtctatgaccctgatgaaagaaaactcagctagtccaaagagaaagtgaggccaattgattaacatcctaagctaagactgatgactcataagcacctgtatgctaatttatatgatcatactatgtattaggcacagctaaactcaaagaatgttaaaagtagatcatactcggccaggcacggtgtcttacgcctgtaatcccaggactttgtgaggcggaggcaggcggatcaccaggtcaagagatcgagaccatcctccccaacatggtgaaaccccgtttctactaaaaatacaaaaatcagctgggcttggtggtgtccggctacagtcccagctacttgggaggctgaggcaggagaatcgcttgaacccaggaggcggaggttgcagtgagccgagatcgtgccactgcactccaacctggcgacagagcgagactcggtctcaaaaaaaaaaagtagatcaaactctgatc

SEQ ID NO: 1885787 - DNA, 4001 bp, Homo sapiens
ttgtaaaggatttcagtttagtgggaacattaatttccaaacatatcattgtaacaattataataacagaatgaatatacaaagtactatgaaagcacagaatatccaggattgtcttctattttgggcaaactggcctacaagctaagtcctgaaacataaaaaagaacaggcacaaaacacatgtctggcctctgaaagtgaaataagactacttaacaatacaaagagacagcgaggaatgaaaagattatgtgttgtatttgcactcacaaaattgctatttggaagttaatctgcatggctttgattcactttggccaaggagatacaatgaatatgccactcttaagtgtcatatttcattataaatgaaatgtggatcaagttcccatttttaaaaactagtcacacttctgtgtatttaagaagctatgtagtagccctccaaggtacacactagcaacaagaataacaagaaaaatgctaaaaccccagaaataactaactagaaattgtataatagcagcttctggaatctatctctctacttctccgtatattatcaaaatggaaaaaaaaatttgatgctaaaatatgaagactcacctaaatccaaagacaccggtattagccaaaacataagctaagccaaggatgccacttcccatgatggcattcatcaaattaaacactgataaaccaaatgaaacacctggggatcgctgtctgtgaagttcctgtaagcacacaaatttagtagtgttaaatgtttggacggtgaagttaaaatttcgtaaagaaattccataaatgaaagattatggaaaaaagctgcaaaccaccagggtttgtatgacacactcgttgcttaaccaacactaatttcctttcctttccttcccacctcccactactgcagctccaggaatctagggtttcttaggaaaatgatttccaccagtacacaagacaggcagagttcaggaagggccatgactaaccttgtgactgcaagagatgaagataggatgggaatggagtggggagagagaggagggataaggcctcagctcatgtgattactaaagaattgctgagtcaacctgggactgctgtgggcagttgtttctcctcaattactaggactgcacaactaatctctacttatatatctaatgaattagttctaccaaactggaaggatggtcaggaatatcttgcaatgacaatattataaacagaagcaattcacgttgttctggcagtatccctgaaaacatccccctccccacaaacagcaccgggaacaaagtcctgggaacagtgtctaggactcgagttaaaaagcggagtgcccactgcacaggctttagggtcaggaacgtgctatgcacttactaccaagccacttccattctaccgctaagaatttctgtattaaaatgtttattattttccctccccccatgactaagtcggaagaggaaaatcctgtgactcttgcaaagacctcacgagactggtggagaaaataaggtgacaaaaatactaactaacagcagtgagtacataatcctagggccgctcatcccatcatgttcgcagcttccactcaacgctgcatctcttccacccgacgcttttcatcttttctttctagagtatgctaggctgctatcacgttcataactgcgccaatctcatctgaatctcggcggctgccttcagaccccatcccccagggttcaggctccagcatctcccctgtcccggtgcggtcctccttttctgggtcttatttggcaggcacttgagggaagccggagggcgtcagcgcggggaagcgaacacagcccacttacgttgcttagcaacggactcaactcttcggcctccgcttcttcaggctgctggacagagacataccagccccgctcagcgttgaagctcccccaggacgcctccatgctgctctccagctgactaccagttccatctacgagcctctacccctgccctgcgctccagtcgtcggtcgcgccagaggcggagctttgagcccggcccttccggcattccgtacttcaccagggcctggaaggagaggagcgagtcgacttgatctgatgacgcgcgccctcttcgcggcgaacagtgatgatgtcatagaagacccgcccatccacccgcgacccacatccgatcggtaccggagcgggaggtgaggggtcggctcgcggatccagctgcagagcgacgtggggaattggaatggtgctttggtgaggtggcggccgcgttaggggctaatggtccaggggaggtaccagcccgcccagggctgctctctgccatgtgctgcctgggcacagaaacatcgcgaggtcacccacccgcctaggtgctgagcttagtttcgaggttctggatagtaaggaatgtttcaaaagcctttcgccacattttactggtgggaaaaccgagacttatagtaatttatccagggtcacccagctggtcagctgctagaaccaatttgatctctgacggtgaagttagacttcgttgctttacaggattctgggacagggccctttccccttacaagtaaattctttggtattttagaagacagtgaataactgatactatgcatataacaatcagcaaagctctcgtcctcaaaatacagaagcctctagttaaaggcaggacatgtggcagtaaagcatcgaaaacaaacaacagagcaatatattaagaacacaagcaccgaagtcagtcaaaactaggttttaatccatgtttagccacttatcagctgggagactttgggtgggttaccttacgtctgagctttagtttacttatttacaaaatgagggtgcaatactgcacacctcccaagattcataatgtacataaagcatttagcgcagtatctgacacaataagcacccatgagactatcctaataaatatcaccactagtaatggtcatgtataatgactatttcatttacagatgaccatttaactcatacttcagtcttccaatcccaaatgtattatctagaaaattgtgggtgaagaggatcattgagtatggctaatggatcactaagccctctgaactgggagcagatgggttgaaggtgtaaatttaatatataccactattatctaccactaatacgacttcctgaagaagtcatcctagtctggaaaagatagtatacttcccacacatcactaaacgttttatttgtcagcatttagcccgttatttgagatagtagaatttagatttttattctcaaaagctgtcgtgtgtgaattttttttttttttttttaaggatcttatggaggccatttggattctcaggaagatttctgaaactggaaagccatagcataactgaatcaaaatcgttgattccagtagcttggacatccctgacacagatgcttttggaagcacctggtattttcttattgggtcaaagaaaaagattctcaaccatgccagaaacagaaacacatgagagagagactgaattgttttcaccaccttctgatgtccgaggcatgacaaaacttgatagaacagcttttaaaaagacagtcaacattccagtgcttaaagtgaggaaagaaatagtcagtaaattgatgcgatccctaaaaagggcagcattgcagcgcccaggcataagacgtgtgattgaagatccggaagataaagaaagtagactaatcatgttggatccctataaaatatttactcatgattcctttgagaaagcagaactcagtgttttagagcagcttaatgtcagtccacagatctctaaatacaatttggaactaacatatgaacactttaagtcagaagaaatcttgagagctgtgcttcctgaaggtcaagatgtaacttcagggtttagcaggattggacatattgcacacctaaaccttcgagatcatcagctgcct

SEQ ID NO: 1885788 - DNA, 4001 bp, Homo sapiens
tgattctcctgcctcagcctcccaagtagctgggattataggcatgcaccaccacacccagctaattttgtatttttagtagagatggggtttctccatgttggtcaggatggtctcaaactcccgacctcaggttatccgcccgcctcggcctcccaaagtgctgggattacaggcgtgagccaccttgcccagcctccaacttgaatttttaagagaaggcactcattcgccagagagaaaggatctgtctctcatcattaggacattgctgcccacccgactcaccaaatagagaactaaatcttgggccgggcgctgtggctcacatctgtaaacccagcactttgggaggccaaggcgggcagatcacctaaagtcgggagttcgagaccagcctgaccaacatttagaaacccagtctctactaaaaatacaaaaattagccatgcgtggtggcacatgcctgtaatcccagctgcttgggaggctgaggcaggagaatcacttgagcccgggaggcagaggttgcggtaagctaagactgggccattgcactccagcctgggcaacaagagcaaaactctgtctcaaaaaaaaaacaaaatcaaaaacaaaacactaaatgttggttctctctgagcctgctataatacaagacaggcatgggggcagtgtggcggctcccagaaaataactataatggcttgaccccgagttttcagccttatccaaaacccgtcttccctccaatttcagcttcagggatcacctgtgctgaggtacaacattaggaactgaccctaccagcagctaatctgtgggagcgtctcatgacactgctcttttccccaaggactctacgtctgccaaaactaaaggcttcagaaacctgctggaaacccacaaccatcctcctgcccaaagagcatcccttaacccttagctggagtcttcagccctggcaaagcccaagtagacccacttcaccctgaaagaagacaggctattatcttttccttgcttttcctttcccattctctggtattctaagcctcctgctatcgatccctcacatcagcatcgttgaatcacccaaaaaagtatgaatgagagaagggcgatccaatgtaccataaaacctagggatgattggaggcagctgatggccactccctaccccagagttgctgctggagagatatcaccccgagccaaggcagggagacagctgcagccaggcagcacatgctggaaaacaccgaacaggagacagctgagaggaaaatgggagaggctagtcaagcaatggagagatgttagggtgagaggcactcgggagaagaagcgattagacactgcacagcagcaaagaggagggttagcaaggtaagtggagatgagaagagggtggaacgcacactcactccttggtcctggatataagcaggttctcacggcagtgtgagcagcagtcagggagagaagtgccttccaggatctgtggtctgatgctcctccttcccagccagcagtaaaagggaaggccagacaaatgcctatggatttaagcaagaagggtggaggaggtgaggcagcccgcaaaggaaggagtgagggagggggaaaggagtattaagcaaccatctgggtccaaggttcactggcccttcacatctgcaaaaggggcagctaggagctcttggctcagcactttctgtgataagaaggtgctctctcaggaatctcctttgtcagctctgctctgggaccaggggcccagaagaaaggacagtcagctgagtgcagtatctgtagccctggggaagctgtcccagagcaagttagctgaggacaggacagtagcggggaaggaatacacagcactctctctctctgtgtcctccatgccccaccctagcctctcttctctctcaccccaagcatttaagaaagggaggaaggttgcacagtgtgacacaaaggcttgttcccatgctgagattacaggaagtgtaagagcagtctctacaccatgtgactgggtgttctaagagaactctgcacacttccccatgcaaagagagactggggggttgcctccaagcctgggccactgccccaaagtctgagcctcagactacttcaaaagaaacacagtcaagagatcaaatatctgactgcatccccaccagacccacgtgccttttcattcttgacaaaacataccaagatctctgggataagcataaattcctataaacgccttcctcaaatataagttgactccactttcctaaaaaatatgaggaaatcaggccagacgcggtggctcacgcctgtaatcccagcactttgggaggctgaggcaggcggatcacaaggtcaggagatcaagaccatcctggctaacacggtgaaaccccgtctctactaaaaacacaaaaaaataaaaattagccgggcgtggtggcgggcacctgtagtcccagctattcgggaggctgaggcaggagaatgaggagaatggcatgaacccgggaggcggagcttgcagtgaacccacattaggccactgcactccagcctgggcaacacagcaagactccatctcaaaaaaaaaaaattaaaaaagaatatgaggaaatcagatttcactgaattctgttggacagacaggcccagaacaggcagaggaagctgagcactttttggaaatcacatagtttatgctatctttattatttactttaaatctggtattctgagtctcttttaccaacagaaatagaccctatccattctgaaatccaactgtctgtttcttctcctatctgttctaaccctctttggttattctacaaccagagaatagagatctaaatatctctgggagacatctctaccatacatcctcccattctagctctttaaacttttaatttaatctaggaggaggattctggtgtgagcgttcccagagatcatgcttctcccaagacaggctcacaatgatctgaaatccttctggaggagactctccttttctccaaaatgctcctgtaataataattgctatcacttattgagcacttactgggccagacacactgctaaggacttaagcacattatctcatggaacctccagagctcatatactcttaatcacacaagtatactatctctccatctccccatccccctggcctgccttagtctctaggccttccttttatttttttttttttttatttattttctttttttgagacagagtctcactctgtcccccaggctggagtgcagtggcacgatcttgactcactgcaacctccaccacctcctggttcaagcaattctcatgcatcagcctcctgagtaactaggattacacctggctaatttttgtgtttttatttcggtatttttattttattttattttattttattttatttattttgagacagacacttactctgtcgcccaggctggagtgcagtggtgcaatctcggctcactgcaacctccacctactgggttcaagcaattctcctgcctcagcctcccgagtagctgggattacaggtgcacaccaccacgcccagctaatcttttttgtttttagtagagtcggggtttcaccacattgaccaggatggtcttaaactcctaaactcaggcaatccgcccacctcggcctcccaaagtgctaggattacaggcatgagccattgtgcccagcctaatttttgtatttctagtagagacgaggttttgccatgttggccaggccggtcttgaactcctggcctcaactgatccacctgcttctgcctcccaaagtgatgggattacaggcgtgagccaccgatgccaccttagaccttgcttttggacaggaattatctacatgaattacctgggggaagatgtaagcagactagattaaaaagaaagaaagcctctgtcatccttcagtctatagcctagacgaaa

SEQ ID NO: 1885789 - DNA, 4001 bp, Homo sapiens; identical to SEQ ID NO: 1241691

SEQ ID NO: 1885790 - DNA, 4001 bp, Homo sapiens; identical to SEQ ID NO: 1241695

SEQ ID NO: 1885791 - DNA, 4001 bp, Homo sapiens; identical to SEQ ID NO: 1241696

SEQ ID NO: 1885792 - DNA, 4001 bp, Homo sapiens
aacaaacaaaacacttacaacacaggtaggaacaacaggttattttggaaagagtttaatatattctctattgttaagtgcaccagatgctggacttctgaaacaacaattatgcttctgcataatagctttttctacatatttctgttcatgttgcttgttcctctgatttacctggaatcaatgaatctgaaaaacaaaaagattctttaagcacctggtaaatttcaggtcccacattagaaaatgagcaatcatcaataatattgatgggggtgaaaatatgacattgagactttcgggtaatgtgccgagtttactttcatagtttactaggctcaggtttcatgccgaaggattatttgaaagactcactcactgacatgattttctgattttaaattcgaacactctcaaagcataaacagatcacctccagcaacattgtaaaaaaatactcaaagtttaaaaaaaaaaaagtaacttgtggcagtacttagtgttcaacagaaaacactccatctgctaaacaatatctcgactgcaaagcttctcttactgttggcggatagataatgacatagcccagtcattatcaccgtggcaacagtgaccagaaactatcagaggaaaattgcacatggaacagctggctctcgagcaggcatgcctcagcttcctctggagtatgctttttctgcaagtctggtgtgctcgagggtaccaccaaccctgtgcggctccaagactacagattatgtagcaagtccactggtcctgctcttccggatttattcttcccgccaataggagcacttaccacgttccaagcatcgtcctaggcactgaggatacagcagtgaataaaactgagtgctgggtaggaagtcaataaccaagctagtaaataactgtatattgtcaagcactggtaagtacaagggagagcagagcaagcaatgggcctgatgaggcttgctttgtctcctctgcactcccacactgctttgtatctgcttctcatttctcacgatgggtccaagctttgggcaccaggtctccctggacattccgcgctggcactgcgcctagcacccagcggctgctcaggaaacgtttgtcgaacgaacgaattcacttcttagttccccattcaacaaacctttcctgatcctaggcccaacaggttaaaaggctggagggccaacgaggctggaaactcagaggcggccgggggcggtggctcacgcctgtaatcccagcactttaagaggccgaggcaggaggatcccttgaagccaggagttcgagaccagcctgggcaaaaaagtgagacatcgaccccccgcccccgccgccaattccgtctctacaaaaaggaagaaaaaaaaaaaaaacccagaggaaatcacacaggcaaaagcgctttacaaattttaaaaatgaaaactgttctagagaaataatcgcgcgccggaggcggaagccccagagcctcagctcccacgtggcggcggagccagggaaagtccaggagccaaggctacggcccgagcgctggaaccccggtcaggctccggctccccgccacgacgaactgcatgcggccgcggcgctccggaggcgcccggggacgctcacctaagctgggagaggcggatacccgcccggcctagccccgctacctcccaagagaccaacacgacaagcgcgcgcccaccgcattgccatggcaattcaaccgccgctgacaccggaaccggaaacttcatcaggaggtgaccccttcccggcgttccgcggaacgggcgagtcccgcgcctctcccagttgtctcggcgtagtccagctggcctcattggctcacaggaggaaagtcgtcttccctcttgttttgcctctcgttgccctgcaagcgtgaccctgatggacatccagtctctccaattaactaacaaagcggttgccgacgaccaatagtaaggcagtaggatgaggctccggcataaggcccacctcctacctgccgggcgggacgagcaacatgattggtggaatcgagtaattactgatcagtattgtccaatcacggagggcagtttagagccggcccaatgagggcctccagggggcgggtcggactgccgcgggccggggagcgctctgggtggccagctgtgggcccgggccgtcgtgggctccggcttgcgtgcggagatgagcgggtccctcggccgagctgcggcggctctgctccgctgggggcgcggcgcgggcggcggtggcctttggggtccgggcgtgcgggcggcgggctcgggcgcgggcggcggcggctcggcggagcagttggacgcgctggtgaagaaggacaaggtggtggtcttcctcaaggggacgccggagcagccccagtgcggcttcagcaacgccgtggtgcagatcctgcggctgcacggcgtccgcgattacgcggcctacaacgtgctggacgacccggagctccgacaaggtcaggccagtgtgccgggcaggcgccctccgccccgggcccaggagcatcgctgcacgaggccgaggggttccgccgcgccgggctggggagcggggctccatccgccggggtctgtctgaaggttcgagccgggttagggcgaggagtactgccctggagtagagtctgggctgagggtgtagttgatttcactgggtcttgaggatctggggctctgtactgttgccaacttgagcagtaggtaaagtcctaaaggttcacttatcctcacttcgagctaatataggcgtttcggggcgatttgtcaatgactgactcggaggagggtggcccgctgcctgactgctctgcacggttaggaaactcatagtaaggacccactgtgagataggtactttcgcggacactttggggaggttggaagccattggcctactcgtgggtaaggtctagggctgtcgatggtggggagagggctgaggttgcccttgaggctagtgaggtcggaggctgatctcgcttggctcacggctcagggtgtcaagcatcatcctctgtggttgctacaagcaaagggttgggacagctgtcggctgaccttagtcgggatctatgttgtcggggaagagtcatgacatttggctttagatactcaagcacagggctgaatttatgtgggccagggcttggagaggtttgtggggaaaagaagcagccctggctcctgggccctgggctaactcactggctcagccttggagcccagggggccagggcaccagggaccagatggattaggccgggagagggaaggctgcagctaataagcatcttttccaagtactccacgtgcattcgccagtcttatctgagtaggggaggaggaagaggccaggcacaagggcctgctccttggccaggatggtcagggttggtggaaaactgggaaggctgtaccttttccttctagagagtgacttaggatacctgcatcccagttagagactttcagtgactgagtccctgcatgtccctagctaaaaagaggtgccagttgtgtgctaaaaataggtgccaggttctctgttactctaaattcgaaattactaatcatagtcattgcttacaatgatgagacaggctggtgtttggaaaagctttgggttgacatcctcttctgtggctaatcaggtgtaaaacttaagtcactcacctgcatttgaggataatgagacaatttggcaaagtttgtgttaggaagccaaagtaaaaattatagaaagtgtgtattattttacctggcacagaaagcacccggtaaatggtagctggcttcgtattagcacttgatggttttcaaatgtattttttcccagattatctagtccttaaagactcttggggataactgatcctccatttgctgtaggtgatagtggtggtgggtgggacctagaaagcatgttgagttgaggagtcgagaggg

SEQ ID NO: 1885793 - DNA, 4001 bp, Homo sapiens
atgggcagacttctcttatttgattatatttaaaactctaaaataatgcagcaaataccattctaaaaactgctggatttggtataagaacactgattactactcacattggtctgcatgctcctaacacacagatgcaaccacagagctcatgaccatggaagcgtgcttgaatcaactcaagtgcgttcattctgaggatcacagagcagagcaaatgattttaaaaggttgtaacattctttccactggtcctttaattcctctttccagttagtcagtcatacataattagtaatttgtaataatgcttatttttctcctatgtaggctaacaatgtcaatcctgccattgacccagaaactcaacacagatatttacctattactgtctacatcatacttagccaaagatttaacaatcatgtaccatttatttctctttggacttcagagtttccagtacatattaatattacttcttgccacaccatctatttttataattggacaatgcttcacacgaatcatctttatttagttatatatttgttgattcattcttttattgatccaattataataacagaatgaaaatacatgagcagaaagaactggttttcttttctgatggacctcagagttccagacacgtattattcatcatccaagactcatacgccggtatttgtcatcattggtccaggaagggcccactttctcttcatgcaattcgacattatttgttgataaattcagtaattcatgtataataattataaaaattttatggttcacataattcaattctatcaccaatattcgttatatatacatacacattatttgactttttttattttcagtaacatagtaaatatccttaaacaaaccacccaaacaacacaagaacttggctgttactcacactggaatctttcatatcatgacagcaacacaagtcttcatcagggctaaattcataatcagctcagtgcatccattctgaagagtgcaaagtggagaagatgataaaaatattgagacattctttgcatcaatccatacatttcaccattcatttacattgtcactttggcttttattaattaatggtaatatttattaataaaatagacttcaaggttgcaactaactgacagtaataactataacctatcacaatctatgttatttttggtccaagacataacacctttcatccatgcctatattatccattccaatttaaattaaaatccatttttcttaacacgtattttagtaataaacaatgcttcacctccttatcttcttcatttatacactgatttattcatcctgcccttgattcttttacaataatatttttttaaattcatgagcacgaagatcatgaagaagatccttctatatcctgtatcctgacatctatttataagggggaatggaccagatcccattgtattggacctcagagttccagacacatgatattcactgtgcatgactcacacaccaccagtcaccatcactggtccaggatcagccctctttctctattaccatctaaatttgtttgttgactaattcactaacaaggaaatacacctaagtcttcaaaaaaagaatatgattcttgaatatccctaacattcatccatataatcatttccacgaagaccatatttctttcattaactgagctcaatgtttcacatatgcattaattaacctaaagtttttaatccagattttaaatattgcatatttccccttcttttattgtgtttaatactttttaataatatagcaaataacattttaaaatggtcaaaacaagaaggagcattaacgattacccacattggtcttcatgctcctaacacatagatgcagctatagagcttgtaaccatggaatcggctggcaaacatccatcctgaggctcacagaggacggcagatcacaaacagataaaacagtcctccatgatctgtgtttatcatcttccctttaggaaaacatttgagaaatcactatctgaaggataattatttcattttctcttaagaaaatgaacactttgtgcaactttccttgacccagaggttgaccattatctataactaccacctgtatcatccttagtcaaagacgttacagtggggtaccatttatttcccttaggacttcaatgctttaatataatattttaatatgttatcatatttaatatatattaaatattgcattaattatatattaatattagatttttatttaatatattaaagctttaatataatgctttaatataataataataatacatcttgcctcaccacttattttataattggacaatacttcatccccttcatatacgtacatgtatacgtataaattatttcattgatccaattataataatacagtgaagtgaacaaacccaaagaccaaaagcaaacacattgtatattcataggatcacctgaatcagaaggaatgggccagatttcttttgtgatggacctcagagtttcagacatgtattcatcatgtgtaactcatacactaacagtagtcatcattgatcttctttttttttgctattcatttctaccttgtctattgattatgtcatttattcattaataatactttcaaggcccgtgattcacaaaacccagtaacactcttgatattccctatcagtatacagaatcactcaaacattgggtgtttcattaactatcctgttttttatatatgcatcatcaatataatacttcatgtcactcccatatcactggaataacattggccatctttgactgtatttcacacttttaaataatacgttgattactcttaaacaaaccacccaaacaaaggtaaggactttgactattactccccttggtcttcacgctccttcctaagcgtggtgcaaacagagtatgtgaccttggaggcatcctcaaatcagaacaaggacatccattctgatgagtacagagaagagaagatgaaaacaaatttgagacattgtcaccattgtttcttgcttttcacccataattagtcatttatgcaatcgttatttggacttcatattaatttcattttctgttaaggaaatttcatttcattaatcatagtaatttcattttctgttaagaaaatgaacaatttcaatcttgctactggcccagaatctgaacactctctataattatactggctatatcatcattggccaaagaggtgacaggcatgtcccatttatttctctttggacttcatgttttcaatacacatgaaatgtttcttgcctcactacagattttaataattgggcaatgattaacattattcatctttttatataatatatataaattatatatataggttctcacattgagcaactataataatgcaatgaaaataagtaaaaacaaaggccataaacaaataaattctgtatctctgacatctatacacataggatcatttcaaacatacggaaggagctctacttctgtgatggacctcagagttccagacacgtattcatcatgtaagactcatacgccaccagcagtcatcatcgatccaagattgatcacctctttttccactcatttctatcttgttcactgactgacttgttaactcactaataagtctctatggttcaaaaaaaaccccaagaataacctggatgttccatatctgtatctagaatcattctaacattgatatatctgttttattaattgtcttcagtttttcatctatgcattatcagtataatactttatataactctcatatctatcattgggataataacattggccgtctctgtattataaactttttttttttttttttgagatggagtctcactctgtcgcccaggctggagtgcaatgatgcaatctcagctcactgcaacctccgcctcccgggttcaagtgattctcctccct

SEQ ID NO: 1885794 - DNA, 4001 bp, Homo sapiens
catgcctgcgctcaagtgatcctcccacttcagcctctccaatagctaagactacaggcacatgccaccacccccatgcccggctaatattcttgtgggttttttttttttttttttgtagagatggggtttctccatgttgcccaggctggtcttgaactcctcggctcaagcagtccacctgcctcagcctcccaaagtgctgggattataggtgtgagccaccgtaccggcctggatctttcttaacatcaattgcaatcaagtgtcctaagtaactcagaattctgtaccaggagcagggttttgcaaatgacagaccctaatatctggaatttgctgtgttgaggtgggtgtaaggtggggtctcccttcctgactcggggtgagcaacacctctcaagtggtgcaaggtagccaaagcctctcctgttgagcccagtgagtcagaccacatgctcaatgaggctggaaattggtaggacttgttaaaaaaaaaaaaaaaaagccaggtgcctggggtgtgctgccccttcttcagccttcagtaagctcggtgagaaaaagatgcactttagtcccagttgacctttctgaaagcagggaaggagaaaagaaagccatgagtttctctttctgcctggggcaagtaattcagctgagctgagaaccagaaaatcatatttcaggattgcaaaagtcagattccctgccccaggctaggagcacaggtaaaggctgggagaaggacgacacagtgtgagaggggacagaaaccggaagaagcagtttcccctggctccctgccagccacttctgcccggcgttccctgcctggccaaaccgcaaacagcctgaaggcaagggccagacagcccggcctcatccctctggcccaggcccagtgtgttggggcagaggccagaaggctgcagtctgaaggaagactcagggagaacggggtgtagagggggcaggtgcagcgaggacaaggtccagattctacagcatgacttgacttgagtttctagctccagttggcagctcacagagttatcagaaaatggactaaggtcctggcatggtggcttacgcctgtaatcccagcactttggaagggtgaggcaggactgcttgaggccaggagttcaagaccagcctgggcaacacagcaagatcctgtctctacaaaatatttaaaaaatacccaggcatggtggcacatgcctgtggttctagctacttgggaggctgaggtgggaggatggcttgagattgggaggttgaggctgtagtgagccatacttgtgccactgcacttcagcctgggtgacagagggaaattctatctcaaaaaaaaaaaaaaaaaaaaagagtatcatcaaggcctgactgagaagaatgtacatcggccagctttgcttggatgtgggcagcctgtaccacactggggtgttgcatttctggaattgtttatgtggaaaaggccatggatggatgccaggcagtcaaggggtggagtgcagtggctatttatttctgccctacagggggtggaatgtggcccccaaagagataaatccaagtcccaaccctcaccccatacctgtgaatatgactttatttggaaaacgggtctttgtagatgcaattaagtgaaagatcttgagatgagattattatggattaattgagtggaccctaaaaccagtaacatatttttttgtgtgtggtggagatggggtcttgctatattgcccaggcttgtctcaaactcctgggctcaagcagttctcccaccttggcctcccaaagtgctgagataacaggcctgagccaccgcacctggtctgacacgttttttgttttttcaatgtgtagggcatttgtttgtagggaggtcacaagctctgtgtcccttgtcacaatgaccccagattcctattgggtgtgttgtaaacagaggaggcattcttcgggccccctgctctgagcacaccccaacacatgtaattataagaaggcacagacatgacaggagaaacacagaaggggccatcctgtgaagatggaggcagagattggagtgacgcagctacagtccaaggaactccaaggatttcctggggccacagaagctgcaagaggcaaggaaggatcattccctagaggcatcagagggaatatagtccccctaatacattgacgtagaactcctaccccccagagctgtgagataagagatttctgttgcttttagccaccaagtaagttgggatttgttgtggcagccctaagaaaccattacgtgcccagcaaattggaaaagtgtcccccagtacccagtggggctgtcagtcactatctcagacctaggtgacaatcaaaatagcccatcctccttagcacaatgcttgggttgaggatggtcacatgaccccagctagccaaccagagttatcctttgaatttgttttgttttgttttgttttttagagactgtgtcctgctctgtcacccaggctagagtacagtggcaagatctcggctcactgcagcctctatctcctcggttcaagcaattctcctgactcagcctcctgagtagcccaggctcggctaatttttgtatttttagtagagacaggatttcaccattttggccaggctgatcttgaactcctgacctcaggtgatccgcctgccttggtctcccaaagtgttgggattacaggagtgagccactgtgcccaaccttaacctttgtatttgtatagctgtcgggaaagaagtatttcttacctctgaaactgctagacacagggacaatgtgagcataggctgccagtggtcatttgtcaccccacagagagagctggctcgagaaggaagccaacagagaagaaagcagagagccaagagtaaaaagaggcagggcttgacgctgtcatccctggccctacaagcaaccctatctaaacacagttctatctctggacaaacaaccttacctaaacacagatctatctctgggcttttctgccagtcacttccccttttctgctcaaatccatttgagacaggatcgcagccattccagagggcagagtctgcagcaagtacgtgtttgaaatgcttgttccccggtgccgtaaagaaatagtacttgaacataaatttaatttcctcagcaaggccatttttacactttctgcagaaagggtacactcgccagtagttgtgccccatgagtatatagaacaaaggagacagggtcatttataacctgactcgtccaccctactgctgtgtccagtttccattggctggaatgggacctcagatcctgtatttgtcccaattggctggcaacttagaaccttttaaaagaggcaaaggcagaggagaacaaaggaaggaggaagtaacttgtgcaatgttgagaaaggtaaaaacaccttcaaataaggaagaggaacaggctatgacctaatacttgcttggaccagtataagcatgccagggcaaatattcaggctaaattgtgggagctaagaacattaaagtacattgatttctttattatggatagcagatatttaagaatgttagcacaggtctttgaataaattttgcttctaagagaagttactatttattcctaattagatgggaaggaaagtctctgaagaggaacctctacttcactttttactgatgtctcaagtacagcaggtaaaaatctcatcagaacaaacaacaaaggcttctatgaaacaggctgatttgtttctgattaaccacagaatcagagtgagttacaaccaacccctgtgtaacaggacactttccttggcccgggcaacacggccttccaccagcactttcttcaggcctcagagaactcgtggttgaaaaaagccatgccattcacagaaagcctaatctgccatgaattaacaagcagctatgcccacagtggacctgtttcctacctccag

SEQ ID NO: 1885795 - DNA, 4001 bp, Homo sapiens
cccccaaaacctgtgaactttaagagcccacctatgtattccccaccttttccgaccagctgatgatgacctcttcttctaaaaggtctgcatcgtacatctccttcaagatatgtggaatcttggagataagctgagcttgatgcattgctaccacacactccaaaccatgaagaaggtaccgttgggcttttttgttgttgtgacaaaactgcaaatagacaccttggtgttaacaatcttttttatgtgttctaagttgacaactctattacccaaataagagtgtctgcaagtgcatggcccataccatagttgttcaaaaaggtcaatgcataaacatccctgttactttgtaagggcctaggtatggcactttcagatactcagaggcttgtaaggtgggtcaatttccccactttcaagcatgacaggacaagcaaaagtggttaatatgaccatctcgaaagccacacaactgtaatctcatttatgaatccagagcactttgcttactcgtaggaaatggcgcctgtatttcttaatctgttctctaatcttctcattaaaaagaacttcagttagaacaagagggcccatggcttttacatccagtctttctgcttcagcaacgatttctttgtcagatgaatcaataacaccctcttctttctttttctgcaaagaaaaggaaaacaattcagtgcaatggaggcacactttgccaggctcaagacaccagccagtccctgctctgatgaacatatttttcctgcctaatttggcagttgtgacacatagtgcctggaatcacgcgcaaaaaatatttaaatgaacaagagttctaaaaagtcgtgcattagagtaatcctaattacactgctaaagtatcatatatctaaaggcacaaacaaggctgggttgaagctgatttacagaccaagcaaatgttttaccttaacaaaatcaaagaggatattgaccctctcctcaattgttctttccaaatcatcactgagtgtcagaacttttgcatggtcactgatttcatccattcgacgcctttgagcttcctcagttgtatcttctccccagtcatcatcctcctcttcttcctgtttatgaaaacagagctacttgatcaaaggccttaaaaacaacaacaaaaaggttcagattttgccaagttaatggcatcaagtccatctccatccaaaattgggttcaccttaattcaaacaacaaacagtacttggaatccacaatattagtgtattacacactgaaggctagtttcaacatttccacccacctcaaccaaatgccatatactttacacaactttagtgcccactaggccatcaaccctgcactcaccattgtatgtggaggaggattaatttcatttggtggtggtggtggtggtggtgtctcactgctggatacggagccattttccttgtctttgccctttctgtttttcttttctttttctttctttcctgtaccactgtcactattctctacagaaaaaaagggaaataaaaatttaaccccataacttacattacctcattgcccatcattaacgtttaaaaccctgcccttattttcctatggatcccctcagaaaaaccacacagcacacacaatgctacctaagaggcttcacagatcaaattcatcatgtatttcatacgtaagaatgttagtctaagaatggagtgacacaaaatattaggggtattgtaactgctaagaaagagtaagatgaagtgatgatgcctccactagggagaggtggccctaaggatccctgtcatccctcatgaacaaagtcattaactcaacccagctttagccaacaggtggaacactgtttaagtctatataacggcttgtctcatgggagagagaacaccggaataggttagactttcttgctatagcaagctcaaattgtgtcagacagttttgatcatctgccacagagtgttgcttgcaatattcaagtttaatgaagggggccctctttaccaaacaatgccagtaaaagaaactttgctgggtttccagcagaattttagtcattacttcatctaccctcagataatgtcttaattgatatggcacagtttaattggcagcctatttttcacctttaatggtaattaacaatacacttttgaaagatgtcttagatttgataaaatatagtacaaggactaaaaggttccttatattgtttttttgagacagagtcgctgttgcccaagctggagtgcagtggcacgatctcagctcagtgcaacctctgcctccaaggttcaagcgacgctcatgcctcagctaccggagtagctgggattacaggagcacaccaccatgctaagctagtttttgtgtttttagtagacgggtttcactatgttggccaggctggtcttgaactcctggcctcaagtgatgtgcccgccctggcctcccaaaatgcggggaatacaagcatgagccaccgtgcccagtctcccttacattcctattacaaaaaaaccttctattttgttcccaacagttagtaacttatcttaggatcttaggagttcatcatggaagactcaccaggtgggtttttgagaatgaatgtgcagagtttatgatgtgtgtcaagcatgcctcgatagccacaggctttacaagaattacctattgtttgcttctttggattgacatgctgccaaaaaaataacaaatgttatccataatataacatgaaaatatctaatcagaggacatctaaaccacagacagcttcacatgcaaagaaaacttttttcacacagtgacctactttaaaaaaaagaatggaaatatctcgaaaactggagttttgtgtttgatttaaaattacatttgctctgccttctcaggaaggtgacttagcggtatcacagaagcaggtatatggctttttctttcgacaaccacaaaagcacttaccaaatctgtttcaggattctcacattcaggacagagaacaaattttttaatgaatccatccaacatgtcttgcagcttattcgcctcatgagatccattgacaatgtaacggtcattcttaacatcaaactgggtctgtgctcccagctcacaaccaaaatatttggtgggatctatttgaatgaaaaaggagtttggatcgttacagttaactagatctctggctactcactcacatttgtacgaacaccactttttttttttttttgagacaagagtctcactctgtcacccaggctggagtgcaacggcgtggtctcagctcactgcaacctccgtttccggggttcaagcgattctcccccttcagcctcccaagtagctgggactacaagcgcatgccaccacgcctggctaatttttgtattagtagtagactcaggatttcactatgttggctaggctggtctagaactcctgacctcgcgatccgcttgcctcagccttccaaagtgctgggggttacaggtgtgagccaacgcgcccagccatccactctttaaatgcgttcccctggtagttttgtaaactcatggcaaccaataaaccacggttcctcacttaacttgtaaggtaattagctagcatacaattagaacaagttttgcagctcaaagactttgaagactctatccataatatgccctgtggacttttccaagctttacttacacgttggaggccgattaagcgcctttgcaacgtcaaccatgttgactataactgtcttgattccattgcctttgccctcaacctaaaggaaataagaattttagttgtgcagtttcccctgacaaatgcaaacttcaaaattctacaaaaagagctatcaactaaattgaagagcagtttattaccttggcaatcagacggggcatcttgtagcgatagaactggtctgacacgctgcggttgacattgacagacattttggcttatta

SEQ ID NO: 1885796 - DNA, 4001 bp, Homo sapiens
ataaggaagtattgaactactctaatctgactatattttaatgttttatccaaaaaaaaaaaaaaaacaaaaaacaacttcaaggatataggtaaagattttctaaggatctgaagaggttctttcaagtttacagttaacctatactacatttgttgagaaatattatatgtctgaaatgtaatttgaaaatatgagtgaggacttgtaaagtttagtggatagtcctcagaaatataaaaattctaatataactcagctggttaaaatgtattctgtggtaatttacacactataatgacttattagactatactatggttaagtcagagtaatatttttaaatgcttgattttaaaaatagttatactgaactatccagtctatcttcattttttaaaagttcacaattcttagccttcccaccctcttgcaattactaggtctcctgaaacagaaccatacttggcattataagcttggtaggtaccctaaaactttttcggaaatagtagggaatggaataactctcacaaagcaccattcttttggtattcttaaacaattccgtaattttatgaaccttaatgtctaggtaccaagctaaacttcagatccaatattcaggaaactaaaacagctgttttgcttgagtcttcaataaacttcaagtagttaatataggacatatataggcataattacaatgtgggttagaattaagtacagccaatcaaactgctacattctgagtcttaccatgtttgatgcattcatatgctgtatcaacttagaatctggaacaataacttgtggtgctgtggctacaaaaaaacaagcgaacatgcaaacaaggaaccatgaggctattttataatcacaagaacactttacatacaatgatgaaaacttttttcatgtttttcatgttttctgcactcaaatgctttcaatcatttcatctcaggacattataaatgtatatggcaaataacagctgtgatatacccaccctatactagaaaacattaaaaaatatttaagcccaggcgtggtggctcacacctgtaattacagcactttgggaggccaaggcgggtggatcacttgaggtcaggagttcaagaccagactggccaatatggtgaaaccccatctctactaaaaatacaaaaaaattagttgggtgtcaggctgaggcatgagaatcacttgaactccggaactggaggttgcagtaagctgagatcacgccactgcactctaacatgggtgacaaggttccatatcaaaaaaaaaaaattaagtggcaattcctaaggatgcaagggaatttaggaacatgaagtagtgagttaccttaacatctaaacataaatagttctatgcattcttaagtaaactggacattttcaaacataattttgtcttaactcaaggttaactgttttactgatacaatgataccactgttacaatgagttactaatccaataaaagtaagctcaaaaagttgtgactagtttttgaaatctacatagtccttttcttccaaatatgacagctgacagactcatgccactttcatcagctgtttaaaaaatacaaatcagccgggtgcagggatgcatgcctgtagtcccagcaactcaggaggctaaggtgggaggatcacttgagcccaggagttctgggctgtatgtgctatgctgatcaggtgtccaaataagttcggcatcaatatggtggcctcctgaaagcaggggaccaccaggttgcctgaagagtggtaaaccggcaaaagtcggaaaaaatacaaatcagaaataatggcaatgttacttaagcgtaaaaggaattacatgtttgattccgcaaatttcagagaacagataactccattatcctaatattctctgagtgaagaaaatcaaattttaatttatgatgacctaaaatcctaatgccaggtctgaaggcaacaggaagaacagtcatcaaaaaagaataaaaggataaaattatttgatacaaagtacacattaaaattaggtatgaaaagtaccactagatatcaacagtaaaataacccaaatactcttctactgtgtgtcattaccaattttaagacacatatatatactgtcaaatgaggcaaatgagtaactaaatgatattaaaatgaacttttcatttacttctagtgtcctctcccataaaagcagatgcactgaattagaatgctcaggaagttttataactgaatagatgtttgtcatgagagaaaatacagatcaagtttcttagccttttctgggctcagattttcctcagctgtaaaactgagccaagggctattttacaaagcccttataagatgccagtgaaacagtatctataaaatgacttgcagagtacaaggcactatggacacagtctatgaatatttgctttttcttagctttaatccaagtaatataaattaagatatgttatatatccactcttaacttaaaataaatctaattcagtccatttaggcttacataaattcctatggagctgaattttcagattgccaaagtatacaaaaaactccagaatgtaagatatattttaaaaactaatctgaaacatgtctttgaaagaacatgttttatagagaaagcaaataactattgtaccatataaaataataaatcccttagtaaataaaccttttagatttaacttaggaaatccatcactatatagccttttcaaaacaaaatattaatataacttctctgaatatcttaggctttcaattagtaaattacttgtctaccattactctacagatacaacctacattgtatacaaatttatatacatttacatacacatccctcagccaagagaaaggggggaaaaagcccgaaatcaacagaggggtttttgtttatttttaggttctccatgtgccccttaaaagacaagatccaaaaaatgcagaatatttctcttctttcataatgacaaacttaatttccaagtcataagtaggaaaacaagtccagtctcaccttgctgtgatgcaggaataagaacctgctgggtctgcgcttgctgaggtactgtctgctgaggctgagcttgctgatgatggtgatggtggtgatgctgctgctgctggggttgatgctgctgttgaacttgcagtagaagctgctgctcttctgaatgaaatccatctactgccctggactgcattagtttgttttcccataactaaggcaaagaacattaaagatttctaagtgaaaaataactctggacagatgaatacaacagttttattaatctctttataaagttattccattttaaaaactgatacagacacagaaatacaacaaatctgtaattctaacccaagtgaaacaataacaaaaacaaaattttaaagtatcaaacctcatttttgccacatcagagtactgaagattttgtttcttttttttatcttccaatgaactttctatagtaattccttaatcagcagttattattaagcgatgagtttcatacaagcaacttctttagtaatcaaagattatcctttataatagcaaaaccattactaaactatttttatatggaactttttccttataaaaatagaaaatacaaaattttctgcaacatataaaacataaattcttaaataacatacaaaacataaattcatttacaacagtgagatacatagatgcaatcccccaaagaagaaaagcctaactttccatctgtccaatcctacataaagaaaaagaaccggcaacgcccgaaggtcttagtagttatcccaactctccacacttcttgaaatgtccttccttcttccattacgccaattgacaatccttttctgtttagccatttctattttctcatttcaccttaggttctatgatgggaaaaatcataatggacaaaaagaaagaaaagaaaagaaaaca

SEQ ID NO: 1885797 - DNA, 4001 bp, Homo sapiens
tgttgggtctccctgccctgaaagggagcagctgcccgtctcagggagggggttaagcatttcatgacggggtaagatggggagagctaccgagttttgctgggtactgcgtgttggctactgtgctggatgatttatttgcgttatttcctcattgagatctcaatagccctgtgtgagagagattatgagtccttttttttttttttaatatcaggaaaccaaggcacagaaacacttggggatttgccaaggacacgcagctcaagtctgttctgtagctgggtctgtgctcagggtggctggcttcctgcaatgcctccttctcccttcccctgggagagaaaaaaagggaccaaaagcccaaacactgccagtggctcctgttactcctgacaagctccccagggggatgctgccttggcctcacagctcctctcccccaaagcctgtgctctttttagaatatgactcggtcccaaaggtcccagcacttgctctcagccctgtccttccccagagcccctcatcgttactccagtcatcacatgtcctcctcctgttctgggaccagacccgtttacctctggcaaggaggagccataatggcaatcagccatttccaagctgtaatcataccccgaacctcatccccagaactcacaacactgagacgctactcccgcgctgtggaccccatgactctgggttctggggcccggcacaaggcaagcatcaggggaacgtggtatagcgcaggctggggcagtgggggggtgccagcctgagccccacccagaagggtgtttgcagctttacaacactgcagacttacccagcgccacgggacagatgacacgatcctccgacactgcccatctgcccatcggtgcaagaaagaattcgaggcagttttcactgaggcaaagtcagacccaggcaacactgggggagcccagggctcctagaaagggacaaaggaaggagggtgagtaacagttgaccagtttcatcaattctagaaaaatgcaaaacattccctttaattgggaaaaaaatgtcaatgaggcatcccacttccagggtcagggcttcggtgggcttctgaacacagtgtttcgtggggcccatctaactttgggctccccaacagggatatttcaagcctgctctttaaggccggggagaaactggctgaaaaggcacggccgcgcaaagcctaagaagtagggagcccgctgagagaaacaggtagccccgtgggggtgaggtgcgcctagcaggtaaacaccagtggggaggggctgaggctggcaagttccaagacagaccctaaagggtcttccatgccaggataaggccttattttttggaccccgtcccggaagctccaggaagtcagatggaggctttaaagcaagacagtaacaaggtcaaaatgccattttagaaagatcactcaatgaaaataaacttttgcaaacaatttaacccaccaccccatctctaagaagctggggtaaaggaacagtcgaggatgtgtttacagatttagctgcaagaatgctcactgcagtgtcgttggtaacagcaacaaaaaatggaaacagcttagatcttttttatcgggcattagttgagcagaatcgtattaattaaaacctcgatttgtgacacgcttcctcactgatctgcattaagcaccatttttatgtattcttttttaaaaaataatttaatgaacacctatgaatctgtgacccaccctgacggctaggactgtgaccaaagcttctcctcccccagagcactttcagctgggattttcaacagtagaagagtgtaatcaacaatggtgcatacataccgtggaatattaaacagctcttaaaaggaatgaaacagccaagacctattgtcttctaatggacctcagtgttttgtgcagaactggattaatcatgatcttttgttcataaacactgtctcatcattggtccagaaaagcccccttttattttgctaatttatgcactcatatattcatttataataatgtcataaacactcgtgagcccactccccaaacccaaatctcagcaattacttacacctgccgccaccaattcactgcccccccccgccccccacccccccacccccccccccgccaaccagggtaaaggacctgaggctttcatgccagcagcaaggtggttaaataaactctggtgtgtacagctcgcaggatactgaggtgttgttataaggaatagtgttgatctttattatctctaagcagactcttgaaggaagaaacacaagctgctgcgagaggaaatgtacactatgatatagtttatgtaaaaaataaacaaagtcatagattttagaggtatatttatctacatatgcaaatgcacagaaaaaaatatctggaaccagacgcctgaaactgagaagagcagttaatttgctggggggtgatggggagggatcgagggaagcattaaagatggctttatctgcagtgtttgatttttactaatgcgtgtattaattatcaatccatttcttgcataattagaataaacattttgtgtgggggggatttaatttgcttgttcgcctgtgggttgtttttgtttttgtttctgtttttacaaatacaaagcaaagggcatgtttcctgatggattgggagtgggtacatgcccagagcaagttctgcagacacaggggatttattttatcgcgaatatgttttttaaaaaatatctatatgctctcactggagccccaagcctccgagcagcctgtcagtgacatcgggctggcaggtgtgtgcccagggctgtgatttcaccacccacagccccaaatccctcccaagctgtccagcacccacgggggagtgctttactttttggtctttaaaaggacccgaaagccaatgccctggccggtgttcttggagattagccgagtggaatgagaccttgggggaatgtgacatgagatggggccaggcggtggggacagggacctctagagagctgcggcccggcggctcgcgttcgcagcctagacggcttgctggtaaggagctggggcctcactgtgccccctgacagcttgattcctgtgcaaaacacacaactgccatgtttcttcccgactctaacccagagggactgtggctaaacggcactggcatttctaactgtcagctgcaggagaacgggaagcaacctttgcccaccctagcccacccccacatccagaggaggcaccccgactcccgtcagaagcccctctgtccccagctcctgcttgcacactaagcttcagggccccctgcagccgtcacaggctcttggaatcctcaaacaggcacagggttacttgtgtgacaaggatgtgacaagcatactcccatctacgtagaaaggcactgaggctcccagacaccaagaagacaaaactaagcccactttacacccagtcgggtggcaccctcgtcctgctcagtctccatccgcacagatcactaattggttaattggttaaatgtcttccctctcaccaagctaatgcagacagaggccttcgagaacttctttaccctctgccaggcagagacctattttcaaccatgactttgtgcggaagaaatctgagacaggttaagcagccctcggcctgcatgcctcgctcttaatcgcctttcctgcacgtgaagccccactatttattacacagcattttagtttggactgagtttgattcctgtgaaaaccttgaggtgattgctatagttttgcaatttttctttcttttttttttttttgagacggagtcttgctgtcacccaggctggagtgcaatggtgcaatctcggctaactgcaacttctgccttccaggttcgagcaattctcatgcctcagtctcctgagtagctggaactacaggcatgcaccaccacgcccagctaatttt

SEQ ID NO: 1885798 - DNA, 4001 bp, Homo sapiens
ttactagtaccaaatcagattaatcataaatcccaattctgaacatattctcatcactggtacatattggtgttacctagttttatttattaatatatccagttattattttaataaattcaggcaacacccatgaaccaacctcccaatccaagaacagtaaacactaattgttacttacataaatctcttctctccttacccacagaagtaaaaggcaagatctttagcattagagaatgactaaatcagttcttcaccataatgtgctcatttggtgaagtaaaatacatactttcaagagaaagaaagaccctacagttagactttttaatggaaatttgtttggcagtattagattaatcataaacttcggtcatctcatcattgcccaaaaatggcactccttatttattgacttgtgtagtttgggcttttaaataatacaatgaatatcaacatgagaataagagccatatctatcataaatatctgtctacatactccagatccataaatttaccagataggtgatcacttttagtggatctcacttgtgcaaaattagataaatgtaaacctttgttttatggcatattctcattaatgatgcaaaatctttctgatttacatgtctagtgattcacttatttactcatatatacaattatgcatggaataaattacatatctgtttttctaaagaattactccatggaaatttcaatgtgtgctttatccaaagcaggggcaacctggagctctatttatctggacaacattagagtataactggagtaatcattatctttggttcataacacctgttcctcactggcccatgcttggccttctcttaaataattgatcttgatatgaataacctcctttattcccttagaacaacatatcaataacaatggactccaagacaaaggataagaactgtcaatatctgtctacatattcatagcccatagctacagcccaaaaaatcctcttttaattttcttaaaaataaaactcactaaataatgttggattaattataaccctggtcatacgacacattctgaatattggttcgtgtttggccctctctcaataaaatatggtaaacccaccagcagcccagaactgaaatattctatgatccctctctatgaacttaacccaagttaacccaagttagaagcgcctagatcctactttctctataaggacaccagtagggtagaacgggattagtcataagctttattccacatcacatgctccacactgtccagagttggcccttgagatataattatattcattcaacttaaaaaacaatatataattaccagagatcccagactctacacttgaacttgaacacaaaacaaaacaacccatagaaataaccgactctatcccttgccattttttgtcgctttttataaaattcagtggatacaattagatccatcataactggtgtcatgtaacacatcctcaaattggcacatatttgctccttttctattacagtcatgtaatcttttgtttgtgtaaatatttttccttctcaataagctgacagctagcaacctcttaccaatccagaatgccaacatggacacttagatgcatctgtccatgtgcttctgcgtgtctgcagctcctatgtactccaaatgacagcttttgcctatatgttatattgaaattcagtattctacaaatatattcctagaaatacttgtttcatgacatgctctcataaatggtccacatatgacagtctttatcttcacttacacatttctttgttaatgcattcatcgattcatttatgatccctacctaggaagcactaaagcccaagaaactgaacttttactctgaattccactctcttacagagaagagcaaggtctctttctaatggacttcagagtttagggtttaatcaaaattaatgattcatatgccacagaactattcatcactcactttttcctcatgtatttacttatgcactgtttattgattatgcatattatttcattcatggtttcacccacaaaataatttaatatccatgaatcacaaaaacccaagaacaagacctctgactgctgcagaatgctatttccaggcttgtttcccacagagctggtagacgagatctctttttaattgggcctcagactgtgcctataattaatcgataaccttgcttcctaaccatcccgtgtgctactgctctttgctcaatcgtctttcgcttaatttactcataacttaatagcagtacaatgaacaccctatcacctcattccacaactggaacactggcaatttgttcagtatttgtaggtgctccctccccaccaatgaaaaagcctagatctttatcaatagagaaatcttcttaaaatacggtgcacaatagagtagaatattaagcaactgtgaaaatgaatacaaccccctccaattatgtttgtaagggatttcagttgtaccaaaataaattcatctttgtaagggacttcagctgtactaaaatgaattcatcttaacctatggttcattacatattcccaatatttgcccatgcatggcattgtttaattggttttgattttattattttatttttaattgacagataaaattatgtgtatttatcgcatacgacatgatgttttgaattatatatacattgtcggatgactaactctagctaattgatataaccattacttctcgtagttgccatttttgtggtgagaacacttcacatccactctctcagcattttttaattctatttatgtttgtggtagccattcattcccttgaattaattccatggacaacatgaatagcccccttcaaagcaagaacaagaactctgttacttaacgtgcctctctgcttcttatccacataagtgacagccatgatctccatcattggataacaaataagtcagatctggcatacagaatgtggagtaaaaactagattttagaaaattcaagaagcagcacagatttagattttttttaagggacctaagtcctgttgtaccaaatttatggaaaaaaaaaactccagtttttgtcaaattcccatcattagcccaagaatggccctgattttatttattgactttttaaattactaatttaggcaatatagtgaaaactcccaaacctgtgccctaaaaaaaataataaaaaactaggcatgttccaaattctatcacttaagccccacccacataggtaagaaccaaggtgatcttttttataggtcttccttgattagaattggataaatttatgtccccatttcttaacacattttcaccaatggtccatgtttgatcctaatttatgaatccatttatttgtttattttttattcactcatggaataatttgttagtatttttattttcttcaaggaaaatgcaaaatggcctacaatattattacaaataactgactctatgttctttatccacagtgtgcagaaccctagtccccttttatttatatgaacatttttaatgatacattaactttattcatctatgtttgtcctcttttaaataatccctttcatgcaatcagtaggactgctatactccaacaataaccaagctaagaatcaaatcaaaaactcaatcccttttacagcaactggaacaagaacaaaaaagtgcttgggaatatacctaaccaaagaggtgaaagatctctactagaaaaactacaaaacactgctgaaagaaatcatagatgacacaaacaaatgaaaacacatcccacgttcatgcatggatagaatcaatattgtgaaaatggccatactgccaaaagaaatctacagattcaatgcaattaccatccaaataccatcatcattcttcgcagaactagaaaaataatcctaaaattcatatggaactgaaaaagagcccacatagccaaagcaatact

SEQ ID NO: 1885799 - DNA, 4001 bp, Homo sapiens
atcagcaccaactttccagccatgtaagtgaagcagacactctagcacagtcaagctttcagatgactgcaactcaacctgacatcttgcctgcaacttcacaagaaaccctaagctaaaactgcccccagtaagcctctcctggattcctgccacatagaaaccgtgagaaatgacaaatgtttattgttgttttaatccattaaattgttcagtaattcattacacagcaaaagataataatacaatagaatgaacaactgtgaaccaccatcttaactcacaatgaggacactgacactatcttccttttcctatctgcttctccctagaggagtgaatagccttgatctttaactttaaagaaatgtgtgtaaatcaaccacggcacaaaataaaatacaatattaaaaacctctgaaattaataaaagccctccatcatttgtaatggacctaagttgggctgaattaaactaatcataaaccttggttcacttccattattggttcttgtatggtatgctttttatatatgtatatatttagcggtttattcttctaacataatttagtgatgaacaagccacctaaacccaggacatgaactttaactattatctacaacagactctgagctccttaaccacagaggcaaaacaccaatgtctttattgttatcgaataattagctgtggcatgttcattgtgtgaaggaaaatacacattttagaaagaacgaaacagcaaagacttaacttcttttagaaattattttagattaatcataaaccttggttcctaacacattctcattattgactcaagaataaccataccttttatgtatgaatttacttactgtttaattcttaatataatgaacccttaaatccacccaatgcaagagtaataaatgtaaccactaacaactatctatctgtatactccctaaccacatcaacacccaaacctcattaatttttttaaggcaccatatttgagcatttctgagagtgtgccatgaagcaatgatccaagatctaccttaatttaagcatttactgactcacttgtgttctttcttttatttaattacccccaaaataatttgatcatttattcattttttctaaaaaaagaataaaaacaaacaataatcaagaagtgaaataccatttcatgcaactgttgacacgcactttgtccaaagtgggatccatgtagatttcttttatttttcatctgtaaaaatgggttaattgttatttttgtttgatgacactttggccaatcctccatactcttttaaataattgaaacgcaaactcatttattcattcactttttacaatacatcaaaatgaataaaagccaagacaatggacaagaacactgactaatatctgtttgtatgctcactgcccaaaaatacaaatggctagatcatttttgttgttttagataatgttcagtgaacagaattggattaataagacctatggtcatattctcagtattagtccacacctggccttctttcaattaggcaattattggaacaattacttttaatgtaaatgatttgtttcttttctaaataaaaccgacaacccaacatcaatccaaaattacaacagggactctcgtgaaattagatatgtcttttgtggaaaatagtaagggacacttaatctatttatgttatgaaactcagtgcttcagaaaataacaataattagtaataacccttgtttcattaaagacttgcataattagccatcattaatttctacatctttattcttgcattggttcacttctcatacagttcacaggcatgaagaactgagaatcagatctttggctattcctaacttttgctgtaagcccctttcccacagacgaaataactagtttcttttttctaataaacctctgagttacagaatctaatcaaaatctttgattcctacagctcagaatactaatgattggctatacttgacatactttatgcattgtttatttctttattcattgattcattaataataatagtataatcaattctcatgaatcaaaaagctcaagaacaacatctgtgaatactaatgattgtatatatgtccattgaccaaagagctaatagatggaagtcactttctgcaacatatgtgtgtgtgagtttgtatacatatatatacatatatgcacttttggcacttataaattaatcaacttccttctttcatgtcagctccatgctactcactggtccacggttggtcctttttcaagtgccaaatatggtataatgaatcaccaaggaatcataatcttactgcacaactagaacactgacaacactgtccatcttcctatgtgctcctccctcaaggaattaatagcctaaatctttatcaatggagaggtacttaactgaatcacaacgcaataataaaacaatctgaatcatctctgaaaatgaatgaaataccctgtatcttttttattgaattttactagtaccaaatcagattaatcataaatcccaattctgaacatattctcatcactggtacatattggtgttacctagttttatttattaatatatccagttattattttaataaattcaggcaacacccatgaaccaacctcccaatccaagaacagtaaacactaattgttacttacataaatctcttctctccttacccacagaagtaaaaggcaagatctttagcattagagaatgactaaatcagttcttcaccataatgtgctcatttggtgaagtaaaatacatactttcaagagaaagaaagaccctacagttagactttttaatggaaatttgtttggcagtattagattaatcataaacttcggtcatctcatcattgcccaaaaatggcactccttatttattgacttgtgtagtttgggcttttaaataatacaatgaatatcaacatgagaataagagccatatctatcataaatatctgtctacatactccagatccataaatttaccagataggtgatcacttttagtggatctcacttgtgcaaaattagataaatgtaaacctttgttttatggcatattctcattaatgatgcaaaatctttctgatttacatgtctagtgattcacttatttactcatatatacaattatgcatggaataaattacatatctgtttttctaaagaattactccatggaaatttcaatgtgtgctttatccaaagcaggggcaacctggagctctatttatctggacaacattagagtataactggagtaatcattatctttggttcataacacctgttcctcactggcccatgcttggccttctcttaaataattgatcttgatatgaataacctcctttattcccttagaacaacatatcaataacaatggactccaagacaaaggataagaactgtcaatatctgtctacatattcatagcccatagctacagcccaaaaaatcctcttttaattttcttaaaaataaaactcactaaataatgttggattaattataaccctggtcatacgacacattctgaatattggttcgtgtttggccctctctcaataaaatatggtaaacccaccagcagcccagaactgaaatattctatgatccctctctatgaacttaacccaagttaacccaagttagaagcgcctagatcctactttctctataaggacaccagtagggtagaacgggattagtcataagctttattccacatcacatgctccacactgtccagagttggcccttgagatataattatattcattcaacttaaaaaacaatatataattaccagagatcccagactctacacttgaacttgaacacaaaacaaaacaacccatagaaataaccgactctatcccttgccattttttgtcgctttttataaaattcagtggatacaattagatccatcataactgg

SEQ ID NO: 1885800 - DNA, 4001 bp, Homo sapiens
ctgcactcctgcctggtgacagacagaggctccgtctcaaaaaaaaaaaaaaaaaaaaaaaaaaaaaaaatatatatatatatatatatatatatatatatgttcaacagattaggtcacttgaggaaatataagttagctatggtgcaaaaataaaatggaataatcctcaactctaaaagtcatttaaaaaccctctaacttattttctttaatgttctcagttgtgtcgaatggaaatagaattttgttattgtttacaatcatttctatcactgggcaatgcacagagctttttttttttttttttttttttttgagacagagtctcactgtgttgccaaggctggagtacagtggcgcgatcacagcacagagcttttttactttatttaaatatgtgcccatttatttctctaaaataataaaaagcatgaacaagcccacacgaatcaagaatataaaaattaacttaaatccattcctacactttttacccacagaagtaaaagccataattttcaccactgaaaaataattaaatcaggtatggtgcatctattgtgtaaagtaagagtagatttaagaaagaacagcctacatgcatttaaatctttcaagggacatttgtaggacagtactagattaattataaactcttattcacaccacattttaatcagtggcccaagaatggcctggaatattatttactgatttatctggcacccaacacaagaataaaagctactacaagtatccatctatgtgttttctacccagatggtaaaaatctgaactttattcccaataatggatctcatttatacagtacagaattaggtaaatttaaccactttttttatggtaaattttcaccaaaatagtccatgctagactctcctttatgtgtttctttattcatttgtcatttcacttattcatttagtaagtactcatgaacaattctttgttttttcggagaaaacacagtatgatcagcccatcaacaacccagaatcgtaatacaattaaatgcaactatacacatgaacctgaccccgtgggggaagagcctagttttaggtcttttgttttgctttttctttatctgaacatcagtaagatactacaggataaataattcacacgtttttaacacatgctcctcttcagtccatgttgtacctcagtggttctcaactggggacaatgttgccccccacagatgaaatttgccaaagtctgaagaaatgtttgatcgtcacactgggaggagggtcaacattggcatctactgagtagaagccaatgaagttactacacaccctacaatatacaagacaatcttgcaccatagagaattacccaaaatgtcaatagagccaaagtcaagaaacactgctttaccttcctcaaataactgaatacattcactcctgtgtatacattcactcatgacatcatcaatatctgtgaacatacagattgcatcagaaatatgaatggcgttaacacctgtcatttgctcatgattcccagactagatcatattttcttgtgttcattaagaaacagcaacatctaaataatgcaggacaaacaatactgatttctaggtacttgtctctgtatgtatattccttacccaaataggtatcagatttaatcaatttatgttgaaactgagtgcttcagaagtgtgttaataataataaatacattatacattctcataattaggcaacatatggctctacttgtcttcctttatttacatatttgtttcatttttcatttactaaatcttttctagtaatacaatccacacctatgaacttcaaccacctaagaacaaaatcccaaataattctaacttccactataatatcatttaccatataggtattaactaggtctcctcttataatggacctcagagttacagggtttaatcaaaatcattgattcagacaccccagaatactcatcattggtctaggcctagcatttcttttttattcattcattcatacctttgtttattgtttcactcattgaatcactaacaacaaagccaatagacacaaatcaaaaaaaactaagaacaagatccttgaatattactgagatctataagcttattttccatagaagtgatactgcattttttcagaatggatccaagcattatacaaataattaactacacttccttgcttcataccaatctcacattaatatttcatccagactttcttttatttaatttgtccatattttaaagatagtacatgaggtagccagcctccaaatggctcccaaggcccatgctcctgttatgcatagccttgtgtagcttctttacatattaaatcatgaccgcctgtattaccaacagaatactgtggaaatgatggtgtatgacttctggagctagattataaaatacattgagggttccacctttctctgtcttagattgactgctctaggggacatcaactgccatgttgtaaggatactcaagcagtcctgaggaagagtctatttgtgaagaaactgtggcttcccgcaatcagcaccaactttccagccatgtaagtgaagcagacactctagcacagtcaagctttcagatgactgcaactcaacctgacatcttgcctgcaacttcacaagaaaccctaagctaaaactgcccccagtaagcctctcctggattcctgccacatagaaaccgtgagaaatgacaaatgtttattgttgttttaatccattaaattgttcagtaattcattacacagcaaaagataataatacaatagaatgaacaactgtgaaccaccatcttaactcacaatgaggacactgacactatcttccttttcctatctgcttctccctagaggagtgaatagccttgatctttaactttaaagaaatgtgtgtaaatcaaccacggcacaaaataaaatacaatattaaaaacctctgaaattaataaaagccctccatcatttgtaatggacctaagttgggctgaattaaactaatcataaaccttggttcacttccattattggttcttgtatggtatgctttttatatatgtatatatttagcggtttattcttctaacataatttagtgatgaacaagccacctaaacccaggacatgaactttaactattatctacaacagactctgagctccttaaccacagaggcaaaacaccaatgtctttattgttatcgaataattagctgtggcatgttcattgtgtgaaggaaaatacacattttagaaagaacgaaacagcaaagacttaacttcttttagaaattattttagattaatcataaaccttggttcctaacacattctcattattgactcaagaataaccataccttttatgtatgaatttacttactgtttaattcttaatataatgaacccttaaatccacccaatgcaagagtaataaatgtaaccactaacaactatctatctgtatactccctaaccacatcaacacccaaacctcattaatttttttaaggcaccatatttgagcatttctgagagtgtgccatgaagcaatgatccaagatctaccttaatttaagcatttactgactcacttgtgttctttcttttatttaattacccccaaaataatttgatcatttattcattttttctaaaaaaagaataaaaacaaacaataatcaagaagtgaaataccatttcatgcaactgttgacacgcactttgtccaaagtgggatccatgtagatttcttttatttttcatctgtaaaaatgggttaattgttatttttgtttgatgacactttggccaatcctccatactcttttaaataattgaaacgcaaactcatttattcattcactttttacaatacatcaaaatgaataaaagccaagacaatggacaagaacactgactaatatctgtttgtatgctcactgc

SEQ ID NO: 1885801 - DNA, 4001 bp, Homo sapiens
tgttaatatttataatactttttcattgtactcaaagaatagttccataagtaggactgttaatcttctctcatgtatacacatttctctatttacgcattgaattcacttaaaataatacattccatatctttgaactacaaaagttcaggaacaagttttattgaattttcctaacttctattaggtaatttctacagagaatataggctggttctcattcaataacagatctcagagttacacagagggcttaatcaaaagtgttgattcagacacctccaccaatactcatcattgatccaggctaggcattctatttcttcattcatttataccttgttgaactgactcagtcattcatggtttcaggaataataattatatgatcaatatcccttaatgacacaaaactgagaacagaagtctttaatagaaccaagatctgttcattactctctttcatgcagaacaaatagactagatcatattttgtgatcaacctcaagtttacacatagagattcatcagcgactctgctgcatttaaatctcatacttatgattggtgtctaccagcttcccttccacttgatttgtctactcattaatgtgattgcaaaccatggatctaccatgtgagcccacaattaagcaaattaatatataatatctcccaaggtacctctacctcaaaaactcaacaacttcaatgtctgtccgtgaaggaatatgttaagcaactatagcaaaaacattaaatgggaatttaaattactatgacaatatatgaaatgctcttcctttatttaacaatggtcttcagttgggttgggttgaattaatcataaaattttgttgatgacacattacaatcataggtccatgactggcattccttaatttcatgtgttatttaaccatttattttatcaaaataatgtagtgggttcccatgaatgaatacagtccaagcccaaaacatcaatttgatgtttacttacatcagtctttctgctccttagtccacaaataacaataatggtcttcatgattagagaataataagaccagctacatggttttcattctatagagaaaaataaagccttcttttaaaaacattttaaaaggctctttttaaaagcctctttttaaaaacatttttctaagaaactacttggaaagaaccatgtatgtattccaaaaacaatgagagagcctagagtttttcttagaatgtctatcatgaaaaaaaaaaacaagaatcagcattctcatatcataacatttgttcctaattggtccatggtttgctgactctaaaatataaactgagacataaaaatgcaagttccttctcatatacaaaagacatcagtatctgtgatctcacagcactggacaagaacactgaagaatatttacatctgtctagagttattgccctcaggaagaatagactgtgtttcttttattatttgtttaataaaaatccattaaaaaatagattaatacactcatcattggtctctgcttggtctcaattaagtggttatttaaccaactatttatatgattaaagatgcttcattttcttcataaaatagtcagcaacccaccaccaacacagaacaaaaactgactcttgcatacaaatgaccatatgctccttaccagaatggtagaagccttgggtattaatttattgggagtctcagataagttttaataataatccatgtttcattacagtcactgataataagtacatgacttatgctttatgttttactcattgataaatttttaattcatgggctgattttataacaaaaatgcaatccatccccaagaaccacaaagtccaaggaaaaggtaccataggctcacttcccaaaaaaggaataatacgtgtctctttgtaatggacctcagaattgcatatgggtttaatcaaaaatcctgtttcagataccccatggtactcatcattggtccaagcacgtttttcttcctttatatcattcatttattattcattggttcatgaataataatataaccacaaaattctaggaataagatctccccattagtggctctctccctgaagactaggtctccttttacaatggacctcagagaacatgtgtgattaattaacatccatgcttcataccaaattcacaatcaccattatttcttctgtagtcttcttttagtcaatttgcccatgttttaaagacagtgcaatgaaaagtgataaaaccaccatcttccaacactgacagtgtcttccatattctctcaggctgccacacaaagagttatcggccaggaccataccaatatggaaaagattaaatcatttgaggtagaaaataagatacaatgttaaataattgtgaatataaatggtctaactactatatttttatcacttcagttgtgccaaattatattaaacatattttcggaacacatttccatcactggtccattcctggttattttaatttgttatagatattgattcctttgaaataccactaaacactcctgaacaaagcatccaaaccaaggacatgaacttgaggtgttaacttacattagtatctatattctttaccccacggatctaactgccaagattttgtttcttagaaaatgaatgtcatctatcctgtggttgttacgtggaagaaaagtagacttatcctagaagaacaagaagaaataaaaggcatctttatagaaaaaagaagaggtgagattgtctctatttgctgatgacacgattttatatacagaaaatccaaactacctcacacaaaaaaaaaaaactgttagaactgataaatgacttcagtaaaattgctggatagaaaatcatcaaaaaaaattcagtagtgactctatatcctaataggtaattaacttgaaatgaagaaaataagcccatttacaatagcaccaaaaatattgtctaaatttaacctagatggtgaaagacctgtatgctgaaaactataaaacactagtgaaagaaattgaagaaaacacaaataaatggaaatataccctgtgttcatgggttgaaagaactaaaattgttaaagtgtctatgctacctaaacccatttacaggttcaattcaattcctattaaaattccaatgtcattttgcatagaaatagggggggaaatccttaaatccatatagaaccacaaaagacactgaatagccacatacaaaaaatcttaaacaaaaagaacaaagctggaggcattacatccctgacttcaaaatatattataaagtgattataatcaaaacagcataatactggcataaaaacagatacatcagccaatggagcagaattaaaagttcataaataaactcacacatttacaatcaattgattttggacaaaggtgccgagagaacacaatgggaaaaagacagtatcttcaataaatggttttgggaaaactggttatcaacatgcagaatgaaattagatctttatctcacccaatatacaaaaatcaactcaaaatggattaaaaacttcaacataaaatctgaaactataaaactactagaggaaaagctccacaacattggcatagacaatgatttttttaataagaccccaaaaacacagacaacaaaagtaaaaatagacaagtagaatgtcatcaaattaaaaaccttatgcccagcaaaggaacaattaacaaaatgaagagacaacttccaggtcaggaaaacaaatctgcaaaccatacatctcataggggttaatatgcaaaatatataaggaacacaaacaattcaatagcaagaaaacccaatttaaaaatagacacatgatttggacagatattttcccaaagaagacatactaatggccaacagatatataaaaaaattatcagtcactctaatcactagggaaacacaaattaaaatcacaatgagatatcatctct

SEQ ID NO: 1885802 - DNA, 4001 bp, Homo sapiens
aatatctctcaccatgaaattttttgttttagataatataataaacgctgtgaatctagtaccaaacttgtctgtttgcttaagtaaaattccataaaagactgaattaatcatgagtgtcgttgtatatagatctcatcatcattccatgctctccctctctcaattacagttactcagtcaactatttatttatgtaaatgtatttctttttccttaataaaatgatcaaccagtaacctgcctcaacacagaacaaaaacattcagtcttgtgcacagatgaccatatgctccttaccaaaatgaatagagccttagccactaatttattgggactaagaacctcaaaattgtttcaataataatccatgttgcattacatgccttagtaggtaagtgcatgcatacctttcttattcttcattcattgataaaattctatattcatggactaagtttattataataattaattcataccctcaaaccacaaaaggcccatgaacaaggtcctagactcattttccatgaagaataaagaggtgtctctttgtaatggacctcagagttgcagatgggtttaatcaaaaatgttgtttcagaaaccccatgatattcatcactggtccatgatgtgcatttttttcatctattgattgacctattgactcacaaataacgatacaatcaaaaatccccaaaacaagatcattaaattttaggctcttggcccatagagctagactacatttcttaggccatgacacgtaaaggtgcacatgtgaattggtcaatgcccctgcatgctctcagttcacattcagcattcgttctgatatagcccacttctatttaattcatacatatgtcaacgatggcctgataaaaaacaacgaaatcacctatttccatattctcatgcgctgccccaaaacggatgtcagccaggatctctacccataagggaacgtgtaaaataaccatggcatgaaataaagaataatgttgagctgctctgagaataagttaacttttgtcttcttttataatcaactcagttgtgacgatttagattaaacataattcatggttcattacacattcccatcattggtgcatttggggtgtgttatttatttcacgtatgtagacattgattcctttgaaatcctttagctaacacccaaaaacaaaccattcaaagaaagaacttgaaataaggaacttacttatatttgtctctatgctccttactcaggataacagttctttcttaaattattaaatcagctggcctatgtccactctggagggaaaaaggcagatttagaatagatatacggttttctcaatggatgttagtcaagcagaactagataacaataaaccttggctcaaaaatgcaattttttcaggccagtattgaacttttagttttaaatagtataatagacactaatgcgtcacctagcccaagaataagatctgtaatgattatgaatatttgtctatataaaaatctgttaagtagatattacttaatggatttctggctgatgcaaacactttcccttttcttaattaaaaaaaaagcaaactataaaaccaaaaaaattgtctcaactgcagatacaatatgttctgtataataggattttacctcagattaataattatacttgttttattgccagtgttaatatttataatactttttcattgtactcaaagaatagttccataagtaggactgttaatcttctctcatgtatacacatttctctatttacgcattgaattcacttaaaataatacattccatatctttgaactacaaaagttcaggaacaagttttattgaattttcctaacttctattaggtaatttctacagagaatataggctggttctcattcaataacagatctcagagttacacagagggcttaatcaaaagtgttgattcagacacctccaccaatactcatcattgatccaggctaggcattctatttcttcattcatttataccttgttgaactgactcagtcattcatggtttcaggaataataattatatgatcaatatcccttaatgacacaaaactgagaacagaagtctttaatagaaccaagatctgttcattactctctttcatgcagaacaaatagactagatcatattttgtgatcaacctcaagtttacacatagagattcatcagcgactctgctgcatttaaatctcatacttatgattggtgtctaccagcttcccttccacttgatttgtctactcattaatgtgattgcaaaccatggatctaccatgtgagcccacaattaagcaaattaatatataatatctcccaaggtacctctacctcaaaaactcaacaacttcaatgtctgtccgtgaaggaatatgttaagcaactatagcaaaaacattaaatgggaatttaaattactatgacaatatatgaaatgctcttcctttatttaacaatggtcttcagttgggttgggttgaattaatcataaaattttgttgatgacacattacaatcataggtccatgactggcattccttaatttcatgtgttatttaaccatttattttatcaaaataatgtagtgggttcccatgaatgaatacagtccaagcccaaaacatcaatttgatgtttacttacatcagtctttctgctccttagtccacaaataacaataatggtcttcatgattagagaataataagaccagctacatggttttcattctatagagaaaaataaagccttcttttaaaaacattttaaaaggctctttttaaaagcctctttttaaaaacatttttctaagaaactacttggaaagaaccatgtatgtattccaaaaacaatgagagagcctagagtttttcttagaatgtctatcatgaaaaaaaaaaacaagaatcagcattctcatatcataacatttgttcctaattggtccatggtttgctgactctaaaatataaactgagacataaaaatgcaagttccttctcatatacaaaagacatcagtatctgtgatctcacagcactggacaagaacactgaagaatatttacatctgtctagagttattgccctcaggaagaatagactgtgtttcttttattatttgtttaataaaaatccattaaaaaatagattaatacactcatcattggtctctgcttggtctcaattaagtggttatttaaccaactatttatatgattaaagatgcttcattttcttcataaaatagtcagcaacccaccaccaacacagaacaaaaactgactcttgcatacaaatgaccatatgctccttaccagaatggtagaagccttgggtattaatttattgggagtctcagataagttttaataataatccatgtttcattacagtcactgataataagtacatgacttatgctttatgttttactcattgataaatttttaattcatgggctgattttataacaaaaatgcaatccatccccaagaaccacaaagtccaaggaaaaggtaccataggctcacttcccaaaaaaggaataatacgtgtctctttgtaatggacctcagaattgcatatgggtttaatcaaaaatcctgtttcagataccccatggtactcatcattggtccaagcacgtttttcttcctttatatcattcatttattattcattggttcatgaataataatataaccacaaaattctaggaataagatctccccattagtggctctctccctgaagactaggtctccttttacaatggacctcagagaacatgtgtgattaattaacatccatgcttcataccaaattcacaatcaccattatttcttctgtagtcttcttttagtcaatttgcccatgttttaaagacagtgcaatgaaaagtgataaaaccaccatcttccaacactgacagtgtcttccatat

SEQ ID NO: 1885803 - DNA, 4001 bp, Homo sapiens
ctaatatttattatattaagtattattaaactaaatacatcatttaagtatatgttttatccctttctaaatcaaacaagacacgcaaccagaaacttgccactaactcggaacactgagtgcatatctatctatatgctctcgaaggaggagcagacttatataaactcaaaacatcattagctcctttcataattgaatgaaatgaagccttccttgtctttatttgtatttttctttattcattcattgatttacttataatacaatctatacccattaaccaaaaaggaccaaaaacatattccttgaatatgtctaactttctctccaagcacatttcccatagatgcaatggacctcagagatacagacagggtataatcagaatatttgattcagatgccccacgcatactcatcattgatccagacttggtattctgtgctttaattcaattatactgttcttgatttaggcattgattcactaatagtaaaatcactatccatgaattagagggcaaaaagatccttgaagaagtaactatgtctgtaagattcatattccacagaactagaggactggctctctctgtaatgagcctcagtattgcaaaggtgaattaattcattccacaaattgcaccacgtcaattccatatattccattagtccatggttgggcttttttcatttaacatccgtatttttaagacgttactatggttatatcatggtataaccaccaagttataccacagctataggcaaggttttccattttcttatgttcttccctcaattagttaactgtcaataacaatcacaatggggaagtatttaaatccactatggtacaaaaacagcatattaaggcattctgaaaatgacagaaatacctttcaactttttgtcctaatgaatttcgttgtgctgaaatggattaatcataattcttaattcataacacatttctaccattgttccatgcataaccacctttgactcatttatgtatgtagccttttattcctttgaaataattcaatgaataaacttgatcaagtttcccaagcgagaacacaaagtttgatttttacttacatcaatctcttctctcctgattcacagagataacagcaagatcttcaccagaagactataattaaatcaggtagagtgcgttcattctgcagcataaaacgcaaattttaaaaagaatcaaatactatatgtttagctctttaaaatgaatcatagctctgtagtaaacaatcataaaccttgttttgtaccctattctgaacacttgagaagagagaacacttctatttattaacttacataaattgtttttgtcaagatgaaatatctctcaccatgaaattttttgttttagataatataataaacgctgtgaatctagtaccaaacttgtctgtttgcttaagtaaaattccataaaagactgaattaatcatgagtgtcgttgtatatagatctcatcatcattccatgctctccctctctcaattacagttactcagtcaactatttatttatgtaaatgtatttctttttccttaataaaatgatcaaccagtaacctgcctcaacacagaacaaaaacattcagtcttgtgcacagatgaccatatgctccttaccaaaatgaatagagccttagccactaatttattgggactaagaacctcaaaattgtttcaataataatccatgttgcattacatgccttagtaggtaagtgcatgcatacctttcttattcttcattcattgataaaattctatattcatggactaagtttattataataattaattcataccctcaaaccacaaaaggcccatgaacaaggtcctagactcattttccatgaagaataaagaggtgtctctttgtaatggacctcagagttgcagatgggtttaatcaaaaatgttgtttcagaaaccccatgatattcatcactggtccatgatgtgcatttttttcatctattgattgacctattgactcacaaataacgatacaatcaaaaatccccaaaacaagatcattaaattttaggctcttggcccatagagctagactacatttcttaggccatgacacgtaaaggtgcacatgtgaattggtcaatgcccctgcatgctctcagttcacattcagcattcgttctgatatagcccacttctatttaattcatacatatgtcaacgatggcctgataaaaaacaacgaaatcacctatttccatattctcatgcgctgccccaaaacggatgtcagccaggatctctacccataagggaacgtgtaaaataaccatggcatgaaataaagaataatgttgagctgctctgagaataagttaacttttgtcttcttttataatcaactcagttgtgacgatttagattaaacataattcatggttcattacacattcccatcattggtgcatttggggtgtgttatttatttcacgtatgtagacattgattcctttgaaatcctttagctaacacccaaaaacaaaccattcaaagaaagaacttgaaataaggaacttacttatatttgtctctatgctccttactcaggataacagttctttcttaaattattaaatcagctggcctatgtccactctggagggaaaaaggcagatttagaatagatatacggttttctcaatggatgttagtcaagcagaactagataacaataaaccttggctcaaaaatgcaattttttcaggccagtattgaacttttagttttaaatagtataatagacactaatgcgtcacctagcccaagaataagatctgtaatgattatgaatatttgtctatataaaaatctgttaagtagatattacttaatggatttctggctgatgcaaacactttcccttttcttaattaaaaaaaaagcaaactataaaaccaaaaaaattgtctcaactgcagatacaatatgttctgtataataggattttacctcagattaataattatacttgttttattgccagtgttaatatttataatactttttcattgtactcaaagaatagttccataagtaggactgttaatcttctctcatgtatacacatttctctatttacgcattgaattcacttaaaataatacattccatatctttgaactacaaaagttcaggaacaagttttattgaattttcctaacttctattaggtaatttctacagagaatataggctggttctcattcaataacagatctcagagttacacagagggcttaatcaaaagtgttgattcagacacctccaccaatactcatcattgatccaggctaggcattctatttcttcattcatttataccttgttgaactgactcagtcattcatggtttcaggaataataattatatgatcaatatcccttaatgacacaaaactgagaacagaagtctttaatagaaccaagatctgttcattactctctttcatgcagaacaaatagactagatcatattttgtgatcaacctcaagtttacacatagagattcatcagcgactctgctgcatttaaatctcatacttatgattggtgtctaccagcttcccttccacttgatttgtctactcattaatgtgattgcaaaccatggatctaccatgtgagcccacaattaagcaaattaatatataatatctcccaaggtacctctacctcaaaaactcaacaacttcaatgtctgtccgtgaaggaatatgttaagcaactatagcaaaaacattaaatgggaatttaaattactatgacaatatatgaaatgctcttcctttatttaacaatggtcttcagttgggttgggttgaattaatcataaaattttgttgatgacacattacaatcataggtccatgactggcattccttaatttcatgtgttatttaaccatttattttatcaaa

SEQ ID NO: 1885804 - DNA, 4001 bp, Homo sapiens
agttaacagcctgaatctcttccaatatggaaatgcttaaatcaggtatggcgcagaaatactacaaaatatgaaacacttctgaaaattaaattccttctacctttttaaaaaataagtctctattgtgctgaaatgggtcagtcctactccttggcctacaacacattcctattattggttgttacttgatgttttcatttttgtgtatatggccttttgttcctttcttcaataatcacacatgaaccaaccacataacccaccaacagaaactccattactcacattgctccttaccacagaagaaatcgccatgctcttcaccttggggaaatgaccaaatccaatctcgtctattccttctggaggaaaaggcagatttttataagaataaaaagtgtacattttaaaatccatttttaagtagaagttagttctccattactggatggatcataaacattggtttgtgtcaaattttaatcatcaacccaacagtagttctttttcatgtattgacataattcttagcatgaaataatatcatgaacatttttgaatctaccaccaaacactagaagagcagttttcaatatctgcctaggtattcctagcataaagggaagacacatttttaatgaggaaaacttttgcactataagacgaatttaaattgttgttttataacacaatctgaccagtgggccacagttattttaattcaaactatttactgatttgtttatttactcatctatttaataactcaaaaaataatttaattatctactctcctttctaaagaaaactcaaaatggtgaagacacctgctacctaaaattaaatactattacctgcaactgttcatattagccctgtatgcactgtgggaacgttcttcggtgatacgagtgttctctattggcaattctgaaatggtggtcacttgcgacatgtggcttggggtgtggctagtgcgactgaggaactgaatttttatttttaattaatttccatttaaatgttaatatcaaaatatgtctagagagtgggtcttcacaacccttccaaaggaaggagggtcctggacctttttgtttaagtaaacctcaagaggatagacaagattaatcacaccctttcatacattacatatgcttctcactagtccatgatttgccctcttttaaataagggatggagatataaaatgattcttttactcataataatagtgccactattcatgaattcagaagacactggacaaaaacccttcatgacactagcatctatttattcacttattactcatgaaagtcataaaaatgcatttgcatttttctttttaaataaaaatgagcaaacataagaggatttttggttattatattcaaattttcaacgttcatccttagactttctccacatttcacaacctaatcattagtattttagtgtttattattaattgtattaaattgttgtttattataaaaattatgttaatgtgtttagcatgatttgcaatattgttattattgaatatgaatgttaattttattggctaatatttattatattaagtattattaaactaaatacatcatttaagtatatgttttatccctttctaaatcaaacaagacacgcaaccagaaacttgccactaactcggaacactgagtgcatatctatctatatgctctcgaaggaggagcagacttatataaactcaaaacatcattagctcctttcataattgaatgaaatgaagccttccttgtctttatttgtatttttctttattcattcattgatttacttataatacaatctatacccattaaccaaaaaggaccaaaaacatattccttgaatatgtctaactttctctccaagcacatttcccatagatgcaatggacctcagagatacagacagggtataatcagaatatttgattcagatgccccacgcatactcatcattgatccagacttggtattctgtgctttaattcaattatactgttcttgatttaggcattgattcactaatagtaaaatcactatccatgaattagagggcaaaaagatccttgaagaagtaactatgtctgtaagattcatattccacagaactagaggactggctctctctgtaatgagcctcagtattgcaaaggtgaattaattcattccacaaattgcaccacgtcaattccatatattccattagtccatggttgggcttttttcatttaacatccgtatttttaagacgttactatggttatatcatggtataaccaccaagttataccacagctataggcaaggttttccattttcttatgttcttccctcaattagttaactgtcaataacaatcacaatggggaagtatttaaatccactatggtacaaaaacagcatattaaggcattctgaaaatgacagaaatacctttcaactttttgtcctaatgaatttcgttgtgctgaaatggattaatcataattcttaattcataacacatttctaccattgttccatgcataaccacctttgactcatttatgtatgtagccttttattcctttgaaataattcaatgaataaacttgatcaagtttcccaagcgagaacacaaagtttgatttttacttacatcaatctcttctctcctgattcacagagataacagcaagatcttcaccagaagactataattaaatcaggtagagtgcgttcattctgcagcataaaacgcaaattttaaaaagaatcaaatactatatgtttagctctttaaaatgaatcatagctctgtagtaaacaatcataaaccttgttttgtaccctattctgaacacttgagaagagagaacacttctatttattaacttacataaattgtttttgtcaagatgaaatatctctcaccatgaaattttttgttttagataatataataaacgctgtgaatctagtaccaaacttgtctgtttgcttaagtaaaattccataaaagactgaattaatcatgagtgtcgttgtatatagatctcatcatcattccatgctctccctctctcaattacagttactcagtcaactatttatttatgtaaatgtatttctttttccttaataaaatgatcaaccagtaacctgcctcaacacagaacaaaaacattcagtcttgtgcacagatgaccatatgctccttaccaaaatgaatagagccttagccactaatttattgggactaagaacctcaaaattgtttcaataataatccatgttgcattacatgccttagtaggtaagtgcatgcatacctttcttattcttcattcattgataaaattctatattcatggactaagtttattataataattaattcataccctcaaaccacaaaaggcccatgaacaaggtcctagactcattttccatgaagaataaagaggtgtctctttgtaatggacctcagagttgcagatgggtttaatcaaaaatgttgtttcagaaaccccatgatattcatcactggtccatgatgtgcatttttttcatctattgattgacctattgactcacaaataacgatacaatcaaaaatccccaaaacaagatcattaaattttaggctcttggcccatagagctagactacatttcttaggccatgacacgtaaaggtgcacatgtgaattggtcaatgcccctgcatgctctcagttcacattcagcattcgttctgatatagcccacttctatttaattcatacatatgtcaacgatggcctgataaaaaacaacgaaatcacctatttccatattctcatgcgctgccccaaaacggatgtcagccaggatctctacccataagggaacgtgtaaaataaccatggcatgaaataaagaataatgttgagctgctctgagaataagttaacttttgtcttcttttataatcaactcagtt

SEQ ID NO: 1885805 - DNA, 4001 bp, Homo sapiens
cccacagtgaagcaagtatagatcaatgaacatccttgcttcctagccatctcattccacttatcttccacctttccatgcattcctccctcattaaagagctgtctaacaggactttgcatataatgtaaacgtactgtaactgcgttctccattacagtcaccaatagcaacatacagctgctgagcactagaaatgtggctaatgcaaccaagaaattacatttaaaagtgcatgtacctttaattattttaaatataaatagccacatgtggatagaggaaacgacattgaacagtgcagccatagattttattagtgaataaatcttaaattaaatgcagtacaaaataagatgaattattaatcagataaaaaaatgaataaaatgtctttcatcttatttttaaccaaaattgtgcttaattggactaaccacaatctaagtttcataacacattcatctcattgatctacatatgccttaactttaaataattcagtgaacattaatgaaaaatttaccctaattgacaagtttttggactgttatttacttaagtctttagcttccttacacacaaaggtaacagccaagatcttcatcagcagagactgattaaatcaaccatggtcttcattctgtggagttgaatacaaattttcaaaagaatgaacagtacagatttagattgacttaaaagacattagttgtgtgatattaaattaatcataaagttgattcaaatcccatttttatcactgacccaagaactgcacttatttttatttcctgatttaactattaactttaaataatacaataaacactgttaaattcatcacccaaaacaaaaactatgactatggcacacatctgtctatagacacctacacaggcaaccgctttagatcatcttttttatttaatggactcaacatgtgtagaaatggatgaatttaaattcatgattcatggcatattatcaccaatggtaaatgctttaccctacttatatatgaattcatttattgttttgatttgtttatgttatgacgcatggaatatttcattatacattcacaaatactaacacacacacacacacacacacacacacacacagagcagtaaactcatgaagaacccacaacagaaatgcttttcatgttcaatgtctatattcccacacctaaccaggaagacagcatcagtagtttagaaaaagactaactttcattttcatttctcactcagttgtgttacgccctcttttaaaaaattaattgtgacaaggacatattctattcacatgtaacaattcaatatataggaatttacttacattatagaagaagcttgaataatattatgtctccatatgtccattatgctatccacaagatttagaaactagatgctttttttagtttttaataaaactcagtacagagttggatttataataacttttcataaggaatattctcaagttgaaacatgctcatttatttccaattaaataactgtttcatctattatttatttatgcaattttccctcctctaaataaaaccaatcagtaaacaaccatcaacatcaaacaattattttgtgtctggcatacatctgtccacatacgccttccaaaacaaggcaacagcctctatcattatatatcactggaattcagtgctatcgaagcatataataataatccattcgtcattacatactctcataattggtcaatgccaagctctccttatatttacccatttatgcaaaatttatgcattgatttacttataaaatggaatctataccaaaaaactatgaacacccatgatcaagatacctgaatattctgaacttgtgttataagctcatttccctagagggaaaaatgggggcctctttttaaaatggacctcagagttacagatggctttaatcaaaatttttgattcagacaccctccaatctcatcattggtccaggcttggcactctttcttcattcatgtataccttcattttcccatgaatcacaaattctaagaacaagatcctggatatcacaacaatatatctctaggctcaattcccacaaagctgtcagactagatctcagtgccacacatggaataatcaacaaatcttgcttcagatcagtactatcaacatgaatggccgatgactgggctatgttcatttaatttgcctaattttaaaggtggtataatgaacaatgaaaatccacaatggtatcccccactagaacacaaacagcatgtttcaccttacaagagcttctcctgaacagttaacagcctgaatctcttccaatatggaaatgcttaaatcaggtatggcgcagaaatactacaaaatatgaaacacttctgaaaattaaattccttctacctttttaaaaaataagtctctattgtgctgaaatgggtcagtcctactccttggcctacaacacattcctattattggttgttacttgatgttttcatttttgtgtatatggccttttgttcctttcttcaataatcacacatgaaccaaccacataacccaccaacagaaactccattactcacattgctccttaccacagaagaaatcgccatgctcttcaccttggggaaatgaccaaatccaatctcgtctattccttctggaggaaaaggcagatttttataagaataaaaagtgtacattttaaaatccatttttaagtagaagttagttctccattactggatggatcataaacattggtttgtgtcaaattttaatcatcaacccaacagtagttctttttcatgtattgacataattcttagcatgaaataatatcatgaacatttttgaatctaccaccaaacactagaagagcagttttcaatatctgcctaggtattcctagcataaagggaagacacatttttaatgaggaaaacttttgcactataagacgaatttaaattgttgttttataacacaatctgaccagtgggccacagttattttaattcaaactatttactgatttgtttatttactcatctatttaataactcaaaaaataatttaattatctactctcctttctaaagaaaactcaaaatggtgaagacacctgctacctaaaattaaatactattacctgcaactgttcatattagccctgtatgcactgtgggaacgttcttcggtgatacgagtgttctctattggcaattctgaaatggtggtcacttgcgacatgtggcttggggtgtggctagtgcgactgaggaactgaatttttatttttaattaatttccatttaaatgttaatatcaaaatatgtctagagagtgggtcttcacaacccttccaaaggaaggagggtcctggacctttttgtttaagtaaacctcaagaggatagacaagattaatcacaccctttcatacattacatatgcttctcactagtccatgatttgccctcttttaaataagggatggagatataaaatgattcttttactcataataatagtgccactattcatgaattcagaagacactggacaaaaacccttcatgacactagcatctatttattcacttattactcatgaaagtcataaaaatgcatttgcatttttctttttaaataaaaatgagcaaacataagaggatttttggttattatattcaaattttcaacgttcatccttagactttctccacatttcacaacctaatcattagtattttagtgtttattattaattgtattaaattgttgtttattataaaaattatgttaatgtgtttagcatgatttgcaatattgttattattgaatatgaatgttaattttattggctaatatttattatattaagtattattaaactaaatacatcatttaagtatatgttttatccctttctaaatcaaacaagacacgcaaccagaaacttgccactaa

SEQ ID NO: 1885806 - DNA, 4001 bp, Homo sapiens
ataacaagaaatcagacaaccctgacatctcttcataggtcatttctcacagaggaaggaagatagatccctttgtgtgatagattcagtttttcagattagcagattaatgaccatatctgcttcatattaatcccatactcttaattggtcaaggcttgatcatctttcattgaccctgtccatattttaaggatgtgatgatgaagaactacgaagctgccattttactccacactgacaatatcttccatcttggaatgtgaataagctgtctttatagagggaggttaaaatcaactgtgactcaaataaaattgaataatttatttttacattaattaactcaataattaactattaaaatgaataagatggtcttgcttttttctccttaactgaccacagatgtgctgaatgattcacatataacttcattcattttatttgtatacatagtcatttattcctttccagaaagacttaactctcttaacaaccactaaagcaaaagcaatcactttgttacttacataggtttctacactcattactcaaacagacaacaaccatgatcttcctcgctggagaataattgaatcattgcgcattcattctgtggagtacaaggtgaatataataggtagatgagaaagagagagagagagagagagagagatagagagaaatggatcagcctagatttagatttttttaaaattccgttcaagtcaacaattattgattagaaataaaccctggtacttgtcgtgtatttaaaagatgaacaacattgattcattgactaattgactcaagtatgaaatttaactactgtaagtaaaaccaggcaaaataataataattgtgactattaaacacgtctgtctgtttatctgccttctactcaactaggaaagggttaaatttcctttctacatgaatcttgctagaaagaattaaattaatctgaatcctggattcgagtacattctcaacaattgtgtatgcgtgcatacacacatacatataaagttaaatagttacacatggaggcatgtctattccgtgttttaaggaaattgcaccaatgagactgaaagggaaatactatccaaatatataaacatattcaccattccaaaaatgcaagagcctacctcaattttgtttatggaaataatgacaatactggagagctgttgtatggaactggattaatcactctttttgttccataatacctggccctcattggtccatgatttggccttattttgaataactgattgagacattaatttgttcctttttacatttataataaaatcattatgtctgtgacttcacagaaactggacaatatcaatgcccatcccatgctcattagacagaaaattcagatcattttccttgctttcgtaaattaaactgaggaactgaatttaaatagtgaagattattagaattcattataactggtcatttgacatattctcaagatagatccatgtgtaaactctctctcaattaggtagtaatttaagcaataattaaagtaaacattttgcccttttctttaaaaaaaaaaaaatgaacaccctcaagcagaacaacaacatggactctaacatccatttatctaactgctccttacccaaagggtcagctttgattaatttattttactgggacttagtgcttcagaaacgtattagtaatgattcctattattttatgtactctcatatttggagcaggaataaccattctgttatttataccgtacttttcttgatttatccatatacttctttactaaaaataatacagtccatactcagaagcccaaaaactaaatcctgattattgttagcttctggaataagctcatttcccatagacataatgaaaagtactctttttgtaatggacctcagagttatagggtttaatcaaaatccaagattcagacaccccagggtactcatcattgatccaggataagcaatcttttccttcatttatacctttgtttattgatccattcattgattcagtagcagtaataaaatcaatacccattgttattttagcatccacaaacagtatccttgaatataaccaagatctgtttacaggctcttttcgcatagactagccctattctcaatagactagatctccttttgtagtggcccacagtgaagcaagtatagatcaatgaacatccttgcttcctagccatctcattccacttatcttccacctttccatgcattcctccctcattaaagagctgtctaacaggactttgcatataatgtaaacgtactgtaactgcgttctccattacagtcaccaatagcaacatacagctgctgagcactagaaatgtggctaatgcaaccaagaaattacatttaaaagtgcatgtacctttaattattttaaatataaatagccacatgtggatagaggaaacgacattgaacagtgcagccatagattttattagtgaataaatcttaaattaaatgcagtacaaaataagatgaattattaatcagataaaaaaatgaataaaatgtctttcatcttatttttaaccaaaattgtgcttaattggactaaccacaatctaagtttcataacacattcatctcattgatctacatatgccttaactttaaataattcagtgaacattaatgaaaaatttaccctaattgacaagtttttggactgttatttacttaagtctttagcttccttacacacaaaggtaacagccaagatcttcatcagcagagactgattaaatcaaccatggtcttcattctgtggagttgaatacaaattttcaaaagaatgaacagtacagatttagattgacttaaaagacattagttgtgtgatattaaattaatcataaagttgattcaaatcccatttttatcactgacccaagaactgcacttatttttatttcctgatttaactattaactttaaataatacaataaacactgttaaattcatcacccaaaacaaaaactatgactatggcacacatctgtctatagacacctacacaggcaaccgctttagatcatcttttttatttaatggactcaacatgtgtagaaatggatgaatttaaattcatgattcatggcatattatcaccaatggtaaatgctttaccctacttatatatgaattcatttattgttttgatttgtttatgttatgacgcatggaatatttcattatacattcacaaatactaacacacacacacacacacacacacacacacacagagcagtaaactcatgaagaacccacaacagaaatgcttttcatgttcaatgtctatattcccacacctaaccaggaagacagcatcagtagtttagaaaaagactaactttcattttcatttctcactcagttgtgttacgccctcttttaaaaaattaattgtgacaaggacatattctattcacatgtaacaattcaatatataggaatttacttacattatagaagaagcttgaataatattatgtctccatatgtccattatgctatccacaagatttagaaactagatgctttttttagtttttaataaaactcagtacagagttggatttataataacttttcataaggaatattctcaagttgaaacatgctcatttatttccaattaaataactgtttcatctattatttatttatgcaattttccctcctctaaataaaaccaatcagtaaacaaccatcaacatcaaacaattattttgtgtctggcatacatctgtccacatacgccttccaaaacaaggcaacagcctctatcattatatatcactggaattcagtgctatcgaagcatataataataatccattcgtcattacatactctcataattggtcaatgccaagctctccttatatttacccatttatgcaaaatttatgcattga

SEQ ID NO: 1885807 - DNA, 4001 bp, Homo sapiens
attcatctctacatttctttactggttaatttatcagtaaactaatcatattaaagtaaatatctacctatctaaaacgcttatgaacaaaatcccaaaacccttgagaacaagatgacttaagtatccctaacaccagtctataaagtcatttaccatgtttttttcattaatcatccacagtgttataaatatggattaatcaacatgtttcatgtccaccacatactttccactgggtcatgggtggctttctttggttatttaaaaatttatagtgaatcttttaaaatctaccctaaacaaatataaaaatatgacaagaagattgactcttacttctattagtgtccaggctcctacccagaggcaactgtggagaacgcgatcacagcagaaggcctgtaagtacaaagcagtgcagataaagaaaataaaaatggagacattattttcctcgatctatgcatgtcacctttcatttagccaatcatttagacatttaaaattttcacttaatatttattaattttttaagaaaacaaacaacattgatcttgacactgacacaaatcaagagcgtttctttgtatattgactatttcataatagactctattgttttcaatatatatgaatagtttcttttatctactcatacaatttttgtaattggacagtacttcacttattcagatttatttatatttgtttattaattattttatctatctatattatttatatcctctatatcatccttagctagaggtaacacatttgaaacatttatttcttaacagactttttccatatatatataaatggcttctcgtttccctacatagtttcataattgtacgatgatttcattactcatgtgtgtttctattgctttattgattctttcattgatctatttataataatagaatcaaaatccattaatgcaaaaaccaagaacatgagccttgtgtattcttaaatctgtctatagggtatggtattttcaacagaggcagagtcatcattgactgaagactggccctcctcttctccattacttctacatttgtttatttattaattcatcctttcactaatagtaattaaataatgttacaaaaacttaagaacaagaaatactgtatagctctctataggatcatctctcacagtgattttatcattaatcatttttaattttataaatattagataatcaacataatgtttcatggcaatgccataattacccctggaccatggttaaccttttggattatctgtaatgttcttaataaaacaatgactaccccttaaaaacccagaaccaagacaagaactttgactatactcacattggtctccaagcttctaacacacagaggcaaccagaaacctcatgaccatggaagggtgcttaagtcaacttgagggtgttcattgtgagagtacaaagcaaaaaagataaaaagatggaaatattctgtccatttatccacacatttctcctttcattctattagtcatgtaagtatgtgtgaaactattttttcttgagaaaacaaacaaccatgaacatggtcctgacccaaatgacctcacatacgttattattatttttactgtatatgccatcctgcagcaagcgagtaatacctctgagtcatttatttgttaatagaaagaagacctcagtgtttttaataaatgtgaatagtatttcttatttcaccatatatttccataattggacaacgcctatttttatctttatgcagttaaaatatatttgcttattgattcattgatccaattataaaaatagagggaaaatgcatgaacgtgaagaccaagaacaacatcctcaaatattcctaatgtctatccctaggatagaaggtgaagactagattttttattatattggacctcagacttccagacctgtattcaccgtcaatgactcatacgccaccagtcatcatcataggtccaagattgactctatctttcttcattcatgtctatctacattcgttttttgattaatcaattcattaatagtgctgtaatcataaaataaatagctatgaatagggaagtcttaagaataaatttgtacttaggtagtgaataataaaaatgcttgaccttatttgattatattttagacttcttaagaatacagagaatacccttaaaacaaaacaagaattttaactactactcacaagagtcttcctgtgacacacggaggtaactgtacagttcacggtcattgcacagtgattaaatcagatggggctgttcattctgaggaatacaaagcagaccagatgataaacactgataacttgtcttcagtcacctttgtattaccctttcattttcacagtagtttaggtatttattaatctgtgataatatttacatatttttcttttaaaaaattaacaaacttgaacttgaactgatccagaacaataatattgactatttcttatatgcagtgtcttaagacccttagacaaagtagcatgcttgatacatgtatttcttgagacgtcagtgttttccatttatattagtagtttttcttgcctaatcacatttattcataggcgaacaatgcttcagtctcgttttttacttgtttatatgcttgtttgttggatttgtcattgatctctttataataataaaatcaaaatttactaacaaaatccttgatattagacttaagaacttaagacaattactaacagcagcctatgtcctccctactcacacaggtggccatcaaaaccttcatcagtggaaaatgattgcatcagccatcacgcctccattctgtgaagtacaaaagagatgttagaaagaatgaaaccactgtgatttttctttctgtttatggatgtcatgtgttactggattaattgaaattcttgataggtaacagagttttatcatcagcttatgattgcctatgactagctcaaagttaagttttaataaactagtaagtacaataaacctcattcctaaatacaaggaaaagaactatataatgaatacttgtctctatgcccctctcgcatagataacaataatttaggtttacctttaaatgaactgcatttaaatgaaattaatctaaatgattgtttcacagcacagtttcatcaatggtctacggtatcccttatttatgtatacatcagtttgtatacatctgtatctatgtatttgtgtctgtacttccttatggattaattaatcatcattcacatttctaaagaaaatgaacaggttaagaaaaccaacaactaagtactaaaatataatgtttgcatctgtctacgtataaaataccctaagtggacagagccttgaaattctttgtatatctgaacagcaggtaaataaaaaggaacccaggcttcttaacagtcaatgtttggccctctttagtttagttagtgggttaatcttttacttatttatttaatggcttttttcttttaataaaatgaaaaactatgaattcactctataacctgaacaagaacactgactattacaaaaattgcctatattctcctcatccaaagggaaaaaatgcttcatcaagtcctagtgaaagtcagtgtttcagaaatattttttggaatagcaaattcatgctgggcttaatacctaagtgatggattgacaggtgcagcaaaccaccatggcacacatttacctaggtaacaaacctgcatatcctgcacatataccccagaacttaaaataaaattaagatgtaaagaagaaacaaaaaattattatttcattctatatgcccacagtagattcttttcttcttttattctacattagtgcactgattcaatcatcgatatatttataataatataatcaatacctatcaaaaccttaaaacttaaataccatgagtactgccacattgtctgtgggctcatttaccacta

SEQ ID NO: 1885808 - DNA, 4001 bp, Homo sapiens
atgagcagaaagaactggttttcttttctgatggacctcagagttccagacacgtattattcatcatccaagactcatacgccggtatttgtcatcattggtccaggaagggcccactttctcttcatgcaattcgacattatttgttgataaattcagtaattcatgtataataattataaaaattttatggttcacataattcaattctatcaccaatattcgttatatatacatacacattatttgactttttttattttcagtaacatagtaaatatccttaaacaaaccacccaaacaacacaagaacttggctgttactcacactggaatctttcatatcatgacagcaacacaagtcttcatcagggctaaattcataatcagctcagtgcatccattctgaagagtgcaaagtggagaagatgataaaaatattgagacattctttgcatcaatccatacatttcaccattcatttacattgtcactttggcttttattaattaatggtaatatttattaataaaatagacttcaaggttgcaactaactgacagtaataactataacctatcacaatctatgttatttttggtccaagacataacacctttcatccatgcctatattatccattccaatttaaattaaaatccatttttcttaacacgtattttagtaataaacaatgcttcacctccttatcttcttcatttatacactgatttattcatcctgcccttgattcttttacaataatatttttttaaattcatgagcacgaagatcatgaagaagatccttctatatcctgtatcctgacatctatttataagggggaatggaccagatcccattgtattggacctcagagttccagacacatgatattcactgtgcatgactcacacaccaccagtcaccatcactggtccaggatcagccctctttctctattaccatctaaatttgtttgttgactaattcactaacaaggaaatacacctaagtcttcaaaaaaagaatatgattcttgaatatccctaacattcatccatataatcatttccacgaagaccatatttctttcattaactgagctcaatgtttcacatatgcattaattaacctaaagtttttaatccagattttaaatattgcatatttccccttcttttattgtgtttaatactttttaataatatagcaaataacattttaaaatggtcaaaacaagaaggagcattaacgattacccacattggtcttcatgctcctaacacatagatgcagctatagagcttgtaaccatggaatcggctggcaaacatccatcctgaggctcacagaggacggcagatcacaaacagataaaacagtcctccatgatctgtgtttatcatcttccctttaggaaaacatttgagaaatcactatctgaaggataattatttcattttctcttaagaaaatgaacactttgtgcaactttccttgacccagaggttgaccattatctataactaccacctgtatcatccttagtcaaagacgttacagtggggtaccatttatttcccttaggacttcaatgctttaatataatattttaatatgttatcatatttaatatatattaaatattgcattaattatatattaatattagatttttatttaatatattaaagctttaatataatgctttaatataataataataatacatcttgcctcaccacttattttataattggacaatacttcatccccttcatatacgtacatgtatacgtataaattatttcattgatccaattataataatacagtgaagtgaacaaacccaaagaccaaaagcaaacacattgtatattcataggatcacctgaatcagaaggaatgggccagatttcttttgtgatggacctcagagtttcagacatgtattcatcatgtgtaactcatacactaacagtagtcatcattgatcttctttttttttgctattcatttctaccttgtctattgattatgtcatttattcattaataatactttcaaggcccgtgattcacaaaacccagtaacactcttgatattccctatcagtatacagaatcactcaaacattgggtgtttcattaactatcctgttttttatatatgcatcatcaatataatacttcatgtcactcccatatcactggaataacattggccatctttgactgtatttcacacttttaaataatacgttgattactcttaaacaaaccacccaaacaaaggtaaggactttgactattactccccttggtcttcacgctccttcctaagcgtggtgcaaacagagtatgtgaccttggaggcatcctcaaatcagaacaaggacatccattctgatgagtacagagaagagaagatgaaaacaaatttgagacattgtcaccattgtttcttgcttttcacccataattagtcatttatgcaatcgttatttggacttcatattaatttcattttctgttaaggaaatttcatttcattaatcatagtaatttcattttctgttaagaaaatgaacaatttcaatcttgctactggcccagaatctgaacactctctataattatactggctatatcatcattggccaaagaggtgacaggcatgtcccatttatttctctttggacttcatgttttcaatacacatgaaatgtttcttgcctcactacagattttaataattgggcaatgattaacattattcatctttttatataatatatataaattatatatataggttctcacattgagcaactataataatgcaatgaaaataagtaaaaacaaaggccataaacaaataaattctgtatctctgacatctatacacataggatcatttcaaacatacggaaggagctctacttctgtgatggacctcagagttccagacacgtattcatcatgtaagactcatacgccaccagcagtcatcatcgatccaagattgatcacctctttttccactcatttctatcttgttcactgactgacttgttaactcactaataagtctctatggttcaaaaaaaaccccaagaataacctggatgttccatatctgtatctagaatcattctaacattgatatatctgttttattaattgtcttcagtttttcatctatgcattatcagtataatactttatataactctcatatctatcattgggataataacattggccgtctctgtattataaactttttttttttttttttgagatggagtctcactctgtcgcccaggctggagtgcaatgatgcaatctcagctcactgcaacctccgcctcccgggttcaagtgattctcctccctcagcctcctgcgtagctggaattacaggcacccaccaccatacccagctgatttttgtatctttagtagaggcggggtttcaccacgttggccaggctgatctcaaactcctgaccacaggtgattcacccccctcagcctcccaaagtgcttggattacaggcatgagccaccgcacccagcctattacaaacttttttataatacatgacatactcttcaacaaaccaccaagacaagaactttgatcattaatcacatgggtctgcatgctccttcctaagcacggtgcagaggaccatggaagaattcttaaaacagtacaactacgtccattctgaggagtacaaagcagagatgatgataacaaatttgagacattatcaccatttatctttgcctttcacctttcatttagttggtcatttaggcagtaattttctggagtatacttatttcattttctcttaagaaaatgaacaattttgaacttgccactaaccaaaaaattgaacattgtctataattatactaactatgtcatcattgtccaaagaggtgacaggcatgtaccatttatttctctttggacgccactgt

SEQ ID NO: 1885809 - DNA, 4001 bp, Homo sapiens
tgttcatttatacattcatttatttatcctgcccttgattattttacaataatattttttaaatactaacacaaaaatcccgaaaaagatccttgcatatcctgatatctgtccattggatcccttcacaaaggaggaatggactagatcccatttgtgttggacctcagagttctagaaacatggtgttcatgtgtatgactcatatgccaccagtggtcatcactggtccaggatcagccctctttctctattcccatctaaatttgtttatttattaatgtattaacaaagaaatacacaaaaatctgaaaagaaaaataagaattatattctgaatatccctaacatccatctatataatcctttccacacagaccaaatttctttcatcaactgagcttttgcatagatgcattactttttgcatagatgcttcatatcaatgtgatattgaacatgggcagacttctcttatttgattatatttaaaactctaaaataatgcagcaaataccattctaaaaactgctggatttggtataagaacactgattactactcacattggtctgcatgctcctaacacacagatgcaaccacagagctcatgaccatggaagcgtgcttgaatcaactcaagtgcgttcattctgaggatcacagagcagagcaaatgattttaaaaggttgtaacattctttccactggtcctttaattcctctttccagttagtcagtcatacataattagtaatttgtaataatgcttatttttctcctatgtaggctaacaatgtcaatcctgccattgacccagaaactcaacacagatatttacctattactgtctacatcatacttagccaaagatttaacaatcatgtaccatttatttctctttggacttcagagtttccagtacatattaatattacttcttgccacaccatctatttttataattggacaatgcttcacacgaatcatctttatttagttatatatttgttgattcattcttttattgatccaattataataacagaatgaaaatacatgagcagaaagaactggttttcttttctgatggacctcagagttccagacacgtattattcatcatccaagactcatacgccggtatttgtcatcattggtccaggaagggcccactttctcttcatgcaattcgacattatttgttgataaattcagtaattcatgtataataattataaaaattttatggttcacataattcaattctatcaccaatattcgttatatatacatacacattatttgactttttttattttcagtaacatagtaaatatccttaaacaaaccacccaaacaacacaagaacttggctgttactcacactggaatctttcatatcatgacagcaacacaagtcttcatcagggctaaattcataatcagctcagtgcatccattctgaagagtgcaaagtggagaagatgataaaaatattgagacattctttgcatcaatccatacatttcaccattcatttacattgtcactttggcttttattaattaatggtaatatttattaataaaatagacttcaaggttgcaactaactgacagtaataactataacctatcacaatctatgttatttttggtccaagacataacacctttcatccatgcctatattatccattccaatttaaattaaaatccatttttcttaacacgtattttagtaataaacaatgcttcacctccttatcttcttcatttatacactgatttattcatcctgcccttgattcttttacaataatatttttttaaattcatgagcacgaagatcatgaagaagatccttctatatcctgtatcctgacatctatttataagggggaatggaccagatcccattgtattggacctcagagttccagacacatgatattcactgtgcatgactcacacaccaccagtcaccatcactggtccaggatcagccctctttctctattaccatctaaatttgtttgttgactaattcactaacaaggaaatacacctaagtcttcaaaaaaagaatatgattcttgaatatccctaacattcatccatataatcatttccacgaagaccatatttctttcattaactgagctcaatgtttcacatatgcattaattaacctaaagtttttaatccagattttaaatattgcatatttccccttcttttattgtgtttaatactttttaataatatagcaaataacattttaaaatggtcaaaacaagaaggagcattaacgattacccacattggtcttcatgctcctaacacatagatgcagctatagagcttgtaaccatggaatcggctggcaaacatccatcctgaggctcacagaggacggcagatcacaaacagataaaacagtcctccatgatctgtgtttatcatcttccctttaggaaaacatttgagaaatcactatctgaaggataattatttcattttctcttaagaaaatgaacactttgtgcaactttccttgacccagaggttgaccattatctataactaccacctgtatcatccttagtcaaagacgttacagtggggtaccatttatttcccttaggacttcaatgctttaatataatattttaatatgttatcatatttaatatatattaaatattgcattaattatatattaatattagatttttatttaatatattaaagctttaatataatgctttaatataataataataatacatcttgcctcaccacttattttataattggacaatacttcatccccttcatatacgtacatgtatacgtataaattatttcattgatccaattataataatacagtgaagtgaacaaacccaaagaccaaaagcaaacacattgtatattcataggatcacctgaatcagaaggaatgggccagatttcttttgtgatggacctcagagtttcagacatgtattcatcatgtgtaactcatacactaacagtagtcatcattgatcttctttttttttgctattcatttctaccttgtctattgattatgtcatttattcattaataatactttcaaggcccgtgattcacaaaacccagtaacactcttgatattccctatcagtatacagaatcactcaaacattgggtgtttcattaactatcctgttttttatatatgcatcatcaatataatacttcatgtcactcccatatcactggaataacattggccatctttgactgtatttcacacttttaaataatacgttgattactcttaaacaaaccacccaaacaaaggtaaggactttgactattactccccttggtcttcacgctccttcctaagcgtggtgcaaacagagtatgtgaccttggaggcatcctcaaatcagaacaaggacatccattctgatgagtacagagaagagaagatgaaaacaaatttgagacattgtcaccattgtttcttgcttttcacccataattagtcatttatgcaatcgttatttggacttcatattaatttcattttctgttaaggaaatttcatttcattaatcatagtaatttcattttctgttaagaaaatgaacaatttcaatcttgctactggcccagaatctgaacactctctataattatactggctatatcatcattggccaaagaggtgacaggcatgtcccatttatttctctttggacttcatgttttcaatacacatgaaatgtttcttgcctcactacagattttaataattgggcaatgattaacattattcatctttttatataatatatataaattatatatataggttctcacattgagcaactataataatgcaatgaaaataagtaaaaacaaaggccataaacaaataaattctgtatctctgacatctatacacataggatcatttcaaacatacggaaggagctc

SEQ ID NO: 1885810 - DNA, 4001 bp, Homo sapiens
ataaacatactgttctatattatgttaaccattgggccatggttaattttataataatttaaaatttttaataatactgtgaatacctttagacaagtacccaaaggaagacaaaaattttggctattactcacattagtttctttccaaacgcaacagcaatacaggtttccatcaagcagaagcccacttgatgcatccattctgattcatcttcacacaaaccagagaagatgataaaaaatggagaatttctctccactgactgatatattccactattcgtttgtatcatctttttggtttttaataatttatgggaccagggcagtggctcactcctgtaatcccagcactttgggaggctgaggtgggtggatcacctgaggtcaggagttcgagaccaccctggccaacacggtgaaaccccatctctactaaaaacacaaaaattagccaggcgtggtggcgggtgcctgtaatcccagctacttgggaggctgtgacaggggaatcacttgaacccaggaagcggagggtgcagtgagccaagattgtgccactgcactccaacctgggcaacaagagcaaaactccatctcaaagtaataataataataataataatttataggaatatttgcttatttttctctcaataaaatgaacttcaaacatgtaactgagagtaataactattatccatcacagttgactcatctttaatccaagacataataaactcgatccatatattatccattctaacttatactaataatccattttctttattacatattttagcaataaacaatgcttcactctcttcatttctgttcatttatacattcatttatttatcctgcccttgattattttacaataatattttttaaatactaacacaaaaatcccgaaaaagatccttgcatatcctgatatctgtccattggatcccttcacaaaggaggaatggactagatcccatttgtgttggacctcagagttctagaaacatggtgttcatgtgtatgactcatatgccaccagtggtcatcactggtccaggatcagccctctttctctattcccatctaaatttgtttatttattaatgtattaacaaagaaatacacaaaaatctgaaaagaaaaataagaattatattctgaatatccctaacatccatctatataatcctttccacacagaccaaatttctttcatcaactgagcttttgcatagatgcattactttttgcatagatgcttcatatcaatgtgatattgaacatgggcagacttctcttatttgattatatttaaaactctaaaataatgcagcaaataccattctaaaaactgctggatttggtataagaacactgattactactcacattggtctgcatgctcctaacacacagatgcaaccacagagctcatgaccatggaagcgtgcttgaatcaactcaagtgcgttcattctgaggatcacagagcagagcaaatgattttaaaaggttgtaacattctttccactggtcctttaattcctctttccagttagtcagtcatacataattagtaatttgtaataatgcttatttttctcctatgtaggctaacaatgtcaatcctgccattgacccagaaactcaacacagatatttacctattactgtctacatcatacttagccaaagatttaacaatcatgtaccatttatttctctttggacttcagagtttccagtacatattaatattacttcttgccacaccatctatttttataattggacaatgcttcacacgaatcatctttatttagttatatatttgttgattcattcttttattgatccaattataataacagaatgaaaatacatgagcagaaagaactggttttcttttctgatggacctcagagttccagacacgtattattcatcatccaagactcatacgccggtatttgtcatcattggtccaggaagggcccactttctcttcatgcaattcgacattatttgttgataaattcagtaattcatgtataataattataaaaattttatggttcacataattcaattctatcaccaatattcgttatatatacatacacattatttgactttttttattttcagtaacatagtaaatatccttaaacaaaccacccaaacaacacaagaacttggctgttactcacactggaatctttcatatcatgacagcaacacaagtcttcatcagggctaaattcataatcagctcagtgcatccattctgaagagtgcaaagtggagaagatgataaaaatattgagacattctttgcatcaatccatacatttcaccattcatttacattgtcactttggcttttattaattaatggtaatatttattaataaaatagacttcaaggttgcaactaactgacagtaataactataacctatcacaatctatgttatttttggtccaagacataacacctttcatccatgcctatattatccattccaatttaaattaaaatccatttttcttaacacgtattttagtaataaacaatgcttcacctccttatcttcttcatttatacactgatttattcatcctgcccttgattcttttacaataatatttttttaaattcatgagcacgaagatcatgaagaagatccttctatatcctgtatcctgacatctatttataagggggaatggaccagatcccattgtattggacctcagagttccagacacatgatattcactgtgcatgactcacacaccaccagtcaccatcactggtccaggatcagccctctttctctattaccatctaaatttgtttgttgactaattcactaacaaggaaatacacctaagtcttcaaaaaaagaatatgattcttgaatatccctaacattcatccatataatcatttccacgaagaccatatttctttcattaactgagctcaatgtttcacatatgcattaattaacctaaagtttttaatccagattttaaatattgcatatttccccttcttttattgtgtttaatactttttaataatatagcaaataacattttaaaatggtcaaaacaagaaggagcattaacgattacccacattggtcttcatgctcctaacacatagatgcagctatagagcttgtaaccatggaatcggctggcaaacatccatcctgaggctcacagaggacggcagatcacaaacagataaaacagtcctccatgatctgtgtttatcatcttccctttaggaaaacatttgagaaatcactatctgaaggataattatttcattttctcttaagaaaatgaacactttgtgcaactttccttgacccagaggttgaccattatctataactaccacctgtatcatccttagtcaaagacgttacagtggggtaccatttatttcccttaggacttcaatgctttaatataatattttaatatgttatcatatttaatatatattaaatattgcattaattatatattaatattagatttttatttaatatattaaagctttaatataatgctttaatataataataataatacatcttgcctcaccacttattttataattggacaatacttcatccccttcatatacgtacatgtatacgtataaattatttcattgatccaattataataatacagtgaagtgaacaaacccaaagaccaaaagcaaacacattgtatattcataggatcacctgaatcagaaggaatgggccagatttcttttgtgatggacctcagagtttcagacatgtattcatcatgtgtaactcatacactaacagtagtcatcattgatcttctttttttttgctattcatttctaccttgtctattgattatgtcatttattcattaataatactttcaaggcccgtgattcacaaaacccagtaacactcttga

SEQ ID NO: 1885811 - DNA, 4001 bp, Homo sapiens
ttacgatgtttacattaggccttttgtgattatatttcacactttttaataatatactgaacatccttaaacaaaccacccaagccatgacaaaaattttgactcttactcacattggtcttaacagagattcaatcatacagtcataaccatgggagaattcttaaatcagctcagatgggtccagtgtgagaaatacagaacagaatagatgattttaaaatgaagaagaacagacatctgagacgttctctccattaatccttgcttttcacctttagtcagtcatttcagtaatcacacatttagattacttttttctcttaagagaatgaacaaattcaaaatcgccatctatccagaacatgaacagtgtctgtaagttataccatctacaccatcctgagctaaggaggtaagagtcatgtaaaatgtatttcaaattagagtttagtgttttcataatatattagtagtgtttctttgctcactacatatttttaatttgaacaatacttcattaatttatttacttattgattggttatttcactggtccaattataatactagaatgaaaatatatgaacacaaagatcaagcccaagatcctcggatattcccaacatgggcctagaggatgccttatatcaagaatatggactatatgtcttttgtgttggacatcaaagtccagacatgttttactcattgtatatggctcacgccatcattggtctcaattttcactcatttctacctttgttttgaataaatcattaatcaatttataagagtaaaataagaacatgattcacaaaaacctatgaacatgatgccagacataccaagcatctgtctacagaatccttttccacattagacaatgtcgctttcattcattcacctctgtgtggcacattattgattaataaacatactgttctatattatgttaaccattgggccatggttaattttataataatttaaaatttttaataatactgtgaatacctttagacaagtacccaaaggaagacaaaaattttggctattactcacattagtttctttccaaacgcaacagcaatacaggtttccatcaagcagaagcccacttgatgcatccattctgattcatcttcacacaaaccagagaagatgataaaaaatggagaatttctctccactgactgatatattccactattcgtttgtatcatctttttggtttttaataatttatgggaccagggcagtggctcactcctgtaatcccagcactttgggaggctgaggtgggtggatcacctgaggtcaggagttcgagaccaccctggccaacacggtgaaaccccatctctactaaaaacacaaaaattagccaggcgtggtggcgggtgcctgtaatcccagctacttgggaggctgtgacaggggaatcacttgaacccaggaagcggagggtgcagtgagccaagattgtgccactgcactccaacctgggcaacaagagcaaaactccatctcaaagtaataataataataataataatttataggaatatttgcttatttttctctcaataaaatgaacttcaaacatgtaactgagagtaataactattatccatcacagttgactcatctttaatccaagacataataaactcgatccatatattatccattctaacttatactaataatccattttctttattacatattttagcaataaacaatgcttcactctcttcatttctgttcatttatacattcatttatttatcctgcccttgattattttacaataatattttttaaatactaacacaaaaatcccgaaaaagatccttgcatatcctgatatctgtccattggatcccttcacaaaggaggaatggactagatcccatttgtgttggacctcagagttctagaaacatggtgttcatgtgtatgactcatatgccaccagtggtcatcactggtccaggatcagccctctttctctattcccatctaaatttgtttatttattaatgtattaacaaagaaatacacaaaaatctgaaaagaaaaataagaattatattctgaatatccctaacatccatctatataatcctttccacacagaccaaatttctttcatcaactgagcttttgcatagatgcattactttttgcatagatgcttcatatcaatgtgatattgaacatgggcagacttctcttatttgattatatttaaaactctaaaataatgcagcaaataccattctaaaaactgctggatttggtataagaacactgattactactcacattggtctgcatgctcctaacacacagatgcaaccacagagctcatgaccatggaagcgtgcttgaatcaactcaagtgcgttcattctgaggatcacagagcagagcaaatgattttaaaaggttgtaacattctttccactggtcctttaattcctctttccagttagtcagtcatacataattagtaatttgtaataatgcttatttttctcctatgtaggctaacaatgtcaatcctgccattgacccagaaactcaacacagatatttacctattactgtctacatcatacttagccaaagatttaacaatcatgtaccatttatttctctttggacttcagagtttccagtacatattaatattacttcttgccacaccatctatttttataattggacaatgcttcacacgaatcatctttatttagttatatatttgttgattcattcttttattgatccaattataataacagaatgaaaatacatgagcagaaagaactggttttcttttctgatggacctcagagttccagacacgtattattcatcatccaagactcatacgccggtatttgtcatcattggtccaggaagggcccactttctcttcatgcaattcgacattatttgttgataaattcagtaattcatgtataataattataaaaattttatggttcacataattcaattctatcaccaatattcgttatatatacatacacattatttgactttttttattttcagtaacatagtaaatatccttaaacaaaccacccaaacaacacaagaacttggctgttactcacactggaatctttcatatcatgacagcaacacaagtcttcatcagggctaaattcataatcagctcagtgcatccattctgaagagtgcaaagtggagaagatgataaaaatattgagacattctttgcatcaatccatacatttcaccattcatttacattgtcactttggcttttattaattaatggtaatatttattaataaaatagacttcaaggttgcaactaactgacagtaataactataacctatcacaatctatgttatttttggtccaagacataacacctttcatccatgcctatattatccattccaatttaaattaaaatccatttttcttaacacgtattttagtaataaacaatgcttcacctccttatcttcttcatttatacactgatttattcatcctgcccttgattcttttacaataatatttttttaaattcatgagcacgaagatcatgaagaagatccttctatatcctgtatcctgacatctatttataagggggaatggaccagatcccattgtattggacctcagagttccagacacatgatattcactgtgcatgactcacacaccaccagtcaccatcactggtccaggatcagccctctttctctattaccatctaaatttgtttgttgactaattcactaacaaggaaatacacctaagtcttcaaaaaaagaatatgattcttgaatatccctaacattcatccatataatcatttccacgaagaccatatttctttcattaactgagctcaatgtttcacatatgcattaattaacctaaagtttttaatccagattttaaatattgcatatttc

SEQ ID NO: 1885812 - DNA, 4001 bp, Homo sapiens
aaacattgagatgttctctccattgatccacgttgtctaccatttgttaacactgccttttaggcttttattaatttatgctaatatttatatattttgcaagtaataaacttcaaaacttgcaactgaatgagagcaagaactgttacctattacagtctatgtcatccttagtccaagacataatatccttgatcaatttattacccattctatttctattaatattcattttccttactatgaagtttagtaataaacaatgcttcacccccttcatctctattaatttataaatttatttattctgcccttgattcgtttacaataatatttctaaaattcatgaacacaaatatcaacaacaaggtcctcatatattctgacatctgtgcataagatcccttcaaaatggggaatagattacatcccatttgtgttggacctcagagttccagacacgtggtgttcattatgcgtgactcacaccagtagtcataattggtccaggatatctttgatttaacactaatacaaatttatccactgattaatttattaataagaaatccacatcagtcagaaaatacaagaataatattcataaagatttctaacattcatctacagattcatttccacagactaaatctcttcattactgtcttctgtggtaatgaccttctttggtccatatattgaccaatcactataatacatctatcaatctgatagtaaaattggcatgtttgggtctctttggttatatttaacacattttaataatataggaaatatcttttttaaaaagctacaccaacaaagacaagagcattgactattgctcacattggccttcatattctaacacgagatgcagccaacgtgctggtgagcagggatgagagattgaatcacctctaaagcatctgttctgaggagtacagaacaaaacagatgacttaaaaaatgagaaaatcctccattgatccttgcttatcatcttccatttaatcattaattcaggcaatcattacttggagtatatttatttccttttctcttaaaatgaacaattttgaacttgctactgacccagaacaaaaacattatctaattaatactgtccatatcatcctttgccaaaataaaccattatgcaccatttatttctctttgcattttagtgttttctatatatattaacaaaattccttgcctcacaacaagtttttataattagacaatgtttcccccattttaccttgattcacttatatatttgtttactcattctttcattgacccaatcataataataacataagaatgcatgaacagaaagactcgatttcttttgtgaaggacctcagagttccagacacatattcatcatgtatgactcatacgccaccagtggtcatcatcgatccaggattgggcatccttttctccattcatttctatattgtctgttgatttaatcattagttcactaacaataaattaaaaccctatgattcacaaaaccccaagaacagccttgatattattaatctgtacatattaccatctcatctccatgtatctcctgctttaattatcctcagcatttcacacatgtattaatcaatatgatgcttcatatttgtcatttgtaacagcaggccttatgtgattatatttcacactttttagtgatgcagtgaataccttaaaccacctaaaccacaccaagaactttgactattactcacattgatctctaagctgtgacgcacagatgcaatcataaggctggtggccatggaagaatgcataaatcacctcgagattatcactctgaggagtacaaaaaagagaagatgattttttttaaactagatattcctccactgatccttgcttattgaggtgttttgtatgttggacctcagagttctagacacgtattattcatcacccaacactcatacgccggcagttgtcatcattggtccaggaaggcccgctttctcttcattctttactacattgtttattgattaattcataaattcactgataatattttttaaagcctatgattcacaaacctccaacaaaagcataccaatttgttaggtagccatcattattcacatgtcagtatttaaattttatcatttatcctcagtttttcatatatgcattaatcaatataatgattcatattaatcccaaattacgatgtttacattaggccttttgtgattatatttcacactttttaataatatactgaacatccttaaacaaaccacccaagccatgacaaaaattttgactcttactcacattggtcttaacagagattcaatcatacagtcataaccatgggagaattcttaaatcagctcagatgggtccagtgtgagaaatacagaacagaatagatgattttaaaatgaagaagaacagacatctgagacgttctctccattaatccttgcttttcacctttagtcagtcatttcagtaatcacacatttagattacttttttctcttaagagaatgaacaaattcaaaatcgccatctatccagaacatgaacagtgtctgtaagttataccatctacaccatcctgagctaaggaggtaagagtcatgtaaaatgtatttcaaattagagtttagtgttttcataatatattagtagtgtttctttgctcactacatatttttaatttgaacaatacttcattaatttatttacttattgattggttatttcactggtccaattataatactagaatgaaaatatatgaacacaaagatcaagcccaagatcctcggatattcccaacatgggcctagaggatgccttatatcaagaatatggactatatgtcttttgtgttggacatcaaagtccagacatgttttactcattgtatatggctcacgccatcattggtctcaattttcactcatttctacctttgttttgaataaatcattaatcaatttataagagtaaaataagaacatgattcacaaaaacctatgaacatgatgccagacataccaagcatctgtctacagaatccttttccacattagacaatgtcgctttcattcattcacctctgtgtggcacattattgattaataaacatactgttctatattatgttaaccattgggccatggttaattttataataatttaaaatttttaataatactgtgaatacctttagacaagtacccaaaggaagacaaaaattttggctattactcacattagtttctttccaaacgcaacagcaatacaggtttccatcaagcagaagcccacttgatgcatccattctgattcatcttcacacaaaccagagaagatgataaaaaatggagaatttctctccactgactgatatattccactattcgtttgtatcatctttttggtttttaataatttatgggaccagggcagtggctcactcctgtaatcccagcactttgggaggctgaggtgggtggatcacctgaggtcaggagttcgagaccaccctggccaacacggtgaaaccccatctctactaaaaacacaaaaattagccaggcgtggtggcgggtgcctgtaatcccagctacttgggaggctgtgacaggggaatcacttgaacccaggaagcggagggtgcagtgagccaagattgtgccactgcactccaacctgggcaacaagagcaaaactccatctcaaagtaataataataataataataatttataggaatatttgcttatttttctctcaataaaatgaacttcaaacatgtaactgagagtaataactattatccatcacagttgactcatctttaatccaagacataataaactcgatccatatattatccattctaacttatactaataatccattttctttattacatattttagcaataaacaatgcttcactctcttcatttctgttcattt

SEQ ID NO: 1885813 - DNA, 4001 bp, Homo sapiens
tcaccttcaacatagactagatctctttcatttattgacctcaatgttgcacatgagaaattaaacaacatactgtttcagtcatactcattattgagcagtggttaactgtgtattaatttaatactttaaaattttttgattgacagataaaattgcttgtatttatcatgcacaacatgatgttctgaagtatatatacattgtggaataactaaatctatctaactgatatatgtattacatctcagagttatcattttgtgatgagaacacttaacatctactctctagcatttttcaagaatatgatgtataaaatgaactataggcaccatgttgtataatatttctcttgaacttatttctcctctctaactgaataatttaacacattttatagtaataccaagaacatcttcaaacaaattactgaaaccaagataagaactttgactataactcaccttggtctctttccaaacagagggaacacaacaatcttgatcccaacagaatgattcaaagagcttgttgcatccattctgaagagtagaaagcacagaaaaacattgagatgttctctccattgatccacgttgtctaccatttgttaacactgccttttaggcttttattaatttatgctaatatttatatattttgcaagtaataaacttcaaaacttgcaactgaatgagagcaagaactgttacctattacagtctatgtcatccttagtccaagacataatatccttgatcaatttattacccattctatttctattaatattcattttccttactatgaagtttagtaataaacaatgcttcacccccttcatctctattaatttataaatttatttattctgcccttgattcgtttacaataatatttctaaaattcatgaacacaaatatcaacaacaaggtcctcatatattctgacatctgtgcataagatcccttcaaaatggggaatagattacatcccatttgtgttggacctcagagttccagacacgtggtgttcattatgcgtgactcacaccagtagtcataattggtccaggatatctttgatttaacactaatacaaatttatccactgattaatttattaataagaaatccacatcagtcagaaaatacaagaataatattcataaagatttctaacattcatctacagattcatttccacagactaaatctcttcattactgtcttctgtggtaatgaccttctttggtccatatattgaccaatcactataatacatctatcaatctgatagtaaaattggcatgtttgggtctctttggttatatttaacacattttaataatataggaaatatcttttttaaaaagctacaccaacaaagacaagagcattgactattgctcacattggccttcatattctaacacgagatgcagccaacgtgctggtgagcagggatgagagattgaatcacctctaaagcatctgttctgaggagtacagaacaaaacagatgacttaaaaaatgagaaaatcctccattgatccttgcttatcatcttccatttaatcattaattcaggcaatcattacttggagtatatttatttccttttctcttaaaatgaacaattttgaacttgctactgacccagaacaaaaacattatctaattaatactgtccatatcatcctttgccaaaataaaccattatgcaccatttatttctctttgcattttagtgttttctatatatattaacaaaattccttgcctcacaacaagtttttataattagacaatgtttcccccattttaccttgattcacttatatatttgtttactcattctttcattgacccaatcataataataacataagaatgcatgaacagaaagactcgatttcttttgtgaaggacctcagagttccagacacatattcatcatgtatgactcatacgccaccagtggtcatcatcgatccaggattgggcatccttttctccattcatttctatattgtctgttgatttaatcattagttcactaacaataaattaaaaccctatgattcacaaaaccccaagaacagccttgatattattaatctgtacatattaccatctcatctccatgtatctcctgctttaattatcctcagcatttcacacatgtattaatcaatatgatgcttcatatttgtcatttgtaacagcaggccttatgtgattatatttcacactttttagtgatgcagtgaataccttaaaccacctaaaccacaccaagaactttgactattactcacattgatctctaagctgtgacgcacagatgcaatcataaggctggtggccatggaagaatgcataaatcacctcgagattatcactctgaggagtacaaaaaagagaagatgattttttttaaactagatattcctccactgatccttgcttattgaggtgttttgtatgttggacctcagagttctagacacgtattattcatcacccaacactcatacgccggcagttgtcatcattggtccaggaaggcccgctttctcttcattctttactacattgtttattgattaattcataaattcactgataatattttttaaagcctatgattcacaaacctccaacaaaagcataccaatttgttaggtagccatcattattcacatgtcagtatttaaattttatcatttatcctcagtttttcatatatgcattaatcaatataatgattcatattaatcccaaattacgatgtttacattaggccttttgtgattatatttcacactttttaataatatactgaacatccttaaacaaaccacccaagccatgacaaaaattttgactcttactcacattggtcttaacagagattcaatcatacagtcataaccatgggagaattcttaaatcagctcagatgggtccagtgtgagaaatacagaacagaatagatgattttaaaatgaagaagaacagacatctgagacgttctctccattaatccttgcttttcacctttagtcagtcatttcagtaatcacacatttagattacttttttctcttaagagaatgaacaaattcaaaatcgccatctatccagaacatgaacagtgtctgtaagttataccatctacaccatcctgagctaaggaggtaagagtcatgtaaaatgtatttcaaattagagtttagtgttttcataatatattagtagtgtttctttgctcactacatatttttaatttgaacaatacttcattaatttatttacttattgattggttatttcactggtccaattataatactagaatgaaaatatatgaacacaaagatcaagcccaagatcctcggatattcccaacatgggcctagaggatgccttatatcaagaatatggactatatgtcttttgtgttggacatcaaagtccagacatgttttactcattgtatatggctcacgccatcattggtctcaattttcactcatttctacctttgttttgaataaatcattaatcaatttataagagtaaaataagaacatgattcacaaaaacctatgaacatgatgccagacataccaagcatctgtctacagaatccttttccacattagacaatgtcgctttcattcattcacctctgtgtggcacattattgattaataaacatactgttctatattatgttaaccattgggccatggttaattttataataatttaaaatttttaataatactgtgaatacctttagacaagtacccaaaggaagacaaaaattttggctattactcacattagtttctttccaaacgcaacagcaatacaggtttccatcaagcagaagcccacttgatgcatccattctgattcatcttcacacaaaccagagaagatgataaaaaatggagaatttctctccactgactgatatattccac

SEQ ID NO: 1885814 - DNA, 4001 bp, Homo sapiens
attgcattcattgtatttcatgctttttaataatatagtgaataatcttaagataaaagaaatactgaaaccaagaaaagaatgtcagccattactcactttaatctctgtgctcttaatatacagaggcaaccacagagctcgtggccatggaagactgcttaaatcacctgagcgtatccattctaagggtatgaagcagagcaaatgataacaaaattaagaccttatctccattgattcttgattcctgctttctgtatttcatttactaggtcatttaggtatttattatttgttcactgtgtgtgtgtgtgtgtgtgtgtgtgtgtgtgtgtgtatttatcttacgcaaaggaacacttctatcatgagactaacccagaacaataaaatcaactcttacttatcaatttctatattattcttactaaaagtggtaatatcttttatccatttatttgtaaatgaatgtcagtgctttaaattttgattagtaatatttcttgactccacacatatgttcatattggacaatgcttgaccctcttgttctttatacattaatttatattagtttaatggatctatcattgatccaatggtaataataaatatcaatctatggaatcaatacatagatattatctatatattcctgacatttctctgtaagtcaatttcaacagagagaatacactaattatgtgctgtgttggacctcagagtttcagacacatatcattcatcgtccataactccaatgccaccatttgtcatcattggtccatgattgggtctcctctccttcatgggttcctacatttttatcaattaaatgatcatattattgacattaataaaaacaaatacatggttcagacaaaaccaacaaggtctttgaatatctataacatctacagagtcaccttcaacatagactagatctctttcatttattgacctcaatgttgcacatgagaaattaaacaacatactgtttcagtcatactcattattgagcagtggttaactgtgtattaatttaatactttaaaattttttgattgacagataaaattgcttgtatttatcatgcacaacatgatgttctgaagtatatatacattgtggaataactaaatctatctaactgatatatgtattacatctcagagttatcattttgtgatgagaacacttaacatctactctctagcatttttcaagaatatgatgtataaaatgaactataggcaccatgttgtataatatttctcttgaacttatttctcctctctaactgaataatttaacacattttatagtaataccaagaacatcttcaaacaaattactgaaaccaagataagaactttgactataactcaccttggtctctttccaaacagagggaacacaacaatcttgatcccaacagaatgattcaaagagcttgttgcatccattctgaagagtagaaagcacagaaaaacattgagatgttctctccattgatccacgttgtctaccatttgttaacactgccttttaggcttttattaatttatgctaatatttatatattttgcaagtaataaacttcaaaacttgcaactgaatgagagcaagaactgttacctattacagtctatgtcatccttagtccaagacataatatccttgatcaatttattacccattctatttctattaatattcattttccttactatgaagtttagtaataaacaatgcttcacccccttcatctctattaatttataaatttatttattctgcccttgattcgtttacaataatatttctaaaattcatgaacacaaatatcaacaacaaggtcctcatatattctgacatctgtgcataagatcccttcaaaatggggaatagattacatcccatttgtgttggacctcagagttccagacacgtggtgttcattatgcgtgactcacaccagtagtcataattggtccaggatatctttgatttaacactaatacaaatttatccactgattaatttattaataagaaatccacatcagtcagaaaatacaagaataatattcataaagatttctaacattcatctacagattcatttccacagactaaatctcttcattactgtcttctgtggtaatgaccttctttggtccatatattgaccaatcactataatacatctatcaatctgatagtaaaattggcatgtttgggtctctttggttatatttaacacattttaataatataggaaatatcttttttaaaaagctacaccaacaaagacaagagcattgactattgctcacattggccttcatattctaacacgagatgcagccaacgtgctggtgagcagggatgagagattgaatcacctctaaagcatctgttctgaggagtacagaacaaaacagatgacttaaaaaatgagaaaatcctccattgatccttgcttatcatcttccatttaatcattaattcaggcaatcattacttggagtatatttatttccttttctcttaaaatgaacaattttgaacttgctactgacccagaacaaaaacattatctaattaatactgtccatatcatcctttgccaaaataaaccattatgcaccatttatttctctttgcattttagtgttttctatatatattaacaaaattccttgcctcacaacaagtttttataattagacaatgtttcccccattttaccttgattcacttatatatttgtttactcattctttcattgacccaatcataataataacataagaatgcatgaacagaaagactcgatttcttttgtgaaggacctcagagttccagacacatattcatcatgtatgactcatacgccaccagtggtcatcatcgatccaggattgggcatccttttctccattcatttctatattgtctgttgatttaatcattagttcactaacaataaattaaaaccctatgattcacaaaaccccaagaacagccttgatattattaatctgtacatattaccatctcatctccatgtatctcctgctttaattatcctcagcatttcacacatgtattaatcaatatgatgcttcatatttgtcatttgtaacagcaggccttatgtgattatatttcacactttttagtgatgcagtgaataccttaaaccacctaaaccacaccaagaactttgactattactcacattgatctctaagctgtgacgcacagatgcaatcataaggctggtggccatggaagaatgcataaatcacctcgagattatcactctgaggagtacaaaaaagagaagatgattttttttaaactagatattcctccactgatccttgcttattgaggtgttttgtatgttggacctcagagttctagacacgtattattcatcacccaacactcatacgccggcagttgtcatcattggtccaggaaggcccgctttctcttcattctttactacattgtttattgattaattcataaattcactgataatattttttaaagcctatgattcacaaacctccaacaaaagcataccaatttgttaggtagccatcattattcacatgtcagtatttaaattttatcatttatcctcagtttttcatatatgcattaatcaatataatgattcatattaatcccaaattacgatgtttacattaggccttttgtgattatatttcacactttttaataatatactgaacatccttaaacaaaccacccaagccatgacaaaaattttgactcttactcacattggtcttaacagagattcaatcatacagtcataaccatgggagaattcttaaatcagctcagatgggtccagtgtgagaaatacagaacagaatagatgattttaaaatgaagaagaacagacatctgagacgttctctccattaatccttgcttttcacctttagtcag

SEQ ID NO: 1885815 - DNA, 4001 bp, Homo sapiens
ttgccacagactcagagcatgaacattgtctataatttaaactgtgcatcattagccaaagaggtaaaagtcacataccattaatttctcattgaatttcatattttcaacatatagtaatagtacttcttgccttgccacatatttctatatttggacaatgcctcatctattttatcttgatttacttattttattgatccgattacaataatagaatgaaagtgcatgaaaaaaaatcacttttcttttgtgttggacctcagagttccacacacgtatcatccattatccaagattcatatgccagcaagttttatcattgatccaggagggcccacttttcctcaattcatttctaagttatttattgattaatttaataattataattttaaaactctgtgattcacaaaaatgcaagagatttatatccctaatatgtacttaaaaccattctcacttcaatatctcttatgttaataataattgtagtatttcatgtatacactaaaaaaataatatctcatattaatcccatgcttattactaagctacagctcaccttctttgattatatttcacactttttaataatacagtgactgcccataaacaaactatgcaaaacaagataagaactttagctattacattgttctctaggctcctaatgcagacatgcaatcaaaaagcttgtgaccaaggaggaattctgaagtcagcttgagtgggtccattctgagaaatataaatcagagaaaacagcgcaaaaaaaaaaaaaaaaaaaaaaaaaaaaaagacatcctctgcatagaatgaaaagaccaaaaccaagatccttgtatattcctgacaactggctacagggtcacttaaaccagagtaaatgagctacatctctttcacattggacctcagaatttcagacatgtattcatcgtatatgactcatacaccaacagtagtcatcactgatctaggattggcccttttgctctattgtcacctacatttgtttattgattaattcattgaatcataaaattatagtattattattcacaaaaactcaagaagagtccttatatccctaatttctatatagaattattctcatatcaacataaatttcattaactatcctattttttatatatgcattaattgatataatatttcatacatctcatatttattactgggttataattgcattcattgtatttcatgctttttaataatatagtgaataatcttaagataaaagaaatactgaaaccaagaaaagaatgtcagccattactcactttaatctctgtgctcttaatatacagaggcaaccacagagctcgtggccatggaagactgcttaaatcacctgagcgtatccattctaagggtatgaagcagagcaaatgataacaaaattaagaccttatctccattgattcttgattcctgctttctgtatttcatttactaggtcatttaggtatttattatttgttcactgtgtgtgtgtgtgtgtgtgtgtgtgtgtgtgtgtgtatttatcttacgcaaaggaacacttctatcatgagactaacccagaacaataaaatcaactcttacttatcaatttctatattattcttactaaaagtggtaatatcttttatccatttatttgtaaatgaatgtcagtgctttaaattttgattagtaatatttcttgactccacacatatgttcatattggacaatgcttgaccctcttgttctttatacattaatttatattagtttaatggatctatcattgatccaatggtaataataaatatcaatctatggaatcaatacatagatattatctatatattcctgacatttctctgtaagtcaatttcaacagagagaatacactaattatgtgctgtgttggacctcagagtttcagacacatatcattcatcgtccataactccaatgccaccatttgtcatcattggtccatgattgggtctcctctccttcatgggttcctacatttttatcaattaaatgatcatattattgacattaataaaaacaaatacatggttcagacaaaaccaacaaggtctttgaatatctataacatctacagagtcaccttcaacatagactagatctctttcatttattgacctcaatgttgcacatgagaaattaaacaacatactgtttcagtcatactcattattgagcagtggttaactgtgtattaatttaatactttaaaattttttgattgacagataaaattgcttgtatttatcatgcacaacatgatgttctgaagtatatatacattgtggaataactaaatctatctaactgatatatgtattacatctcagagttatcattttgtgatgagaacacttaacatctactctctagcatttttcaagaatatgatgtataaaatgaactataggcaccatgttgtataatatttctcttgaacttatttctcctctctaactgaataatttaacacattttatagtaataccaagaacatcttcaaacaaattactgaaaccaagataagaactttgactataactcaccttggtctctttccaaacagagggaacacaacaatcttgatcccaacagaatgattcaaagagcttgttgcatccattctgaagagtagaaagcacagaaaaacattgagatgttctctccattgatccacgttgtctaccatttgttaacactgccttttaggcttttattaatttatgctaatatttatatattttgcaagtaataaacttcaaaacttgcaactgaatgagagcaagaactgttacctattacagtctatgtcatccttagtccaagacataatatccttgatcaatttattacccattctatttctattaatattcattttccttactatgaagtttagtaataaacaatgcttcacccccttcatctctattaatttataaatttatttattctgcccttgattcgtttacaataatatttctaaaattcatgaacacaaatatcaacaacaaggtcctcatatattctgacatctgtgcataagatcccttcaaaatggggaatagattacatcccatttgtgttggacctcagagttccagacacgtggtgttcattatgcgtgactcacaccagtagtcataattggtccaggatatctttgatttaacactaatacaaatttatccactgattaatttattaataagaaatccacatcagtcagaaaatacaagaataatattcataaagatttctaacattcatctacagattcatttccacagactaaatctcttcattactgtcttctgtggtaatgaccttctttggtccatatattgaccaatcactataatacatctatcaatctgatagtaaaattggcatgtttgggtctctttggttatatttaacacattttaataatataggaaatatcttttttaaaaagctacaccaacaaagacaagagcattgactattgctcacattggccttcatattctaacacgagatgcagccaacgtgctggtgagcagggatgagagattgaatcacctctaaagcatctgttctgaggagtacagaacaaaacagatgacttaaaaaatgagaaaatcctccattgatccttgcttatcatcttccatttaatcattaattcaggcaatcattacttggagtatatttatttccttttctcttaaaatgaacaattttgaacttgctactgacccagaacaaaaacattatctaattaatactgtccatatcatcctttgccaaaataaaccattatgcaccatttatttctctttgcattttagtgttttctatatatattaacaaaattccttgcctcacaacaagtttttataattagacaatgtttcccccattttaccttgattcacttatatatttgtttactcattctt

SEQ ID NO: 1885816 - DNA, 4001 bp, Homo sapiens
ctgcactccagcctgagcaacagagagagactccatctcaaaaaaaaaaaaaaatgcatgaacacaaagattcttgtatatcactgacaccaacttactgcaccttgtaaagagaggaaatgaatgcatactcgcaatggtttgtgtgctcctaacacagagaaccaaccatagtgcacatgccatggaagagtgcttatatcagctggaatggggccattctgaggagtataaacagaacagatgatttaaaaattcagacattcctccaatgatccttgcctttcacctttcatttagtcacttaaatcatcattatttggaatatatttatttcatattctcttaaaacaaacgactctgaacttgccactaacaaagacacttactattcatcacctttaactcatacaccaccagtcatcatcattggtccagaaatggcccatcttttcttcatttgtttctgcattgtttattgattaattcagcaatttactaataatatgtttaaagtgctataatgcacaaaacctgaaaaaagcctcgatgtccctaatatgtgtatagaatcattctcaggtcaatgtaactcctttactaaatatcctcagttttcttaaatgaattaattcaatgaattaatcaatatactacttcatatggatttcatgtttgtcactgggctgcagttggccttcttttatatattgtataatttttaatactgtagtaactatcctttaaaaaagcactcaagccaagaacattgactattacttacagtggcctccaagctcctaacacacagatgcaactgtacagcctgagggcatgaaggagtgcttgagacaactcaggtgagcccattctaaggtgtacaaagtaggactgttgataaaaaatttgagaccttatggcaatggttccctgctttgtgtctaccgtttagccagtaattaaggcaaacattcattgggaggatattacattttctctaaaaatgaacaacttcaaatttgccacagactcagagcatgaacattgtctataatttaaactgtgcatcattagccaaagaggtaaaagtcacataccattaatttctcattgaatttcatattttcaacatatagtaatagtacttcttgccttgccacatatttctatatttggacaatgcctcatctattttatcttgatttacttattttattgatccgattacaataatagaatgaaagtgcatgaaaaaaaatcacttttcttttgtgttggacctcagagttccacacacgtatcatccattatccaagattcatatgccagcaagttttatcattgatccaggagggcccacttttcctcaattcatttctaagttatttattgattaatttaataattataattttaaaactctgtgattcacaaaaatgcaagagatttatatccctaatatgtacttaaaaccattctcacttcaatatctcttatgttaataataattgtagtatttcatgtatacactaaaaaaataatatctcatattaatcccatgcttattactaagctacagctcaccttctttgattatatttcacactttttaataatacagtgactgcccataaacaaactatgcaaaacaagataagaactttagctattacattgttctctaggctcctaatgcagacatgcaatcaaaaagcttgtgaccaaggaggaattctgaagtcagcttgagtgggtccattctgagaaatataaatcagagaaaacagcgcaaaaaaaaaaaaaaaaaaaaaaaaaaaaaagacatcctctgcatagaatgaaaagaccaaaaccaagatccttgtatattcctgacaactggctacagggtcacttaaaccagagtaaatgagctacatctctttcacattggacctcagaatttcagacatgtattcatcgtatatgactcatacaccaacagtagtcatcactgatctaggattggcccttttgctctattgtcacctacatttgtttattgattaattcattgaatcataaaattatagtattattattcacaaaaactcaagaagagtccttatatccctaatttctatatagaattattctcatatcaacataaatttcattaactatcctattttttatatatgcattaattgatataatatttcatacatctcatatttattactgggttataattgcattcattgtatttcatgctttttaataatatagtgaataatcttaagataaaagaaatactgaaaccaagaaaagaatgtcagccattactcactttaatctctgtgctcttaatatacagaggcaaccacagagctcgtggccatggaagactgcttaaatcacctgagcgtatccattctaagggtatgaagcagagcaaatgataacaaaattaagaccttatctccattgattcttgattcctgctttctgtatttcatttactaggtcatttaggtatttattatttgttcactgtgtgtgtgtgtgtgtgtgtgtgtgtgtgtgtgtgtatttatcttacgcaaaggaacacttctatcatgagactaacccagaacaataaaatcaactcttacttatcaatttctatattattcttactaaaagtggtaatatcttttatccatttatttgtaaatgaatgtcagtgctttaaattttgattagtaatatttcttgactccacacatatgttcatattggacaatgcttgaccctcttgttctttatacattaatttatattagtttaatggatctatcattgatccaatggtaataataaatatcaatctatggaatcaatacatagatattatctatatattcctgacatttctctgtaagtcaatttcaacagagagaatacactaattatgtgctgtgttggacctcagagtttcagacacatatcattcatcgtccataactccaatgccaccatttgtcatcattggtccatgattgggtctcctctccttcatgggttcctacatttttatcaattaaatgatcatattattgacattaataaaaacaaatacatggttcagacaaaaccaacaaggtctttgaatatctataacatctacagagtcaccttcaacatagactagatctctttcatttattgacctcaatgttgcacatgagaaattaaacaacatactgtttcagtcatactcattattgagcagtggttaactgtgtattaatttaatactttaaaattttttgattgacagataaaattgcttgtatttatcatgcacaacatgatgttctgaagtatatatacattgtggaataactaaatctatctaactgatatatgtattacatctcagagttatcattttgtgatgagaacacttaacatctactctctagcatttttcaagaatatgatgtataaaatgaactataggcaccatgttgtataatatttctcttgaacttatttctcctctctaactgaataatttaacacattttatagtaataccaagaacatcttcaaacaaattactgaaaccaagataagaactttgactataactcaccttggtctctttccaaacagagggaacacaacaatcttgatcccaacagaatgattcaaagagcttgttgcatccattctgaagagtagaaagcacagaaaaacattgagatgttctctccattgatccacgttgtctaccatttgttaacactgccttttaggcttttattaatttatgctaatatttatatattttgcaagtaataaacttcaaaacttgcaactgaatgagagcaagaactgttacctattacagtctatgtcatccttagtccaagacataatatccttgatcaatttattacccattctatttctattaatattcattttccttactatgaagtttagtaataaacaatgcttcacccccttca

SEQ ID NO: 1885817 - DNA, 4001 bp, Homo sapiens
atcaccattagtctaagacaaaatacacttgttccaatttatattaatactatttttccctcctgtatattttaacaatgagcacgctttaccaccttgatgtttattcattatgtgtttgtttgtctactctatcagtgattccttacaattttcaagaatccatgaacacagccaggcgtggtggcttatgcctgtaatcccagcactttgggaggtcaaggtgggtggatcacaaggtcaggagttcaagaccagcctgggcaacatggtgaaaccccatctgtactggctaattttactacagtattaaaaattatacaatatattaaagaaggccaactgcagcccagtgacaaacatgaaattgatatgaagtagtatattgattaattcattgaattaattcatttaagaaaactgaggatatttagtaaaggaggtacattgacctgagaatgattctatacacatattagggacatcaagacttttttcaggttttgtgcattaaagcactttaaacatattattagtaaattgctgaattaatcaataaacaatgtagaaacgaatgaagaaaagataggccatttctggaccaatgatgatgcctgggaggcagaggttgcagtgagccaagatcacaccactgcactccagcctgagcaacagagagagactccatctcaaaaaaaaaaaaaaatgcatgaacacaaagattcttgtatatcactgacaccaacttactgcaccttgtaaagagaggaaatgaatgcatactcgcaatggtttgtgtgctcctaacacagagaaccaaccatagtgcacatgccatggaagagtgcttatatcagctggaatggggccattctgaggagtataaacagaacagatgatttaaaaattcagacattcctccaatgatccttgcctttcacctttcatttagtcacttaaatcatcattatttggaatatatttatttcatattctcttaaaacaaacgactctgaacttgccactaacaaagacacttactattcatcacctttaactcatacaccaccagtcatcatcattggtccagaaatggcccatcttttcttcatttgtttctgcattgtttattgattaattcagcaatttactaataatatgtttaaagtgctataatgcacaaaacctgaaaaaagcctcgatgtccctaatatgtgtatagaatcattctcaggtcaatgtaactcctttactaaatatcctcagttttcttaaatgaattaattcaatgaattaatcaatatactacttcatatggatttcatgtttgtcactgggctgcagttggccttcttttatatattgtataatttttaatactgtagtaactatcctttaaaaaagcactcaagccaagaacattgactattacttacagtggcctccaagctcctaacacacagatgcaactgtacagcctgagggcatgaaggagtgcttgagacaactcaggtgagcccattctaaggtgtacaaagtaggactgttgataaaaaatttgagaccttatggcaatggttccctgctttgtgtctaccgtttagccagtaattaaggcaaacattcattgggaggatattacattttctctaaaaatgaacaacttcaaatttgccacagactcagagcatgaacattgtctataatttaaactgtgcatcattagccaaagaggtaaaagtcacataccattaatttctcattgaatttcatattttcaacatatagtaatagtacttcttgccttgccacatatttctatatttggacaatgcctcatctattttatcttgatttacttattttattgatccgattacaataatagaatgaaagtgcatgaaaaaaaatcacttttcttttgtgttggacctcagagttccacacacgtatcatccattatccaagattcatatgccagcaagttttatcattgatccaggagggcccacttttcctcaattcatttctaagttatttattgattaatttaataattataattttaaaactctgtgattcacaaaaatgcaagagatttatatccctaatatgtacttaaaaccattctcacttcaatatctcttatgttaataataattgtagtatttcatgtatacactaaaaaaataatatctcatattaatcccatgcttattactaagctacagctcaccttctttgattatatttcacactttttaataatacagtgactgcccataaacaaactatgcaaaacaagataagaactttagctattacattgttctctaggctcctaatgcagacatgcaatcaaaaagcttgtgaccaaggaggaattctgaagtcagcttgagtgggtccattctgagaaatataaatcagagaaaacagcgcaaaaaaaaaaaaaaaaaaaaaaaaaaaaaagacatcctctgcatagaatgaaaagaccaaaaccaagatccttgtatattcctgacaactggctacagggtcacttaaaccagagtaaatgagctacatctctttcacattggacctcagaatttcagacatgtattcatcgtatatgactcatacaccaacagtagtcatcactgatctaggattggcccttttgctctattgtcacctacatttgtttattgattaattcattgaatcataaaattatagtattattattcacaaaaactcaagaagagtccttatatccctaatttctatatagaattattctcatatcaacataaatttcattaactatcctattttttatatatgcattaattgatataatatttcatacatctcatatttattactgggttataattgcattcattgtatttcatgctttttaataatatagtgaataatcttaagataaaagaaatactgaaaccaagaaaagaatgtcagccattactcactttaatctctgtgctcttaatatacagaggcaaccacagagctcgtggccatggaagactgcttaaatcacctgagcgtatccattctaagggtatgaagcagagcaaatgataacaaaattaagaccttatctccattgattcttgattcctgctttctgtatttcatttactaggtcatttaggtatttattatttgttcactgtgtgtgtgtgtgtgtgtgtgtgtgtgtgtgtgtgtatttatcttacgcaaaggaacacttctatcatgagactaacccagaacaataaaatcaactcttacttatcaatttctatattattcttactaaaagtggtaatatcttttatccatttatttgtaaatgaatgtcagtgctttaaattttgattagtaatatttcttgactccacacatatgttcatattggacaatgcttgaccctcttgttctttatacattaatttatattagtttaatggatctatcattgatccaatggtaataataaatatcaatctatggaatcaatacatagatattatctatatattcctgacatttctctgtaagtcaatttcaacagagagaatacactaattatgtgctgtgttggacctcagagtttcagacacatatcattcatcgtccataactccaatgccaccatttgtcatcattggtccatgattgggtctcctctccttcatgggttcctacatttttatcaattaaatgatcatattattgacattaataaaaacaaatacatggttcagacaaaaccaacaaggtctttgaatatctataacatctacagagtcaccttcaacatagactagatctctttcatttattgacctcaatgttgcacatgagaaattaaacaacatactgtttcagtcatactcattattgagcagtggttaactgtgtattaatttaatactttaaaattttttgattgacagataaaattgcttgtatttatcatgcacaacatgatgttctgaagt

SEQ ID NO: 1885818 - DNA, 4001 bp, Homo sapiens
ttcagaatggaaatgttttctctcataacaaaaggaacaatgtcaaatgagacttaaccagaaaatgaaactgactcttacttattaagagtctagatgaaccttagccaaagagctgatactcatgatccatttcttttttttttttttttttttttttttttttgagacggagtctcgctctgtcgcccaggctggagtgcagtggcgggactcatgatccatttctttaaggggcatctgtgtttaaaatttttagtgataatatttcttacatcatcatgtatattcataattgaacaatgattcacctttatttattcttgtttaattgttctatcatttatctattgatgatgaacctcaatctattaatccaaagtaagaatatgatctttgcacatttctgatatctatccaattatgttttctgttggacctcagagtttcagacacgtagtattcatcgtccatgactcaaacgccaccagtggtcatcattggtccatgtttagtagaggtggggtttcaccattttggccagactggtcttgaactcctgacctgaggtgatccacccacctcggcctcccaaagtgctgggattacaggcatgagccaccacacccggccagggagacagttctaataactacttcaagtccttttctgctaatgctcacatctgtataagttctgggttggttttgattaattcattagtctcttaattgtgggttgtgtattttttgcccctttgaatgcctggtaaatttgcagatgtgaattttaccctgcttgtgtgctggatatatacgtatttctaaaaatgtccttgagctttgttctgggatacagttaatctacctggaaagagtttgatccttttggatcttgtttttaccatccattaggtctgaagcagcatttaatctggggttaattatttcccccatggaggcactcgcttcttgagaaacctctccaatgccctgtgaggatgagcatttccaggctgcttggtggaaatggacactagtcccccctcacatgaacactgggcgctggtctccctaattttttggacagtataagatttttttcttttttctttttattgatgataataaaataaccatgaagcacaaaaacctagatcatgaatgagcctgaaatagtcctgcatctctatatagaatcactttctctcttttattaatcatcctcaaaggtgattaatcaatataatgtttcatatcaattccatatttatcactgagccatggctggctttcttggattatatttcatacttttcaaataaagagtgtatgtccacaaaaactcatatttttttccatgcgccaaacatacagaggcagctatacatcttgtgaccaccaaagaatgtttaaatcagctccagtgcatccattctaaggagtacaaagcagagcatttgattaaaagaaaattaggactttatcttaattgaatcttactccccacatttaatttactcattcacttaggtgtttattaactttttgtagtttatatattttctagacaaaacatacaacctccacttggtttgaaccacagtaataaagttgactattatttatcagtgtctatatgatcattaagggtaacactttgatccacttatttcttaatgggaatagtgttttcaacatttattattaatatttcttgcctgaccacatatattgatacttgaataaagcttcaccatctatagtacaataaatcatacttattgatttatatattaatttaatgcttccatcattgatttacttataagaatgctatcaaatacatattaggaatatacaaagattttgcccttttattttggatttccatcagagtaattagactaaattttttattgtgttggacctcagatttccagatacaaactgttattcaacctcactgactcataccccaacagtcattatcattggtcccaagcttgggcctcttttatctcattcatctctacatttctttactggttaatttatcagtaaactaatcatattaaagtaaatatctacctatctaaaacgcttatgaacaaaatcccaaaacccttgagaacaagatgacttaagtatccctaacaccagtctataaagtcatttaccatgtttttttcattaatcatccacagtgttataaatatggattaatcaacatgtttcatgtccaccacatactttccactgggtcatgggtggctttctttggttatttaaaaatttatagtgaatcttttaaaatctaccctaaacaaatataaaaatatgacaagaagattgactcttacttctattagtgtccaggctcctacccagaggcaactgtggagaacgcgatcacagcagaaggcctgtaagtacaaagcagtgcagataaagaaaataaaaatggagacattattttcctcgatctatgcatgtcacctttcatttagccaatcatttagacatttaaaattttcacttaatatttattaattttttaagaaaacaaacaacattgatcttgacactgacacaaatcaagagcgtttctttgtatattgactatttcataatagactctattgttttcaatatatatgaatagtttcttttatctactcatacaatttttgtaattggacagtacttcacttattcagatttatttatatttgtttattaattattttatctatctatattatttatatcctctatatcatccttagctagaggtaacacatttgaaacatttatttcttaacagactttttccatatatatataaatggcttctcgtttccctacatagtttcataattgtacgatgatttcattactcatgtgtgtttctattgctttattgattctttcattgatctatttataataatagaatcaaaatccattaatgcaaaaaccaagaacatgagccttgtgtattcttaaatctgtctatagggtatggtattttcaacagaggcagagtcatcattgactgaagactggccctcctcttctccattacttctacatttgtttatttattaattcatcctttcactaatagtaattaaataatgttacaaaaacttaagaacaagaaatactgtatagctctctataggatcatctctcacagtgattttatcattaatcatttttaattttataaatattagataatcaacataatgtttcatggcaatgccataattacccctggaccatggttaaccttttggattatctgtaatgttcttaataaaacaatgactaccccttaaaaacccagaaccaagacaagaactttgactatactcacattggtctccaagcttctaacacacagaggcaaccagaaacctcatgaccatggaagggtgcttaagtcaacttgagggtgttcattgtgagagtacaaagcaaaaaagataaaaagatggaaatattctgtccatttatccacacatttctcctttcattctattagtcatgtaagtatgtgtgaaactattttttcttgagaaaacaaacaaccatgaacatggtcctgacccaaatgacctcacatacgttattattatttttactgtatatgccatcctgcagcaagcgagtaatacctctgagtcatttatttgttaatagaaagaagacctcagtgtttttaataaatgtgaatagtatttcttatttcaccatatatttccataattggacaacgcctatttttatctttatgcagttaaaatatatttgcttattgattcattgatccaattataaaaatagagggaaaatgcatgaacgtgaagaccaagaacaacatcctcaaatattcctaatgtctatccctaggatagaaggtgaagactagattttttattatattggacctcagacttccagacctgtattcaccgtcaatgactcatacgc

SEQ ID NO: 1885819 - DNA, 4001 bp, Homo sapiens
atctgtgatggacctcagagttccaaacacgtattcatcacatatgactcatacgccaccggtagtcatcatcgatccagaatgtgtcctatttttctctgggcacttttaccttgtctaatgattaattcattaatttgctaatagtaatttgaaaacctttggttcacaaacgcctcagaacagcattaatattaatattctttatctgcatatagaatcattctcacactgataaatgtttcattaattatcctcagtttttcaaacatgtattgttaatataacgcttcatatcactcccatttctatcactgggctgcagctggccatttttgattacagtgcagactttttaataatacatcaaatcctcctaacccaaccacccaaactaagaccagaacttgattactcacgtaggtctgcgtgctcccaatcaagaggcagacacagcatgtcaccagggaggaatccttccatcagcacaagccatctattctgaggaatacaaagcagagacggtaacaaaactgagacattctcactaatgatccttgcttttcaccttgcctttagcctgtcctttaagcattcattaggtggactaatatttatttcattttctcctaagaaaaagaacaatttgatcttgcaagtgaataagaatttgaacattatctgtaatttattctgtctacattattataagccaaagaagtaacaggtatgtacaatatctctttgtacttcaccgatttcaatatacattaatagtatttcttgctcaacacatatttttatagttgtacactgttcacgcattttatctttatttatatgtttattgattcttgcattagaatgaaaatgaaaccaaaacaacttcattctatattcctgacatcagtctatagattcatgtaaaacagagggaatggactaggtatcttttgtggtggacctcagagttccagacacgtattcatcacatatgactcatacgccaccagtggtcatcattgatccaggaatggccctccttttttctattcagttttacattgtctgttggttgcctcattaaatcactaataataatttcaaagcctatgattcaaaaaactccaagaacagccttgatatttctgatctgtatccagaatcattctaacattgatattatctgtttcattaattatcctcagtattatattaatacttcatgtcactgccatgtctaccatcgggataacattgaccatctttgactgtatttcacactttttaataatacattgattactcttaaacaaaccacaataaggactttgaccattacacattggtctgcacgctccttcctaagcacggtgcaaacagagcatgtgaccctagaggaattctcaagacagaacaaggatgtccgttctgaggagtacagcgcaaagaagatgataacaaatttgacatattatcaccattgatccttgcttttcacatttctttagtcatttaggctaccattatttagagtacagtatatttatttcactttgtcttaaaaagatgaacaattctgaatttgccactgacccagaataaaaacactgtctataattatcctctctatatcatcattagccaaagaggtgacagacacgtaccatttattcctccttgaacttcactatttccaatacatattaatagtatttcttgtctcaccacctatttttataattgagcaacacttcaaccaatatatctttatttttatatttgtttattgattctcacattaacccaataataaaaatagaatgaaaatgtatgagcacaaagaccaaaaacaaacccagtctatgttcatgatacccatctaaaggattgtatcaaacatagaaaatgggctagatttcttttgtgacagacctcagagttccagagacgtattcactgtagatgactcatacgccaccagtagtcatcatcgatccacaggacaggtgctctttctctccactcacttctaattgcttattaatgatttattaatccactgaccataaattttaaaatcatggttcatgaaatcccagtaagaacctagagattcctaatccctacaatgaatcattctaatatggatacagctgtttcattcactatcctcagtttttcatagatgcattatcaatacaatgcttcacatgagtcccacatttattgctagaatactactcgacatctttgattatagtatgcacttttttagtaattcattgagtattttgaaataaccactcaaaccaagagaagaattttaatgattactcacattggtctctatgctactaacaaatagatgcaatcacagaagaaagatgcaaggaggaatgtttcaatcggctcaagtgcacccattctgaggaaaacaaagcagagtcagtattttaaaaaacagacacctcatcctctataattcttgctttctgcatttcatttacttaatcattcaggtacttcataattttccatgaagtatatgttttttctcttaacgaaagggacaacctcaaacttagaggaactggttcagaacaataaaattgattcttactcttagtgtctatatgatcttaagccaaagaaagaaggaacatctttgatccaatatattcttaatggatgtcagttgtctctacttgtattaataatcttgattgccccactatatacttttatagctgaacagagctgcactctcttcaattttatctatctacttatatttgttcaatggtcctatcatgaattccctaatattaacaaatctaatctatgaatctaaaataagaacatggtctttatatatcccaaacatctgtctgtaggattattccaaacagaaggaatagactaaatacgttttgcgttgatgctcagagttccacacacatattactcatagtttatgactcctgcactactatttgttatcgttgttctatgcatactcattggccaggtttttcttcactcaatcttacatttgcagagaatgaatcactaattcactgaaaatgagtgagtcagaaaaatgcaaaaataaaatgctagaatagtgctaacagctatcaatacaaccatttcccatacacattccatctttttcacttaatgatgtcaacattagggattaatcaacatcatatttcacattatacttgttattgggccataaataactatttgattaatactttttaataataccatgaatactctcaagcaaataactgaaaccaagacaagaacatagactatattcacattggtctctttttgaacggagttaacatgagaaacttgatcgttgttgcagagtgctcaaatcagctaattgcatctgcactgaagggtgctaggtggagataatgataaaaagattgagatattttgtctgttgatctataatttctttctttcattcacctagtcatttaggtatttattaatttatggtaatatttatttatttttcttcttataaacttcaaacttgtaattgacttggggcaataactggctattacttatcagtaattattaccattgtctctatcatctttagtcagaaatattatacacgtggtccatttattatccattccaatgtacattagcaatattttccttactgcatatttcagcaatgaacaatgctttgtcctcttcatttttatttgttttattttatttgtacatgtatttgcttattctgctattgccacttttacaatctttttaaacctcatgctcacaagactaatcacaaactccttgtatatttccggtatctgtctattacatcactttaaacacgggaatgaactagattctatttgtgtttggacctcaaagtttcagatatgtaatattcttcatatacaaccagcatgtacaaccacataagccaccacttgtcatcaacagtc

SEQ ID NO: 1885820 - DNA, 4001 bp, Homo sapiens
aatgtatacatttccattgtgatggacgatggacctcagagttccagacacgtattcattgtctatgactcatacgccaccagtagtcatcatcgatccaggattggtcttccttttctcaattcatgcctgtatttttgtgattaatttactaattcactaataacaacattaaagagtctgattcaaagagctccaagaagagtcttgatattcccaatctgtacatggaatcattctaacatcgatatatctgtttcattaccctcaatttttcatatatgcattatcaatataatgcttcatatcactccaatttctatcacttagatacagttgaccattctgattatattataggctttttgataataccctgagtcctcttaaacaaaccattcgggccaagataagaatgttgattactactcacattgctctgcaggctcccaaccatgataaaaacagagcacgtgaccatgaaggaattctcaaatcataaaaagtgcatcattctgaaaggacagaaagcagagaagataacaaaattgagacattctcaacattgatccttgattttcacctgttattagtcattttggcaatcattatttggattatatttcttttatttattttctcttaataaaatgaacaacttcaaaattaccactgactcagaatatgaacattgtctataatttatactatctatatcatacgccatttatgtctttctagatttcacgatttcaatatgtgttaatagcatttcttgccttaccacaaatttttataattgggcagtgtttcaatcattttctatttattatatatttgtttcctgattctcacattgatccaattataaaaatagaagaaaacttcataatcacacagaaaaaacaaacattctatattttttaaatctgtctgtaacaccattcgaaacagagaataagccagattttatctgtgatggacctcagagttccaaacacgtattcatcacatatgactcatacgccaccggtagtcatcatcgatccagaatgtgtcctatttttctctgggcacttttaccttgtctaatgattaattcattaatttgctaatagtaatttgaaaacctttggttcacaaacgcctcagaacagcattaatattaatattctttatctgcatatagaatcattctcacactgataaatgtttcattaattatcctcagtttttcaaacatgtattgttaatataacgcttcatatcactcccatttctatcactgggctgcagctggccatttttgattacagtgcagactttttaataatacatcaaatcctcctaacccaaccacccaaactaagaccagaacttgattactcacgtaggtctgcgtgctcccaatcaagaggcagacacagcatgtcaccagggaggaatccttccatcagcacaagccatctattctgaggaatacaaagcagagacggtaacaaaactgagacattctcactaatgatccttgcttttcaccttgcctttagcctgtcctttaagcattcattaggtggactaatatttatttcattttctcctaagaaaaagaacaatttgatcttgcaagtgaataagaatttgaacattatctgtaatttattctgtctacattattataagccaaagaagtaacaggtatgtacaatatctctttgtacttcaccgatttcaatatacattaatagtatttcttgctcaacacatatttttatagttgtacactgttcacgcattttatctttatttatatgtttattgattcttgcattagaatgaaaatgaaaccaaaacaacttcattctatattcctgacatcagtctatagattcatgtaaaacagagggaatggactaggtatcttttgtggtggacctcagagttccagacacgtattcatcacatatgactcatacgccaccagtggtcatcattgatccaggaatggccctccttttttctattcagttttacattgtctgttggttgcctcattaaatcactaataataatttcaaagcctatgattcaaaaaactccaagaacagccttgatatttctgatctgtatccagaatcattctaacattgatattatctgtttcattaattatcctcagtattatattaatacttcatgtcactgccatgtctaccatcgggataacattgaccatctttgactgtatttcacactttttaataatacattgattactcttaaacaaaccacaataaggactttgaccattacacattggtctgcacgctccttcctaagcacggtgcaaacagagcatgtgaccctagaggaattctcaagacagaacaaggatgtccgttctgaggagtacagcgcaaagaagatgataacaaatttgacatattatcaccattgatccttgcttttcacatttctttagtcatttaggctaccattatttagagtacagtatatttatttcactttgtcttaaaaagatgaacaattctgaatttgccactgacccagaataaaaacactgtctataattatcctctctatatcatcattagccaaagaggtgacagacacgtaccatttattcctccttgaacttcactatttccaatacatattaatagtatttcttgtctcaccacctatttttataattgagcaacacttcaaccaatatatctttatttttatatttgtttattgattctcacattaacccaataataaaaatagaatgaaaatgtatgagcacaaagaccaaaaacaaacccagtctatgttcatgatacccatctaaaggattgtatcaaacatagaaaatgggctagatttcttttgtgacagacctcagagttccagagacgtattcactgtagatgactcatacgccaccagtagtcatcatcgatccacaggacaggtgctctttctctccactcacttctaattgcttattaatgatttattaatccactgaccataaattttaaaatcatggttcatgaaatcccagtaagaacctagagattcctaatccctacaatgaatcattctaatatggatacagctgtttcattcactatcctcagtttttcatagatgcattatcaatacaatgcttcacatgagtcccacatttattgctagaatactactcgacatctttgattatagtatgcacttttttagtaattcattgagtattttgaaataaccactcaaaccaagagaagaattttaatgattactcacattggtctctatgctactaacaaatagatgcaatcacagaagaaagatgcaaggaggaatgtttcaatcggctcaagtgcacccattctgaggaaaacaaagcagagtcagtattttaaaaaacagacacctcatcctctataattcttgctttctgcatttcatttacttaatcattcaggtacttcataattttccatgaagtatatgttttttctcttaacgaaagggacaacctcaaacttagaggaactggttcagaacaataaaattgattcttactcttagtgtctatatgatcttaagccaaagaaagaaggaacatctttgatccaatatattcttaatggatgtcagttgtctctacttgtattaataatcttgattgccccactatatacttttatagctgaacagagctgcactctcttcaattttatctatctacttatatttgttcaatggtcctatcatgaattccctaatattaacaaatctaatctatgaatctaaaataagaacatggtctttatatatcccaaacatctgtctgtaggattattccaaacagaaggaatagactaaatacgttttgcgttgatgctcagagttccacacacatattactcatagtttatgactcctgcactactatttgttatcgttgttctatgcatactcattggcca

SEQ ID NO: 1885821 - DNA, 4001 bp, Homo sapiens
aaaaattatgttctatatttctgaactctgtctataggatcatttgaaactgaagcaataggccagatttcttctgtgacagacctcagagttccagatacgtactcatcatatgtgagtcatatgccatcaacagtcaccatcgatccaggatggatcatctgtttttcaatttaattctgcctcatttgttgattaattcattaattcattactaataattgtaaatcctatgatttacaaagccctatggagagctgtatacgtctaaataatatgtatacagaatcattctaacacgaatatacctgttttattaattatcctcagcttttcatatatgcattatcaatataatacttcatatcccaccaaatctattattgggatagagttggccatctttaattatattttacacctttttataattcatagaatcctcttaaacaaaatgcacaaagcaagataaagactttgaatattactcacacaggtctgcacactcctttctaagcatgatgcaaacttagctcccaacctcagaggaatcctcaaatcagcaaaggcatgtcccttctgaggtgtacagagcagagaagatgataacaatatgagacattcctactactgatcctggcttttgcaccctgcctctgacccagaacacacatattatctataatttataatgtctataccataattagccaatagatgacaaataataccattatttatcttttgacttcactgtttttaatatataaatagaatatcctgcttcaccagatatttttattattaaactatgtgccattttatttatatcttattgattactttcattgatccaattataaaaatagaataaaaatacacaacccccaagaaaaataactacattctatatttctgaaatctgtctataacatcattttaaacagaaggaatgtatacatttccattgtgatggacgatggacctcagagttccagacacgtattcattgtctatgactcatacgccaccagtagtcatcatcgatccaggattggtcttccttttctcaattcatgcctgtatttttgtgattaatttactaattcactaataacaacattaaagagtctgattcaaagagctccaagaagagtcttgatattcccaatctgtacatggaatcattctaacatcgatatatctgtttcattaccctcaatttttcatatatgcattatcaatataatgcttcatatcactccaatttctatcacttagatacagttgaccattctgattatattataggctttttgataataccctgagtcctcttaaacaaaccattcgggccaagataagaatgttgattactactcacattgctctgcaggctcccaaccatgataaaaacagagcacgtgaccatgaaggaattctcaaatcataaaaagtgcatcattctgaaaggacagaaagcagagaagataacaaaattgagacattctcaacattgatccttgattttcacctgttattagtcattttggcaatcattatttggattatatttcttttatttattttctcttaataaaatgaacaacttcaaaattaccactgactcagaatatgaacattgtctataatttatactatctatatcatacgccatttatgtctttctagatttcacgatttcaatatgtgttaatagcatttcttgccttaccacaaatttttataattgggcagtgtttcaatcattttctatttattatatatttgtttcctgattctcacattgatccaattataaaaatagaagaaaacttcataatcacacagaaaaaacaaacattctatattttttaaatctgtctgtaacaccattcgaaacagagaataagccagattttatctgtgatggacctcagagttccaaacacgtattcatcacatatgactcatacgccaccggtagtcatcatcgatccagaatgtgtcctatttttctctgggcacttttaccttgtctaatgattaattcattaatttgctaatagtaatttgaaaacctttggttcacaaacgcctcagaacagcattaatattaatattctttatctgcatatagaatcattctcacactgataaatgtttcattaattatcctcagtttttcaaacatgtattgttaatataacgcttcatatcactcccatttctatcactgggctgcagctggccatttttgattacagtgcagactttttaataatacatcaaatcctcctaacccaaccacccaaactaagaccagaacttgattactcacgtaggtctgcgtgctcccaatcaagaggcagacacagcatgtcaccagggaggaatccttccatcagcacaagccatctattctgaggaatacaaagcagagacggtaacaaaactgagacattctcactaatgatccttgcttttcaccttgcctttagcctgtcctttaagcattcattaggtggactaatatttatttcattttctcctaagaaaaagaacaatttgatcttgcaagtgaataagaatttgaacattatctgtaatttattctgtctacattattataagccaaagaagtaacaggtatgtacaatatctctttgtacttcaccgatttcaatatacattaatagtatttcttgctcaacacatatttttatagttgtacactgttcacgcattttatctttatttatatgtttattgattcttgcattagaatgaaaatgaaaccaaaacaacttcattctatattcctgacatcagtctatagattcatgtaaaacagagggaatggactaggtatcttttgtggtggacctcagagttccagacacgtattcatcacatatgactcatacgccaccagtggtcatcattgatccaggaatggccctccttttttctattcagttttacattgtctgttggttgcctcattaaatcactaataataatttcaaagcctatgattcaaaaaactccaagaacagccttgatatttctgatctgtatccagaatcattctaacattgatattatctgtttcattaattatcctcagtattatattaatacttcatgtcactgccatgtctaccatcgggataacattgaccatctttgactgtatttcacactttttaataatacattgattactcttaaacaaaccacaataaggactttgaccattacacattggtctgcacgctccttcctaagcacggtgcaaacagagcatgtgaccctagaggaattctcaagacagaacaaggatgtccgttctgaggagtacagcgcaaagaagatgataacaaatttgacatattatcaccattgatccttgcttttcacatttctttagtcatttaggctaccattatttagagtacagtatatttatttcactttgtcttaaaaagatgaacaattctgaatttgccactgacccagaataaaaacactgtctataattatcctctctatatcatcattagccaaagaggtgacagacacgtaccatttattcctccttgaacttcactatttccaatacatattaatagtatttcttgtctcaccacctatttttataattgagcaacacttcaaccaatatatctttatttttatatttgtttattgattctcacattaacccaataataaaaatagaatgaaaatgtatgagcacaaagaccaaaaacaaacccagtctatgttcatgatacccatctaaaggattgtatcaaacatagaaaatgggctagatttcttttgtgacagacctcagagttccagagacgtattcactgtagatgactcatacgccaccagtagtcatcatcgatccacaggacaggtgctctttctctccactcacttctaattgcttattaatgatttattaatccactgaccataaattttaa

SEQ ID NO: 1885822 - DNA, 4001 bp, Homo sapiens
ataatcctcacatcaggcccatgtttatttaaatacaactgctcatctttgattataatatacacctttttgtaacacattgaaccctcttgaacaaaccacccaaagcaaggtgaggacttccactattacttacataggtctccaggctccatcctaaaaatggtgcaagtggagcacatggacttgaaggaatccttcaatcagcaaagtgcaatcattctagggaatacagagcagagaagaggataacaaaagtgagatgttgtcactactgaccctttcttgtcacctatcattagttagtcattttgacaatcattatttgcagtatattcattttatctaaagaaatgcataattctgaaattgtcgttgacccagaaattgaatgttgtctataatttgtactgtctataccatcattagccacagaagtcaccagaagacaccatttatatctctgtggacttcgctgtgtcaaaagatattaagagtgcttctggccggatgctgtggctcacacttgtaatcccaacactttggaaggctgaggtaggcggatcacttgaggtcaggagttcgagaccagcctggccaacatggtgaaaccccgtctctactaaaaatacaaaaaattggcagatgtggtgaagggcgcctgtaatcccaactacttgggaggcgggggcaggagaatcacttgaacccagaaggcagaggttgcagtgagccaagatcatgccactgcactccagcctgggggacagagcgagacactgtcaaaaaaaaaaaaaaaaaaaaaaagagtgcttcttgccttatcatatattgttatacttggccaatgcttccactttttcagctgtatctatttatatatgtgtttattgagccttgcattgaccagttatgaaaatagaatgaaaatacataaacacaaatgccaaaaaaattatgttctatatttctgaactctgtctataggatcatttgaaactgaagcaataggccagatttcttctgtgacagacctcagagttccagatacgtactcatcatatgtgagtcatatgccatcaacagtcaccatcgatccaggatggatcatctgtttttcaatttaattctgcctcatttgttgattaattcattaattcattactaataattgtaaatcctatgatttacaaagccctatggagagctgtatacgtctaaataatatgtatacagaatcattctaacacgaatatacctgttttattaattatcctcagcttttcatatatgcattatcaatataatacttcatatcccaccaaatctattattgggatagagttggccatctttaattatattttacacctttttataattcatagaatcctcttaaacaaaatgcacaaagcaagataaagactttgaatattactcacacaggtctgcacactcctttctaagcatgatgcaaacttagctcccaacctcagaggaatcctcaaatcagcaaaggcatgtcccttctgaggtgtacagagcagagaagatgataacaatatgagacattcctactactgatcctggcttttgcaccctgcctctgacccagaacacacatattatctataatttataatgtctataccataattagccaatagatgacaaataataccattatttatcttttgacttcactgtttttaatatataaatagaatatcctgcttcaccagatatttttattattaaactatgtgccattttatttatatcttattgattactttcattgatccaattataaaaatagaataaaaatacacaacccccaagaaaaataactacattctatatttctgaaatctgtctataacatcattttaaacagaaggaatgtatacatttccattgtgatggacgatggacctcagagttccagacacgtattcattgtctatgactcatacgccaccagtagtcatcatcgatccaggattggtcttccttttctcaattcatgcctgtatttttgtgattaatttactaattcactaataacaacattaaagagtctgattcaaagagctccaagaagagtcttgatattcccaatctgtacatggaatcattctaacatcgatatatctgtttcattaccctcaatttttcatatatgcattatcaatataatgcttcatatcactccaatttctatcacttagatacagttgaccattctgattatattataggctttttgataataccctgagtcctcttaaacaaaccattcgggccaagataagaatgttgattactactcacattgctctgcaggctcccaaccatgataaaaacagagcacgtgaccatgaaggaattctcaaatcataaaaagtgcatcattctgaaaggacagaaagcagagaagataacaaaattgagacattctcaacattgatccttgattttcacctgttattagtcattttggcaatcattatttggattatatttcttttatttattttctcttaataaaatgaacaacttcaaaattaccactgactcagaatatgaacattgtctataatttatactatctatatcatacgccatttatgtctttctagatttcacgatttcaatatgtgttaatagcatttcttgccttaccacaaatttttataattgggcagtgtttcaatcattttctatttattatatatttgtttcctgattctcacattgatccaattataaaaatagaagaaaacttcataatcacacagaaaaaacaaacattctatattttttaaatctgtctgtaacaccattcgaaacagagaataagccagattttatctgtgatggacctcagagttccaaacacgtattcatcacatatgactcatacgccaccggtagtcatcatcgatccagaatgtgtcctatttttctctgggcacttttaccttgtctaatgattaattcattaatttgctaatagtaatttgaaaacctttggttcacaaacgcctcagaacagcattaatattaatattctttatctgcatatagaatcattctcacactgataaatgtttcattaattatcctcagtttttcaaacatgtattgttaatataacgcttcatatcactcccatttctatcactgggctgcagctggccatttttgattacagtgcagactttttaataatacatcaaatcctcctaacccaaccacccaaactaagaccagaacttgattactcacgtaggtctgcgtgctcccaatcaagaggcagacacagcatgtcaccagggaggaatccttccatcagcacaagccatctattctgaggaatacaaagcagagacggtaacaaaactgagacattctcactaatgatccttgcttttcaccttgcctttagcctgtcctttaagcattcattaggtggactaatatttatttcattttctcctaagaaaaagaacaatttgatcttgcaagtgaataagaatttgaacattatctgtaatttattctgtctacattattataagccaaagaagtaacaggtatgtacaatatctctttgtacttcaccgatttcaatatacattaatagtatttcttgctcaacacatatttttatagttgtacactgttcacgcattttatctttatttatatgtttattgattcttgcattagaatgaaaatgaaaccaaaacaacttcattctatattcctgacatcagtctatagattcatgtaaaacagagggaatggactaggtatcttttgtggtggacctcagagttccagacacgtattcatcacatatgactcatacgccaccagtggtcatcattgatccaggaatggccctccttttttctattcagttttacattgtctgttggttgcctcattaaatcactaataataatttcaaagcctatgattcaaaaaactcc

SEQ ID NO: 1885823 - DNA, 4001 bp, Homo sapiens
tgtttcatgatacattgagtcctgtttagcaaaccacacaaaccgacacaggaattttgactattactaacattggtctgcatgcaccttcccaagcatggtgtacaaatggggcgcgtgatcatggaggaatccttaacacagcacaagttgttcattctgaggaatacagaccagagaagataatgacaaaattgagacattttcaatattgatatttgcttttcaactatcagttagtcattcatgcaatcattatttgaagtatatttaattcattttctgaaaataaaatgaataattttgaaactgtcactgacccagaagttgaacattacctatactttattctgtctataccatcattagccaaagaagacacaggaatgtaccgtttatttctctgtggatgtcgctgtttcatatacattaattgtgtttcttatcttgtcccttagtttcataattggacaatgctcgaatttattcatctttatttgtatttgtttattaattctcatatggatcaattataaaaatagaatcaaaacatgtaaacatgaataccaaaaacatatacattctatactcctgacagttgtctgtaaaataatttcaaacatacagaataggctagattttgtttgtgacggacctcagagttctagacacgtattcatcgcaaaagactcatacgccaccagtagtcatcatcgatccaggactgatcttctatttttgggttcgtttcctccttgtctattgactaatctgttaattcactaaccataactttaagccctatgatttacaaaaccacaagaatagccatgatattcctaacatataggaatatttattttattaattatcctcagtttctcatgtatatatcttcaatataatcctcacatcaggcccatgtttatttaaatacaactgctcatctttgattataatatacacctttttgtaacacattgaaccctcttgaacaaaccacccaaagcaaggtgaggacttccactattacttacataggtctccaggctccatcctaaaaatggtgcaagtggagcacatggacttgaaggaatccttcaatcagcaaagtgcaatcattctagggaatacagagcagagaagaggataacaaaagtgagatgttgtcactactgaccctttcttgtcacctatcattagttagtcattttgacaatcattatttgcagtatattcattttatctaaagaaatgcataattctgaaattgtcgttgacccagaaattgaatgttgtctataatttgtactgtctataccatcattagccacagaagtcaccagaagacaccatttatatctctgtggacttcgctgtgtcaaaagatattaagagtgcttctggccggatgctgtggctcacacttgtaatcccaacactttggaaggctgaggtaggcggatcacttgaggtcaggagttcgagaccagcctggccaacatggtgaaaccccgtctctactaaaaatacaaaaaattggcagatgtggtgaagggcgcctgtaatcccaactacttgggaggcgggggcaggagaatcacttgaacccagaaggcagaggttgcagtgagccaagatcatgccactgcactccagcctgggggacagagcgagacactgtcaaaaaaaaaaaaaaaaaaaaaaagagtgcttcttgccttatcatatattgttatacttggccaatgcttccactttttcagctgtatctatttatatatgtgtttattgagccttgcattgaccagttatgaaaatagaatgaaaatacataaacacaaatgccaaaaaaattatgttctatatttctgaactctgtctataggatcatttgaaactgaagcaataggccagatttcttctgtgacagacctcagagttccagatacgtactcatcatatgtgagtcatatgccatcaacagtcaccatcgatccaggatggatcatctgtttttcaatttaattctgcctcatttgttgattaattcattaattcattactaataattgtaaatcctatgatttacaaagccctatggagagctgtatacgtctaaataatatgtatacagaatcattctaacacgaatatacctgttttattaattatcctcagcttttcatatatgcattatcaatataatacttcatatcccaccaaatctattattgggatagagttggccatctttaattatattttacacctttttataattcatagaatcctcttaaacaaaatgcacaaagcaagataaagactttgaatattactcacacaggtctgcacactcctttctaagcatgatgcaaacttagctcccaacctcagaggaatcctcaaatcagcaaaggcatgtcccttctgaggtgtacagagcagagaagatgataacaatatgagacattcctactactgatcctggcttttgcaccctgcctctgacccagaacacacatattatctataatttataatgtctataccataattagccaatagatgacaaataataccattatttatcttttgacttcactgtttttaatatataaatagaatatcctgcttcaccagatatttttattattaaactatgtgccattttatttatatcttattgattactttcattgatccaattataaaaatagaataaaaatacacaacccccaagaaaaataactacattctatatttctgaaatctgtctataacatcattttaaacagaaggaatgtatacatttccattgtgatggacgatggacctcagagttccagacacgtattcattgtctatgactcatacgccaccagtagtcatcatcgatccaggattggtcttccttttctcaattcatgcctgtatttttgtgattaatttactaattcactaataacaacattaaagagtctgattcaaagagctccaagaagagtcttgatattcccaatctgtacatggaatcattctaacatcgatatatctgtttcattaccctcaatttttcatatatgcattatcaatataatgcttcatatcactccaatttctatcacttagatacagttgaccattctgattatattataggctttttgataataccctgagtcctcttaaacaaaccattcgggccaagataagaatgttgattactactcacattgctctgcaggctcccaaccatgataaaaacagagcacgtgaccatgaaggaattctcaaatcataaaaagtgcatcattctgaaaggacagaaagcagagaagataacaaaattgagacattctcaacattgatccttgattttcacctgttattagtcattttggcaatcattatttggattatatttcttttatttattttctcttaataaaatgaacaacttcaaaattaccactgactcagaatatgaacattgtctataatttatactatctatatcatacgccatttatgtctttctagatttcacgatttcaatatgtgttaatagcatttcttgccttaccacaaatttttataattgggcagtgtttcaatcattttctatttattatatatttgtttcctgattctcacattgatccaattataaaaatagaagaaaacttcataatcacacagaaaaaacaaacattctatattttttaaatctgtctgtaacaccattcgaaacagagaataagccagattttatctgtgatggacctcagagttccaaacacgtattcatcacatatgactcatacgccaccggtagtcatcatcgatccagaatgtgtcctatttttctctgggcacttttaccttgtctaatgattaattcattaatttgctaatagtaatttgaaaacctttggttcacaaacgcctcagaacagcattaatattaatattctttatctgcatatagaatcattctc

SEQ ID NO: 1885824 - DNA, 4001 bp, Homo sapiens
ttgatattcctaatccctacatagaatcattataatgttgatatatattttcattcattgttctccatttttcatatatgtgttttcaatatagtacttcctatcactcctctaactgggaaagagttggccgtctttgattacattcctataatatattggaatatattatatatagattatattcctataatatatattttatatataagatattccagtaatatattcctataatgtattacctcttttataatgtattatatcttcctataatgtattttatactacattatattatagaaatatatataatatattcctacaatatattacatttttataatgtattatacgtttttataatacactgaatcctcttaaacaaaccactcaaaccaagacaagagctttgaccattacttactttggtctgtacgctccttcctaagcatggtgcaaacagagcacgtgaccttggaggcatctttaaatcatcacaagtacgtccattctgatgagtgcagagcagagaaaataataacaaaaatgtgatttttctcattgttgatctttcctttttacctatctgtagttaaacatttaggcaatcgttatttgaagtatgaacaactttgaacttgccactaaccaagaacacgaaaatagcatataatttatactatctcttcattattggccaaaaaggttaggtatgttagatttatttttggctttcatcaatttaaatacgtattaaatacacctcatcacacatttttataattggacaatgcataacttatttatttattcatatatgttttattctttcattgaaccaattataaaataaaaactcataaacaaaaaaaattcattctctattcttgtcatctatctacagagttagttgaaacagaggaaactgacttctgcgatggacctcagagttccagacacgtattcatcgtatgtgactcatactccaccagtgctcatcatcgatccagggttgaccctctttttctgcattcatttctatgttgtctttaaatttattcattaattcactgggaataattttacactctgtgattcacaaaacactaagaacagacttgatattccctatctttatacagaatcattctaacacagatatatctgtttcattaattcttctccgtttttcatatatgcattatcaataaatacttcagatccctctcataaatatcactgggacatagttgaccatagttgactatataatacactgtttcatgatacattgagtcctgtttagcaaaccacacaaaccgacacaggaattttgactattactaacattggtctgcatgcaccttcccaagcatggtgtacaaatggggcgcgtgatcatggaggaatccttaacacagcacaagttgttcattctgaggaatacagaccagagaagataatgacaaaattgagacattttcaatattgatatttgcttttcaactatcagttagtcattcatgcaatcattatttgaagtatatttaattcattttctgaaaataaaatgaataattttgaaactgtcactgacccagaagttgaacattacctatactttattctgtctataccatcattagccaaagaagacacaggaatgtaccgtttatttctctgtggatgtcgctgtttcatatacattaattgtgtttcttatcttgtcccttagtttcataattggacaatgctcgaatttattcatctttatttgtatttgtttattaattctcatatggatcaattataaaaatagaatcaaaacatgtaaacatgaataccaaaaacatatacattctatactcctgacagttgtctgtaaaataatttcaaacatacagaataggctagattttgtttgtgacggacctcagagttctagacacgtattcatcgcaaaagactcatacgccaccagtagtcatcatcgatccaggactgatcttctatttttgggttcgtttcctccttgtctattgactaatctgttaattcactaaccataactttaagccctatgatttacaaaaccacaagaatagccatgatattcctaacatataggaatatttattttattaattatcctcagtttctcatgtatatatcttcaatataatcctcacatcaggcccatgtttatttaaatacaactgctcatctttgattataatatacacctttttgtaacacattgaaccctcttgaacaaaccacccaaagcaaggtgaggacttccactattacttacataggtctccaggctccatcctaaaaatggtgcaagtggagcacatggacttgaaggaatccttcaatcagcaaagtgcaatcattctagggaatacagagcagagaagaggataacaaaagtgagatgttgtcactactgaccctttcttgtcacctatcattagttagtcattttgacaatcattatttgcagtatattcattttatctaaagaaatgcataattctgaaattgtcgttgacccagaaattgaatgttgtctataatttgtactgtctataccatcattagccacagaagtcaccagaagacaccatttatatctctgtggacttcgctgtgtcaaaagatattaagagtgcttctggccggatgctgtggctcacacttgtaatcccaacactttggaaggctgaggtaggcggatcacttgaggtcaggagttcgagaccagcctggccaacatggtgaaaccccgtctctactaaaaatacaaaaaattggcagatgtggtgaagggcgcctgtaatcccaactacttgggaggcgggggcaggagaatcacttgaacccagaaggcagaggttgcagtgagccaagatcatgccactgcactccagcctgggggacagagcgagacactgtcaaaaaaaaaaaaaaaaaaaaaaagagtgcttcttgccttatcatatattgttatacttggccaatgcttccactttttcagctgtatctatttatatatgtgtttattgagccttgcattgaccagttatgaaaatagaatgaaaatacataaacacaaatgccaaaaaaattatgttctatatttctgaactctgtctataggatcatttgaaactgaagcaataggccagatttcttctgtgacagacctcagagttccagatacgtactcatcatatgtgagtcatatgccatcaacagtcaccatcgatccaggatggatcatctgtttttcaatttaattctgcctcatttgttgattaattcattaattcattactaataattgtaaatcctatgatttacaaagccctatggagagctgtatacgtctaaataatatgtatacagaatcattctaacacgaatatacctgttttattaattatcctcagcttttcatatatgcattatcaatataatacttcatatcccaccaaatctattattgggatagagttggccatctttaattatattttacacctttttataattcatagaatcctcttaaacaaaatgcacaaagcaagataaagactttgaatattactcacacaggtctgcacactcctttctaagcatgatgcaaacttagctcccaacctcagaggaatcctcaaatcagcaaaggcatgtcccttctgaggtgtacagagcagagaagatgataacaatatgagacattcctactactgatcctggcttttgcaccctgcctctgacccagaacacacatattatctataatttataatgtctataccataattagccaatagatgacaaataataccattatttatcttttgacttcactgtttttaatatataaatagaatatcctgcttcaccagatatttttattattaaactatgtgccattttatttatatcttattgattactttcattgatccaattataaaaataga

SEQ ID NO: 1885825 - DNA, 4001 bp, Homo sapiens
atagttcaaaaaaatcctgagaataactttaatattcctaatttgtatactgaattattccaacattgatacacctcttaattaactatcttcaggtttttatatatgcattatcaatacaacgcttcgtatcgtttccatatctttcactgggatgcaggcggacatctttgataatgtcacacactttttataatacaatgagtcctcttaaaatggcaccagaaggaagtaaaaaatgttaactattactcacattagtcatccggagcctaatcatgacgcagatgcctcaggtgaccatggaagaacttttcaaggtgcacaattcatccattctgcagagcacaaagcacagaggagttcagagcatacaaggggactttctcgctcatgattcaccttcatctaatgagtcatttaggcaatcattatttgaagtgtatttcattttctcttaagaaaattaccaatttcaaacttgccactgacccataccttaaacattatctatagtttatactgtctacactatcactcgcaagaggccaaaggcatgcatcattcatttttccttggctatcactgtttcagtacatattaatagtgcttgctgcctcatcaaatatttttataattggacaatgcttaacctgattcatctttatttattcaaatatttgcttattgattctcactgatccaattataaaataaaatataaatgcataacacacaaagacctaaaacaaactgagtctgtattcctgacatctacctatagaatcatgtgaaacagaggaaattgactttctgatgggcctcagagttccagacatgtattcattgtatgactcacacgacaccagtagtcaacactgaaccaggattcttcctatttttctctatgcatttttactttgtctaataattaactcaattcactgataataagtttaaaatctttggtttttaaaaatccaagagctttgatattcctaatccctacatagaatcattataatgttgatatatattttcattcattgttctccatttttcatatatgtgttttcaatatagtacttcctatcactcctctaactgggaaagagttggccgtctttgattacattcctataatatattggaatatattatatatagattatattcctataatatatattttatatataagatattccagtaatatattcctataatgtattacctcttttataatgtattatatcttcctataatgtattttatactacattatattatagaaatatatataatatattcctacaatatattacatttttataatgtattatacgtttttataatacactgaatcctcttaaacaaaccactcaaaccaagacaagagctttgaccattacttactttggtctgtacgctccttcctaagcatggtgcaaacagagcacgtgaccttggaggcatctttaaatcatcacaagtacgtccattctgatgagtgcagagcagagaaaataataacaaaaatgtgatttttctcattgttgatctttcctttttacctatctgtagttaaacatttaggcaatcgttatttgaagtatgaacaactttgaacttgccactaaccaagaacacgaaaatagcatataatttatactatctcttcattattggccaaaaaggttaggtatgttagatttatttttggctttcatcaatttaaatacgtattaaatacacctcatcacacatttttataattggacaatgcataacttatttatttattcatatatgttttattctttcattgaaccaattataaaataaaaactcataaacaaaaaaaattcattctctattcttgtcatctatctacagagttagttgaaacagaggaaactgacttctgcgatggacctcagagttccagacacgtattcatcgtatgtgactcatactccaccagtgctcatcatcgatccagggttgaccctctttttctgcattcatttctatgttgtctttaaatttattcattaattcactgggaataattttacactctgtgattcacaaaacactaagaacagacttgatattccctatctttatacagaatcattctaacacagatatatctgtttcattaattcttctccgtttttcatatatgcattatcaataaatacttcagatccctctcataaatatcactgggacatagttgaccatagttgactatataatacactgtttcatgatacattgagtcctgtttagcaaaccacacaaaccgacacaggaattttgactattactaacattggtctgcatgcaccttcccaagcatggtgtacaaatggggcgcgtgatcatggaggaatccttaacacagcacaagttgttcattctgaggaatacagaccagagaagataatgacaaaattgagacattttcaatattgatatttgcttttcaactatcagttagtcattcatgcaatcattatttgaagtatatttaattcattttctgaaaataaaatgaataattttgaaactgtcactgacccagaagttgaacattacctatactttattctgtctataccatcattagccaaagaagacacaggaatgtaccgtttatttctctgtggatgtcgctgtttcatatacattaattgtgtttcttatcttgtcccttagtttcataattggacaatgctcgaatttattcatctttatttgtatttgtttattaattctcatatggatcaattataaaaatagaatcaaaacatgtaaacatgaataccaaaaacatatacattctatactcctgacagttgtctgtaaaataatttcaaacatacagaataggctagattttgtttgtgacggacctcagagttctagacacgtattcatcgcaaaagactcatacgccaccagtagtcatcatcgatccaggactgatcttctatttttgggttcgtttcctccttgtctattgactaatctgttaattcactaaccataactttaagccctatgatttacaaaaccacaagaatagccatgatattcctaacatataggaatatttattttattaattatcctcagtttctcatgtatatatcttcaatataatcctcacatcaggcccatgtttatttaaatacaactgctcatctttgattataatatacacctttttgtaacacattgaaccctcttgaacaaaccacccaaagcaaggtgaggacttccactattacttacataggtctccaggctccatcctaaaaatggtgcaagtggagcacatggacttgaaggaatccttcaatcagcaaagtgcaatcattctagggaatacagagcagagaagaggataacaaaagtgagatgttgtcactactgaccctttcttgtcacctatcattagttagtcattttgacaatcattatttgcagtatattcattttatctaaagaaatgcataattctgaaattgtcgttgacccagaaattgaatgttgtctataatttgtactgtctataccatcattagccacagaagtcaccagaagacaccatttatatctctgtggacttcgctgtgtcaaaagatattaagagtgcttctggccggatgctgtggctcacacttgtaatcccaacactttggaaggctgaggtaggcggatcacttgaggtcaggagttcgagaccagcctggccaacatggtgaaaccccgtctctactaaaaatacaaaaaattggcagatgtggtgaagggcgcctgtaatcccaactacttgggaggcgggggcaggagaatcacttgaacccagaaggcagaggttgcagtgagccaagatcatgccactgcactccagcctgggggacagagcgagacactgtcaaaaaaaaaaaaaaaaaaaaaaagagtgcttcttgccttatcatata

SEQ ID NO: 1885826 - DNA, 4001 bp, Homo sapiens
gacagacctcagagttccagacatgtattcactgtatatgactcatgctaccagtagtcatcatcgatccaggattggcccttcttttctctgttattttctacattgtctgttgattaattcattaatttactaataataactttaaaccttatgactcacaaaacccaaaaagatatcccaaataattcctatattaatgtttcatgagttatcctgtttttcatatgtgaattatcaatataatacttcttttgactccaatatccctcactagataaaattcaccatctttgattatattacatgtttattcacagtacattgagtcctcttaaataaaccacccaaagaaatgcaagaaatctgactgtcactcacattggtacacatgctccttcctaagcatggtgcaaacagaacatgtgaccatgaagaagtcctcaaatcagaacaagtacgtccattctaagtacagagcaaagaagataataacaaaagagaggcattttaactatcaatccttgcttttcacctatcattagttagtcatctaagctatcattatttggagtaaacttatttcatttcctctttaaaaaatgaacaatttcaagcttacaattaaccaagaatttgaacattgtctataattatcctgtctatatcaccatagccaaagaggtgacagacatgtacatgtacttctcttcagacttcactattttcaatacatattaatagtgtttcttacctcaccaaatattttttacaactggacaatgattaaccttactcatctttatttatacatttgtttattggtttttatattggccaattacaaaaatagaattaaaacatgtaaatacaaagactaaaaccaaactcatctaatattcctgatgcctgtctaaaggattatatcaaacacagaaaatgagctagatttcttctgtgatggacctcagagttctagacacgtattcatcgcatatgactcatacgccaccagcagtcatcatcgatccaggattgttcatctctttctctattcatttctaccctgtctatggattgatttgttaattcactaatagcaattttaagactttatagttcaaaaaaatcctgagaataactttaatattcctaatttgtatactgaattattccaacattgatacacctcttaattaactatcttcaggtttttatatatgcattatcaatacaacgcttcgtatcgtttccatatctttcactgggatgcaggcggacatctttgataatgtcacacactttttataatacaatgagtcctcttaaaatggcaccagaaggaagtaaaaaatgttaactattactcacattagtcatccggagcctaatcatgacgcagatgcctcaggtgaccatggaagaacttttcaaggtgcacaattcatccattctgcagagcacaaagcacagaggagttcagagcatacaaggggactttctcgctcatgattcaccttcatctaatgagtcatttaggcaatcattatttgaagtgtatttcattttctcttaagaaaattaccaatttcaaacttgccactgacccataccttaaacattatctatagtttatactgtctacactatcactcgcaagaggccaaaggcatgcatcattcatttttccttggctatcactgtttcagtacatattaatagtgcttgctgcctcatcaaatatttttataattggacaatgcttaacctgattcatctttatttattcaaatatttgcttattgattctcactgatccaattataaaataaaatataaatgcataacacacaaagacctaaaacaaactgagtctgtattcctgacatctacctatagaatcatgtgaaacagaggaaattgactttctgatgggcctcagagttccagacatgtattcattgtatgactcacacgacaccagtagtcaacactgaaccaggattcttcctatttttctctatgcatttttactttgtctaataattaactcaattcactgataataagtttaaaatctttggtttttaaaaatccaagagctttgatattcctaatccctacatagaatcattataatgttgatatatattttcattcattgttctccatttttcatatatgtgttttcaatatagtacttcctatcactcctctaactgggaaagagttggccgtctttgattacattcctataatatattggaatatattatatatagattatattcctataatatatattttatatataagatattccagtaatatattcctataatgtattacctcttttataatgtattatatcttcctataatgtattttatactacattatattatagaaatatatataatatattcctacaatatattacatttttataatgtattatacgtttttataatacactgaatcctcttaaacaaaccactcaaaccaagacaagagctttgaccattacttactttggtctgtacgctccttcctaagcatggtgcaaacagagcacgtgaccttggaggcatctttaaatcatcacaagtacgtccattctgatgagtgcagagcagagaaaataataacaaaaatgtgatttttctcattgttgatctttcctttttacctatctgtagttaaacatttaggcaatcgttatttgaagtatgaacaactttgaacttgccactaaccaagaacacgaaaatagcatataatttatactatctcttcattattggccaaaaaggttaggtatgttagatttatttttggctttcatcaatttaaatacgtattaaatacacctcatcacacatttttataattggacaatgcataacttatttatttattcatatatgttttattctttcattgaaccaattataaaataaaaactcataaacaaaaaaaattcattctctattcttgtcatctatctacagagttagttgaaacagaggaaactgacttctgcgatggacctcagagttccagacacgtattcatcgtatgtgactcatactccaccagtgctcatcatcgatccagggttgaccctctttttctgcattcatttctatgttgtctttaaatttattcattaattcactgggaataattttacactctgtgattcacaaaacactaagaacagacttgatattccctatctttatacagaatcattctaacacagatatatctgtttcattaattcttctccgtttttcatatatgcattatcaataaatacttcagatccctctcataaatatcactgggacatagttgaccatagttgactatataatacactgtttcatgatacattgagtcctgtttagcaaaccacacaaaccgacacaggaattttgactattactaacattggtctgcatgcaccttcccaagcatggtgtacaaatggggcgcgtgatcatggaggaatccttaacacagcacaagttgttcattctgaggaatacagaccagagaagataatgacaaaattgagacattttcaatattgatatttgcttttcaactatcagttagtcattcatgcaatcattatttgaagtatatttaattcattttctgaaaataaaatgaataattttgaaactgtcactgacccagaagttgaacattacctatactttattctgtctataccatcattagccaaagaagacacaggaatgtaccgtttatttctctgtggatgtcgctgtttcatatacattaattgtgtttcttatcttgtcccttagtttcataattggacaatgctcgaatttattcatctttatttgtatttgtttattaattctcatatggatcaattataaaaatagaatcaaaacatgtaaacatgaataccaaaaacatatacattctatactcctgacagttgtctgtaaaataatttc

SEQ ID NO: 1885827 - DNA, 4001 bp, Homo sapiens
cccatgaggcagaggttgcggtgagctgagatcgtggcattgtactccaccctaagtgatagagcaagactccatctcaaaaagaaagaaggaaggaaggaaggaaggaaggaaggaaggaaggaaggaaggaaggaaggaaggaaggaaggaaggaaggaaaagagagagagagaaagagagagaaagaaagaaagaaagaaagaaagaaagaaagaaagaaagaaagaaagaaaagaaagaaaggaaggaagaaaggaaggaagaaaggaaagaaagaaaggaaggaagaaaggaagggaaaataaagaactttggaattgtccctgacccagaacttgaatacggtcaaaatttatactgtctatctcattcaaagaggtaacaggtatgcaagatttctctttagttgttaccaatttcagtatgtattaatagtgttttttgtctttccacatatttttatagttggacaatccttaatcttatcctttttatttttttctttttgacacagaatcttgctctgttgccaagctgcagtgacgtgatctcggatcactgcagcctcccaggttcaagcaatttttgaaacccgggttcaagcaatccatgtgcctcagccacccaagtcctcggattagaggcacatgccgccatgcctggctaatttttgtatttttagtagagatagggtttcgccacgttggccaggtaggtctcgatctcctgtcatcaagtgatctacccgtgttggcctcccaaagtgctgagattacaggtgtgagccaccatgcccggcccttattcatctttatttgtatatttattaactgattctctgattgagccaatcataaatgtaaaataaaaattcataaacatgaaaaccaaacacatatacattctattttttgccatctgtctgtaggatcatttgaaacaggaaatagactagatatcttttgagacagacctcagagttccagacatgtattcactgtatatgactcatgctaccagtagtcatcatcgatccaggattggcccttcttttctctgttattttctacattgtctgttgattaattcattaatttactaataataactttaaaccttatgactcacaaaacccaaaaagatatcccaaataattcctatattaatgtttcatgagttatcctgtttttcatatgtgaattatcaatataatacttcttttgactccaatatccctcactagataaaattcaccatctttgattatattacatgtttattcacagtacattgagtcctcttaaataaaccacccaaagaaatgcaagaaatctgactgtcactcacattggtacacatgctccttcctaagcatggtgcaaacagaacatgtgaccatgaagaagtcctcaaatcagaacaagtacgtccattctaagtacagagcaaagaagataataacaaaagagaggcattttaactatcaatccttgcttttcacctatcattagttagtcatctaagctatcattatttggagtaaacttatttcatttcctctttaaaaaatgaacaatttcaagcttacaattaaccaagaatttgaacattgtctataattatcctgtctatatcaccatagccaaagaggtgacagacatgtacatgtacttctcttcagacttcactattttcaatacatattaatagtgtttcttacctcaccaaatattttttacaactggacaatgattaaccttactcatctttatttatacatttgtttattggtttttatattggccaattacaaaaatagaattaaaacatgtaaatacaaagactaaaaccaaactcatctaatattcctgatgcctgtctaaaggattatatcaaacacagaaaatgagctagatttcttctgtgatggacctcagagttctagacacgtattcatcgcatatgactcatacgccaccagcagtcatcatcgatccaggattgttcatctctttctctattcatttctaccctgtctatggattgatttgttaattcactaatagcaattttaagactttatagttcaaaaaaatcctgagaataactttaatattcctaatttgtatactgaattattccaacattgatacacctcttaattaactatcttcaggtttttatatatgcattatcaatacaacgcttcgtatcgtttccatatctttcactgggatgcaggcggacatctttgataatgtcacacactttttataatacaatgagtcctcttaaaatggcaccagaaggaagtaaaaaatgttaactattactcacattagtcatccggagcctaatcatgacgcagatgcctcaggtgaccatggaagaacttttcaaggtgcacaattcatccattctgcagagcacaaagcacagaggagttcagagcatacaaggggactttctcgctcatgattcaccttcatctaatgagtcatttaggcaatcattatttgaagtgtatttcattttctcttaagaaaattaccaatttcaaacttgccactgacccataccttaaacattatctatagtttatactgtctacactatcactcgcaagaggccaaaggcatgcatcattcatttttccttggctatcactgtttcagtacatattaatagtgcttgctgcctcatcaaatatttttataattggacaatgcttaacctgattcatctttatttattcaaatatttgcttattgattctcactgatccaattataaaataaaatataaatgcataacacacaaagacctaaaacaaactgagtctgtattcctgacatctacctatagaatcatgtgaaacagaggaaattgactttctgatgggcctcagagttccagacatgtattcattgtatgactcacacgacaccagtagtcaacactgaaccaggattcttcctatttttctctatgcatttttactttgtctaataattaactcaattcactgataataagtttaaaatctttggtttttaaaaatccaagagctttgatattcctaatccctacatagaatcattataatgttgatatatattttcattcattgttctccatttttcatatatgtgttttcaatatagtacttcctatcactcctctaactgggaaagagttggccgtctttgattacattcctataatatattggaatatattatatatagattatattcctataatatatattttatatataagatattccagtaatatattcctataatgtattacctcttttataatgtattatatcttcctataatgtattttatactacattatattatagaaatatatataatatattcctacaatatattacatttttataatgtattatacgtttttataatacactgaatcctcttaaacaaaccactcaaaccaagacaagagctttgaccattacttactttggtctgtacgctccttcctaagcatggtgcaaacagagcacgtgaccttggaggcatctttaaatcatcacaagtacgtccattctgatgagtgcagagcagagaaaataataacaaaaatgtgatttttctcattgttgatctttcctttttacctatctgtagttaaacatttaggcaatcgttatttgaagtatgaacaactttgaacttgccactaaccaagaacacgaaaatagcatataatttatactatctcttcattattggccaaaaaggttaggtatgttagatttatttttggctttcatcaatttaaatacgtattaaatacacctcatcacacatttttataattggacaatgcataacttatttatttattcatatatgttttattctttcattgaaccaattataaaataaaaactcataaacaaaaaaaattcattctctattcttgtcatctatctacagagttagttgaaacagaggaaa

SEQ ID NO: 1885828 - DNA, 4001 bp, Homo sapiens
aactcgtgctcacaaagagcaaaaacaagacccttgcatattcctgacgtctgtctataggatcacttccaaaagagggaaaacactatatttcttttctgatggacctcagagttccagataggcattcactgacgaagacccatccaataccagtagtcatgattgatccaggattagctctggtgctcttcattcattgttacattatttattacttcattaattcaccattaataacttttaaacactatcactcacaaaaccccaagaggagccttgatatctctaatttgtatatacactcatcctcacaataccatatcccctcattattacctttcttaataatacaggacatgcttttcatataagcatccctcagtgtaacattccacatccattccatatttatccctgggctactcatggccttattggattatatttcatattttttgttaatgcactataaacctttaaacaaaacacccaagatgagacaagaactttgactattactcacattggtctccagcttctagcacagagatggaccatacagctcttaactattaaaaccagcttctgtgcttccattctgagtacagagcagaagagatgacaacaaaaatgagaccttctctccattgatccttgcttttcaaatatacctcaaattaataaatgtataaacatttatactcatttatatgttcattaatttgaggtatatttcatttttttatgaataactggccagatgtggtggctcatgcctgtaatcccagcatgttgggaggcagaggcaggtggatcacttgaggtcaagagttcaagaccagtctgggaaacatggagaaaccccatctctactgaaaatacaaaaactagccaggcatgatggcacgcgtctgcaatcccagctattagggaggctgaggcacaagaactgcttgaacccatgaggcagaggttgcggtgagctgagatcgtggcattgtactccaccctaagtgatagagcaagactccatctcaaaaagaaagaaggaaggaaggaaggaaggaaggaaggaaggaaggaaggaaggaaggaaggaaggaaggaaggaaggaaggaaaagagagagagagaaagagagagaaagaaagaaagaaagaaagaaagaaagaaagaaagaaagaaagaaagaaaagaaagaaaggaaggaagaaaggaaggaagaaaggaaagaaagaaaggaaggaagaaaggaagggaaaataaagaactttggaattgtccctgacccagaacttgaatacggtcaaaatttatactgtctatctcattcaaagaggtaacaggtatgcaagatttctctttagttgttaccaatttcagtatgtattaatagtgttttttgtctttccacatatttttatagttggacaatccttaatcttatcctttttatttttttctttttgacacagaatcttgctctgttgccaagctgcagtgacgtgatctcggatcactgcagcctcccaggttcaagcaatttttgaaacccgggttcaagcaatccatgtgcctcagccacccaagtcctcggattagaggcacatgccgccatgcctggctaatttttgtatttttagtagagatagggtttcgccacgttggccaggtaggtctcgatctcctgtcatcaagtgatctacccgtgttggcctcccaaagtgctgagattacaggtgtgagccaccatgcccggcccttattcatctttatttgtatatttattaactgattctctgattgagccaatcataaatgtaaaataaaaattcataaacatgaaaaccaaacacatatacattctattttttgccatctgtctgtaggatcatttgaaacaggaaatagactagatatcttttgagacagacctcagagttccagacatgtattcactgtatatgactcatgctaccagtagtcatcatcgatccaggattggcccttcttttctctgttattttctacattgtctgttgattaattcattaatttactaataataactttaaaccttatgactcacaaaacccaaaaagatatcccaaataattcctatattaatgtttcatgagttatcctgtttttcatatgtgaattatcaatataatacttcttttgactccaatatccctcactagataaaattcaccatctttgattatattacatgtttattcacagtacattgagtcctcttaaataaaccacccaaagaaatgcaagaaatctgactgtcactcacattggtacacatgctccttcctaagcatggtgcaaacagaacatgtgaccatgaagaagtcctcaaatcagaacaagtacgtccattctaagtacagagcaaagaagataataacaaaagagaggcattttaactatcaatccttgcttttcacctatcattagttagtcatctaagctatcattatttggagtaaacttatttcatttcctctttaaaaaatgaacaatttcaagcttacaattaaccaagaatttgaacattgtctataattatcctgtctatatcaccatagccaaagaggtgacagacatgtacatgtacttctcttcagacttcactattttcaatacatattaatagtgtttcttacctcaccaaatattttttacaactggacaatgattaaccttactcatctttatttatacatttgtttattggtttttatattggccaattacaaaaatagaattaaaacatgtaaatacaaagactaaaaccaaactcatctaatattcctgatgcctgtctaaaggattatatcaaacacagaaaatgagctagatttcttctgtgatggacctcagagttctagacacgtattcatcgcatatgactcatacgccaccagcagtcatcatcgatccaggattgttcatctctttctctattcatttctaccctgtctatggattgatttgttaattcactaatagcaattttaagactttatagttcaaaaaaatcctgagaataactttaatattcctaatttgtatactgaattattccaacattgatacacctcttaattaactatcttcaggtttttatatatgcattatcaatacaacgcttcgtatcgtttccatatctttcactgggatgcaggcggacatctttgataatgtcacacactttttataatacaatgagtcctcttaaaatggcaccagaaggaagtaaaaaatgttaactattactcacattagtcatccggagcctaatcatgacgcagatgcctcaggtgaccatggaagaacttttcaaggtgcacaattcatccattctgcagagcacaaagcacagaggagttcagagcatacaaggggactttctcgctcatgattcaccttcatctaatgagtcatttaggcaatcattatttgaagtgtatttcattttctcttaagaaaattaccaatttcaaacttgccactgacccataccttaaacattatctatagtttatactgtctacactatcactcgcaagaggccaaaggcatgcatcattcatttttccttggctatcactgtttcagtacatattaatagtgcttgctgcctcatcaaatatttttataattggacaatgcttaacctgattcatctttatttattcaaatatttgcttattgattctcactgatccaattataaaataaaatataaatgcataacacacaaagacctaaaacaaactgagtctgtattcctgacatctacctatagaatcatgtgaaacagaggaaattgactttctgatgggcctcagagttccagacatgtattcattgtatgactcacacgacaccagtagtcaacactgaaccaggattcttcctatttttctctatgcatttttactttgtctaataattaactcaattcactgataataagt

SEQ ID NO: 1885829 - DNA, 4001 bp, Homo sapiens
tctccttttatttgtaagctgtttcctaatgattcattagttcactaacaataacataaatacctctggatcaccaagttttaaggacaagatccttaagtattcctagtatctgtctacataatcatttgcttcaattagtatattaatacttccttcattcatcatgttcattgtttaaaatatctattaatctacacaatatttcatgtcaagtccatacgtatccttgggacatagctggccttccttgattatattaatatataatattttttaaatattacactgaatatcctaaacaaataagcaaaagcaaaaaataattttactgttaactcacattggcccatgtgcacctctacagaggggcagacatggggctccagatcaaggcaagatgttctgccagcccaggtgtgtccattctgggaagtgcaaagcagagaaggtaacaggattgaaatatttttcacggattcattcatttgacccttctcttagtcattcaggtatctattaattgtggtaatacttatcaattttcttttaaaaaaatgaacaacagcacacttgttctgatgcaaaataagaaacttcactatactgcttatgtcatccgtagtcaaagattacacttgaattgttcgttttttaaatggtattcatattttcaatacattttaatgatttctgttgtctcaccatttacattgagtggacatgcttcacactcctcatctttaattttttacatgtgtacattgattattacatcaatgaatttattttaaagaagaaacaaaagtcacaaaaacaatccaagaagatggcccttttgtatttccaaaacctaactataagatcacttcaaaagcaatagactatatttcctcctctattgaacctcagagttctagacacacattattcagcatccttgacttctatgccaccagttttcatcactggctcaggcttaggactgtttagcttaattctcatttacatgttatttatgcattaattcatgaatattaatattataacccatgtaaatataatatccaaacagtaagagcatagaatattccacaactttctatataatctgccactttgatatatctttcatgaattatcctcaatgtgtcataaatgagctagcaaatatactgtttcaaccaatctcatatttatcattggctgaggttggccttttggataatttttcacacattcatgatattatgaataccctttaaaaagtctcttagagaaagacatgaactttattactcacactgatctctatgctcctaaccaacagtggcaaccacaaatctcatgaccatgaatgcttaggtcggctcaagtgcatccattctgcagaatacaaagagcaggtaactcttttagaaaaaattcaaaccttatctccattgatcctttccatatttctgttattcagttatttttatattgattaatttttcagaatggaaatgttttctctcataacaaaaggaacaatgtcaaatgagacttaaccagaaaatgaaactgactcttacttattaagagtctagatgaaccttagccaaagagctgatactcatgatccatttcttttttttttttttttttttttttttttttgagacggagtctcgctctgtcgcccaggctggagtgcagtggcgggactcatgatccatttctttaaggggcatctgtgtttaaaatttttagtgataatatttcttacatcatcatgtatattcataattgaacaatgattcacctttatttattcttgtttaattgttctatcatttatctattgatgatgaacctcaatctattaatccaaagtaagaatatgatctttgcacatttctgatatctatccaattatgttttctgttggacctcagagtttcagacacgtagtattcatcgtccatgactcaaacgccaccagtggtcatcattggtccatgtttagtagaggtggggtttcaccattttggccagactggtcttgaactcctgacctgaggtgatccacccacctcggcctcccaaagtgctgggattacaggcatgagccaccacacccggccagggagacagttctaataactacttcaagtccttttctgctaatgctcacatctgtataagttctgggttggttttgattaattcattagtctcttaattgtgggttgtgtattttttgcccctttgaatgcctggtaaatttgcagatgtgaattttaccctgcttgtgtgctggatatatacgtatttctaaaaatgtccttgagctttgttctgggatacagttaatctacctggaaagagtttgatccttttggatcttgtttttaccatccattaggtctgaagcagcatttaatctggggttaattatttcccccatggaggcactcgcttcttgagaaacctctccaatgccctgtgaggatgagcatttccaggctgcttggtggaaatggacactagtcccccctcacatgaacactgggcgctggtctccctaattttttggacagtataagatttttttcttttttctttttattgatgataataaaataaccatgaagcacaaaaacctagatcatgaatgagcctgaaatagtcctgcatctctatatagaatcactttctctcttttattaatcatcctcaaaggtgattaatcaatataatgtttcatatcaattccatatttatcactgagccatggctggctttcttggattatatttcatacttttcaaataaagagtgtatgtccacaaaaactcatatttttttccatgcgccaaacatacagaggcagctatacatcttgtgaccaccaaagaatgtttaaatcagctccagtgcatccattctaaggagtacaaagcagagcatttgattaaaagaaaattaggactttatcttaattgaatcttactccccacatttaatttactcattcacttaggtgtttattaactttttgtagtttatatattttctagacaaaacatacaacctccacttggtttgaaccacagtaataaagttgactattatttatcagtgtctatatgatcattaagggtaacactttgatccacttatttcttaatgggaatagtgttttcaacatttattattaatatttcttgcctgaccacatatattgatacttgaataaagcttcaccatctatagtacaataaatcatacttattgatttatatattaatttaatgcttccatcattgatttacttataagaatgctatcaaatacatattaggaatatacaaagattttgcccttttattttggatttccatcagagtaattagactaaattttttattgtgttggacctcagatttccagatacaaactgttattcaacctcactgactcataccccaacagtcattatcattggtcccaagcttgggcctcttttatctcattcatctctacatttctttactggttaatttatcagtaaactaatcatattaaagtaaatatctacctatctaaaacgcttatgaacaaaatcccaaaacccttgagaacaagatgacttaagtatccctaacaccagtctataaagtcatttaccatgtttttttcattaatcatccacagtgttataaatatggattaatcaacatgtttcatgtccaccacatactttccactgggtcatgggtggctttctttggttatttaaaaatttatagtgaatcttttaaaatctaccctaaacaaatataaaaatatgacaagaagattgactcttacttctattagtgtccaggctcctacccagaggcaactgtggagaacgcgatcacagcagaaggcctgtaagtacaaagcagtgcagataaagaaaataaaaatggagacattattttcctcgatctatgcatgtcacctttcattta

SEQ ID NO: 1885830 - DNA, 4001 bp, Homo sapiens
acgattactcacatttgtctgtaggttccttaaaacaaccatagagcaagtggtcatggcagaatcagtgcagggagtgactgttctgaggattacaaggaagagcagaagacaaaatttgagattttctatccattaattttttcattctaccttccatttactctgtcagttggtatttattgatttgttaatatttgcttatttcccccttaataaaataaatattgaacttacaattgacccagttgacctgagaattgacctaaaaatcacatagcctttgataactaataatcagtgctattgctctatcagtggctctatgattcttagccagagagttaaaaaccactggcccatttattatccattccaaattaattaatagtatttctttccttgccacatatgttaacaattagaatatgcctctctctctcttcatgtttaatcattcaaatctttgtttgattctttcattaattcatttatattaacacaatcacaatccatgaactgtaaaattggaagcaaacagccttgatatcactaacatctatctaaaggatttttttcaacagaggaatagattagatttctattatattgaacctcagagttccaggcacttagtattcatcctccatgactcacacaccaccggctgtcatcgcttgctcaagcttggacctccttttcttaattcgtgtctacgtgtttttattgattaatttatcagttcactaacaataaaataattacctaagagtcacaaaaacttgtgagtaaaatccttaaatagctcttatatctgtctatgtcaatattactcacagcaatacacctctttcattaattaaattcaatgttttcattagttaaattcaatgttttatatatatacattaatcaacataatgctttatattaatcctatttttacaaatgggccagagtttaccttcaatgattgtatttaacacttcttaataatactacgaatatcttttttaaaaaacactgaaaccaagaatgttgactgtcactcacattggtctccacacaccatataacacatagacgcaaccatggatcttaccattaaaaaagaatgataaaatcagccagagtgtgtttattttgaggagtacagagcacaagagatgatcagaaaagattaagacattatctgcattactctttgcattctatcttccactgattcagtcacataggttatttgagataacatatattttatttactctacatagccagacagtatcagtcacaccactgacacaaagcataaacattcattattatttaccactgtctataacatccctaactaaataaataacaacctcataccacttatttcctaatggtattggtgttttcaatatatatcatagattttcttctcactctattgcccaggttgaagtgcagtggtgtgatcttggctcaccgccacctccatctcccaggttcatgtgattctcctgcctcagcctcccaagtagctgggatcacaggcatacgccgccacgcccagctaattttgtatttttagtacagatggggttttaccatgttgcccaggctcatctcgaactcctgacttcaggtgatccacccaccttggcctcccaaagtgctgggattacgggtgtgagccaccatgcctggccatatcatagctttttttgcctcacaaattatttttacagttagagaacgcttagtcgcatccaacatactttatttgtatatttgtttagtggttccttcattgattgaattataataatagattgaaaactcgtgctcacaaagagcaaaaacaagacccttgcatattcctgacgtctgtctataggatcacttccaaaagagggaaaacactatatttcttttctgatggacctcagagttccagataggcattcactgacgaagacccatccaataccagtagtcatgattgatccaggattagctctggtgctcttcattcattgttacattatttattacttcattaattcaccattaataacttttaaacactatcactcacaaaaccccaagaggagccttgatatctctaatttgtatatacactcatcctcacaataccatatcccctcattattacctttcttaataatacaggacatgcttttcatataagcatccctcagtgtaacattccacatccattccatatttatccctgggctactcatggccttattggattatatttcatattttttgttaatgcactataaacctttaaacaaaacacccaagatgagacaagaactttgactattactcacattggtctccagcttctagcacagagatggaccatacagctcttaactattaaaaccagcttctgtgcttccattctgagtacagagcagaagagatgacaacaaaaatgagaccttctctccattgatccttgcttttcaaatatacctcaaattaataaatgtataaacatttatactcatttatatgttcattaatttgaggtatatttcatttttttatgaataactggccagatgtggtggctcatgcctgtaatcccagcatgttgggaggcagaggcaggtggatcacttgaggtcaagagttcaagaccagtctgggaaacatggagaaaccccatctctactgaaaatacaaaaactagccaggcatgatggcacgcgtctgcaatcccagctattagggaggctgaggcacaagaactgcttgaacccatgaggcagaggttgcggtgagctgagatcgtggcattgtactccaccctaagtgatagagcaagactccatctcaaaaagaaagaaggaaggaaggaaggaaggaaggaaggaaggaaggaaggaaggaaggaaggaaggaaggaaggaaggaaggaaaagagagagagagaaagagagagaaagaaagaaagaaagaaagaaagaaagaaagaaagaaagaaagaaagaaaagaaagaaaggaaggaagaaaggaaggaagaaaggaaagaaagaaaggaaggaagaaaggaagggaaaataaagaactttggaattgtccctgacccagaacttgaatacggtcaaaatttatactgtctatctcattcaaagaggtaacaggtatgcaagatttctctttagttgttaccaatttcagtatgtattaatagtgttttttgtctttccacatatttttatagttggacaatccttaatcttatcctttttatttttttctttttgacacagaatcttgctctgttgccaagctgcagtgacgtgatctcggatcactgcagcctcccaggttcaagcaatttttgaaacccgggttcaagcaatccatgtgcctcagccacccaagtcctcggattagaggcacatgccgccatgcctggctaatttttgtatttttagtagagatagggtttcgccacgttggccaggtaggtctcgatctcctgtcatcaagtgatctacccgtgttggcctcccaaagtgctgagattacaggtgtgagccaccatgcccggcccttattcatctttatttgtatatttattaactgattctctgattgagccaatcataaatgtaaaataaaaattcataaacatgaaaaccaaacacatatacattctattttttgccatctgtctgtaggatcatttgaaacaggaaatagactagatatcttttgagacagacctcagagttccagacatgtattcactgtatatgactcatgctaccagtagtcatcatcgatccaggattggcccttcttttctctgttattttctacattgtctgttgattaattcattaatttactaataataactttaaaccttatgactcacaaaacccaaaaagatatcccaaataattcctatattaatgtttcatgagttatcctgtttttcatatgtgaattatcaata

SEQ ID NO: 1885831 - DNA, 4001 bp, Homo sapiens
tagctaattgattattattaacttaagcatttgttcattattaagataaaatcagtatccttacacatgatctaaactacagcatggatcatcgtagcacatgcatagttgatcattaccaaagtaataacagatgatgtcactttgtaatggaatttagtgagcacaatagctcttgttatagaacaaattattgtcactggccctctttaaaaatagctttctatttatataaacaacatccctagttaaggataagacaaccaggaaaccaaagacaactcaatataaacatggacagctcatacatttgtctacatgtttctcattctgagagattaaaaatctgacacaattcccactccctgagcaatagatcagtactgtgacttgcttcattacacatgttatagttggtccaggtgtggccatgtttttattcacttatttcttttacttgagttcttcacgcattaattcattatccgtgaattacaagagcacaagaatagggtaactgattttttgggggttttttttgttttttttttttcgagacagggtctcactctgttgcccaggctggaattcagtggcgcgatctcgactcactgcaacctcaacttcctgggtttaagcaattctcctgcctcagcctcccaagtagctgggattacaggcactcgccaccacacccggctaatttgtatatttttagtagagacggggtttcactgtgttggtcaggctggtcttaaactcctaactttgtgatctgcccacctcggcctcccaaagtgctgggattaaaggtgtgagccaccgtgcccagccgataactgaatatttttaactactgtctacaggatcatttccaactgatcaataggctagatttcttttatatcggagcttaaacttcctgactcctattactcatcatccttgactcatacccacgagtcatcatctctgggccaggccacagaccatcaatcatttttttcatttagactttgtctatttcatttatttattaatttactactttataataaagaaatagacatgaatcagaaaaaaaataggacaagagctgtgataaccctgttgtctatctgtagagcagttcctacagaaattagacatgtttcttgaactgacctgattgtttcaaacatgcattactcaacaaaatgtttcatatcaaccccatgttcattttggggacacggttagtcttctttaattatattttctacttattaataatgcattgaccactcttaaatggcccaaaccaagacaagaactttgacgattactcacatttgtctgtaggttccttaaaacaaccatagagcaagtggtcatggcagaatcagtgcagggagtgactgttctgaggattacaaggaagagcagaagacaaaatttgagattttctatccattaattttttcattctaccttccatttactctgtcagttggtatttattgatttgttaatatttgcttatttcccccttaataaaataaatattgaacttacaattgacccagttgacctgagaattgacctaaaaatcacatagcctttgataactaataatcagtgctattgctctatcagtggctctatgattcttagccagagagttaaaaaccactggcccatttattatccattccaaattaattaatagtatttctttccttgccacatatgttaacaattagaatatgcctctctctctcttcatgtttaatcattcaaatctttgtttgattctttcattaattcatttatattaacacaatcacaatccatgaactgtaaaattggaagcaaacagccttgatatcactaacatctatctaaaggatttttttcaacagaggaatagattagatttctattatattgaacctcagagttccaggcacttagtattcatcctccatgactcacacaccaccggctgtcatcgcttgctcaagcttggacctccttttcttaattcgtgtctacgtgtttttattgattaatttatcagttcactaacaataaaataattacctaagagtcacaaaaacttgtgagtaaaatccttaaatagctcttatatctgtctatgtcaatattactcacagcaatacacctctttcattaattaaattcaatgttttcattagttaaattcaatgttttatatatatacattaatcaacataatgctttatattaatcctatttttacaaatgggccagagtttaccttcaatgattgtatttaacacttcttaataatactacgaatatcttttttaaaaaacactgaaaccaagaatgttgactgtcactcacattggtctccacacaccatataacacatagacgcaaccatggatcttaccattaaaaaagaatgataaaatcagccagagtgtgtttattttgaggagtacagagcacaagagatgatcagaaaagattaagacattatctgcattactctttgcattctatcttccactgattcagtcacataggttatttgagataacatatattttatttactctacatagccagacagtatcagtcacaccactgacacaaagcataaacattcattattatttaccactgtctataacatccctaactaaataaataacaacctcataccacttatttcctaatggtattggtgttttcaatatatatcatagattttcttctcactctattgcccaggttgaagtgcagtggtgtgatcttggctcaccgccacctccatctcccaggttcatgtgattctcctgcctcagcctcccaagtagctgggatcacaggcatacgccgccacgcccagctaattttgtatttttagtacagatggggttttaccatgttgcccaggctcatctcgaactcctgacttcaggtgatccacccaccttggcctcccaaagtgctgggattacgggtgtgagccaccatgcctggccatatcatagctttttttgcctcacaaattatttttacagttagagaacgcttagtcgcatccaacatactttatttgtatatttgtttagtggttccttcattgattgaattataataatagattgaaaactcgtgctcacaaagagcaaaaacaagacccttgcatattcctgacgtctgtctataggatcacttccaaaagagggaaaacactatatttcttttctgatggacctcagagttccagataggcattcactgacgaagacccatccaataccagtagtcatgattgatccaggattagctctggtgctcttcattcattgttacattatttattacttcattaattcaccattaataacttttaaacactatcactcacaaaaccccaagaggagccttgatatctctaatttgtatatacactcatcctcacaataccatatcccctcattattacctttcttaataatacaggacatgcttttcatataagcatccctcagtgtaacattccacatccattccatatttatccctgggctactcatggccttattggattatatttcatattttttgttaatgcactataaacctttaaacaaaacacccaagatgagacaagaactttgactattactcacattggtctccagcttctagcacagagatggaccatacagctcttaactattaaaaccagcttctgtgcttccattctgagtacagagcagaagagatgacaacaaaaatgagaccttctctccattgatccttgcttttcaaatatacctcaaattaataaatgtataaacatttatactcatttatatgttcattaatttgaggtatatttcatttttttatgaataactggccagatgtggtggctcatgcctgtaatcccagcatgttgggaggcagaggcaggtggatcacttgaggtcaagagttcaagaccagtctgggaaaca

SEQ ID NO: 1885832 - DNA, 4001 bp, Homo sapiens
acattgtctacaggatcatttccaacagaagcaaaaacctagattcttttcttctcatattcatcatccatgacttatatgccaccagtggtcaccattgattcatagttgggtctctctttcatcattcatttctaaatatttattgaataaatcatttcttctttgataataaaatgaatacatgattttgaaaacccaagaacaagatatttgaagaatccttacatttgtctatacaataatttcccacagagactacatctctttcattaattaacctcaatgttgcacattgtcattaagccaattaactttttattatattaaataatttttaataatatcaggaataccattaaacaacctaaaccaagacaagaaccattactcacattggcctaacacagaggcaacatagccttgatcacagcaaaatgatcagctcattgcatccatcctgaaaagtgcaaagcagagaagatgattaaaaaattgaatattctttacattaatctatatttttcaccattcatttacatagtcatttgagtatttattaattttttcttaatacaacaaatgtgaaacttgcaactaaccattacttactgctatctatatgatccttagtcaaagatgtattacacttggtccattaattatccaaccatttcaatttatattagtattgtttctctttactacacatttcaacaataaacaatacttcatcctcatctatattcatttatacatgtttgtttattcttcgttgctattttaataatataatatttttaaaattcataaacataaagaaaaagaacaaggttcttgtatttccctgacatctgtctacaggagtttttcagacagagggactaggctagatactgcttgtgatggacctcagagttctagacacgtattcattgtatgactcataggccaccagtggtcatcatcaatccagccagaattggccctctttttctccttttatttgtaagctgtttcctaatgattcattagttcactaacaataacataaatacctctggatcaccaagttttaaggacaagatccttaagtattcctagtatctgtctacataatcatttgcttcaattagtatattaatacttccttcattcatcatgttcattgtttaaaatatctattaatctacacaatatttcatgtcaagtccatacgtatccttgggacatagctggccttccttgattatattaatatataatattttttaaatattacactgaatatcctaaacaaataagcaaaagcaaaaaataattttactgttaactcacattggcccatgtgcacctctacagaggggcagacatggggctccagatcaaggcaagatgttctgccagcccaggtgtgtccattctgggaagtgcaaagcagagaaggtaacaggattgaaatatttttcacggattcattcatttgacccttctcttagtcattcaggtatctattaattgtggtaatacttatcaattttcttttaaaaaaatgaacaacagcacacttgttctgatgcaaaataagaaacttcactatactgcttatgtcatccgtagtcaaagattacacttgaattgttcgttttttaaatggtattcatattttcaatacattttaatgatttctgttgtctcaccatttacattgagtggacatgcttcacactcctcatctttaattttttacatgtgtacattgattattacatcaatgaatttattttaaagaagaaacaaaagtcacaaaaacaatccaagaagatggcccttttgtatttccaaaacctaactataagatcacttcaaaagcaatagactatatttcctcctctattgaacctcagagttctagacacacattattcagcatccttgacttctatgccaccagttttcatcactggctcaggcttaggactgtttagcttaattctcatttacatgttatttatgcattaattcatgaatattaatattataacccatgtaaatataatatccaaacagtaagagcatagaatattccacaactttctatataatctgccactttgatatatctttcatgaattatcctcaatgtgtcataaatgagctagcaaatatactgtttcaaccaatctcatatttatcattggctgaggttggccttttggataatttttcacacattcatgatattatgaataccctttaaaaagtctcttagagaaagacatgaactttattactcacactgatctctatgctcctaaccaacagtggcaaccacaaatctcatgaccatgaatgcttaggtcggctcaagtgcatccattctgcagaatacaaagagcaggtaactcttttagaaaaaattcaaaccttatctccattgatcctttccatatttctgttattcagttatttttatattgattaatttttcagaatggaaatgttttctctcataacaaaaggaacaatgtcaaatgagacttaaccagaaaatgaaactgactcttacttattaagagtctagatgaaccttagccaaagagctgatactcatgatccatttcttttttttttttttttttttttttttttttgagacggagtctcgctctgtcgcccaggctggagtgcagtggcgggactcatgatccatttctttaaggggcatctgtgtttaaaatttttagtgataatatttcttacatcatcatgtatattcataattgaacaatgattcacctttatttattcttgtttaattgttctatcatttatctattgatgatgaacctcaatctattaatccaaagtaagaatatgatctttgcacatttctgatatctatccaattatgttttctgttggacctcagagtttcagacacgtagtattcatcgtccatgactcaaacgccaccagtggtcatcattggtccatgtttagtagaggtggggtttcaccattttggccagactggtcttgaactcctgacctgaggtgatccacccacctcggcctcccaaagtgctgggattacaggcatgagccaccacacccggccagggagacagttctaataactacttcaagtccttttctgctaatgctcacatctgtataagttctgggttggttttgattaattcattagtctcttaattgtgggttgtgtattttttgcccctttgaatgcctggtaaatttgcagatgtgaattttaccctgcttgtgtgctggatatatacgtatttctaaaaatgtccttgagctttgttctgggatacagttaatctacctggaaagagtttgatccttttggatcttgtttttaccatccattaggtctgaagcagcatttaatctggggttaattatttcccccatggaggcactcgcttcttgagaaacctctccaatgccctgtgaggatgagcatttccaggctgcttggtggaaatggacactagtcccccctcacatgaacactgggcgctggtctccctaattttttggacagtataagatttttttcttttttctttttattgatgataataaaataaccatgaagcacaaaaacctagatcatgaatgagcctgaaatagtcctgcatctctatatagaatcactttctctcttttattaatcatcctcaaaggtgattaatcaatataatgtttcatatcaattccatatttatcactgagccatggctggctttcttggattatatttcatacttttcaaataaagagtgtatgtccacaaaaactcatatttttttccatgcgccaaacatacagaggcagctatacatcttgtgaccaccaaagaatgtttaaatcagctccagtgcatccattctaaggagtacaaagcagagcatttgattaaaagaaaattaggactttatcttaattgaatcttactccccacattt

SEQ ID NO: 1885833 - DNA, 4001 bp, Homo sapiens
tgatccttttattgatcaatttattatgatagagtaaaaactcatttaaaaaggccaaataagatccttatatattcttaaataatctataggattatttctaaaagaggcaataacctagattccttccttcttggacctcagagttccagacatatattcaccaaatatgatttatacgccaccagtggacatcattgatccaggcttggctctcattttcttcattcatatcattgaataatacatcaaaaatctaataatactaaaataaataccaagaatcacaaaaactagaagacaagattcttgaatatttctaacatctgcctatggaataagcagaaatataataatatttctaacatctgcctgtagatcaactgacctcaaggcttcatatataataattacattttttacatttgggtaatggttggcagtcactgattacattttgcacttactgcatacccttcagaagaacactgaaactgagacaagaagtttgactattacgtcagtctccatgttcctaacacatggaggcaaccactgatctcatagccacagaacaccaaaatcagcccgggtctgtccattctgaggagtacagagcagactaaaaacattgagacctaatctctgttgatcctgcctttctgcatagcatttattcagtgatttgggtatttactaatttttcatattataggtgtctttctctcttaacagaagaaacaatctctgaccaagaaaataaaactgactcttacttgttagattctatataatccttagtcaaagaggaaacactgtgatccatttctttgataagaggaatcagtatctcctatttttagtaataatttatctcatctcctatattcatagctggacactgtagcttaaatctctacttgtaatctgtttatatttgtttaatggttctatcattcatatattagtaataataaacctaaatctatgaccccaagataagaaaatgatctttgtatgtttctgacattgtctacaggatcatttccaacagaagcaaaaacctagattcttttcttctcatattcatcatccatgacttatatgccaccagtggtcaccattgattcatagttgggtctctctttcatcattcatttctaaatatttattgaataaatcatttcttctttgataataaaatgaatacatgattttgaaaacccaagaacaagatatttgaagaatccttacatttgtctatacaataatttcccacagagactacatctctttcattaattaacctcaatgttgcacattgtcattaagccaattaactttttattatattaaataatttttaataatatcaggaataccattaaacaacctaaaccaagacaagaaccattactcacattggcctaacacagaggcaacatagccttgatcacagcaaaatgatcagctcattgcatccatcctgaaaagtgcaaagcagagaagatgattaaaaaattgaatattctttacattaatctatatttttcaccattcatttacatagtcatttgagtatttattaattttttcttaatacaacaaatgtgaaacttgcaactaaccattacttactgctatctatatgatccttagtcaaagatgtattacacttggtccattaattatccaaccatttcaatttatattagtattgtttctctttactacacatttcaacaataaacaatacttcatcctcatctatattcatttatacatgtttgtttattcttcgttgctattttaataatataatatttttaaaattcataaacataaagaaaaagaacaaggttcttgtatttccctgacatctgtctacaggagtttttcagacagagggactaggctagatactgcttgtgatggacctcagagttctagacacgtattcattgtatgactcataggccaccagtggtcatcatcaatccagccagaattggccctctttttctccttttatttgtaagctgtttcctaatgattcattagttcactaacaataacataaatacctctggatcaccaagttttaaggacaagatccttaagtattcctagtatctgtctacataatcatttgcttcaattagtatattaatacttccttcattcatcatgttcattgtttaaaatatctattaatctacacaatatttcatgtcaagtccatacgtatccttgggacatagctggccttccttgattatattaatatataatattttttaaatattacactgaatatcctaaacaaataagcaaaagcaaaaaataattttactgttaactcacattggcccatgtgcacctctacagaggggcagacatggggctccagatcaaggcaagatgttctgccagcccaggtgtgtccattctgggaagtgcaaagcagagaaggtaacaggattgaaatatttttcacggattcattcatttgacccttctcttagtcattcaggtatctattaattgtggtaatacttatcaattttcttttaaaaaaatgaacaacagcacacttgttctgatgcaaaataagaaacttcactatactgcttatgtcatccgtagtcaaagattacacttgaattgttcgttttttaaatggtattcatattttcaatacattttaatgatttctgttgtctcaccatttacattgagtggacatgcttcacactcctcatctttaattttttacatgtgtacattgattattacatcaatgaatttattttaaagaagaaacaaaagtcacaaaaacaatccaagaagatggcccttttgtatttccaaaacctaactataagatcacttcaaaagcaatagactatatttcctcctctattgaacctcagagttctagacacacattattcagcatccttgacttctatgccaccagttttcatcactggctcaggcttaggactgtttagcttaattctcatttacatgttatttatgcattaattcatgaatattaatattataacccatgtaaatataatatccaaacagtaagagcatagaatattccacaactttctatataatctgccactttgatatatctttcatgaattatcctcaatgtgtcataaatgagctagcaaatatactgtttcaaccaatctcatatttatcattggctgaggttggccttttggataatttttcacacattcatgatattatgaataccctttaaaaagtctcttagagaaagacatgaactttattactcacactgatctctatgctcctaaccaacagtggcaaccacaaatctcatgaccatgaatgcttaggtcggctcaagtgcatccattctgcagaatacaaagagcaggtaactcttttagaaaaaattcaaaccttatctccattgatcctttccatatttctgttattcagttatttttatattgattaatttttcagaatggaaatgttttctctcataacaaaaggaacaatgtcaaatgagacttaaccagaaaatgaaactgactcttacttattaagagtctagatgaaccttagccaaagagctgatactcatgatccatttcttttttttttttttttttttttttttttttgagacggagtctcgctctgtcgcccaggctggagtgcagtggcgggactcatgatccatttctttaaggggcatctgtgtttaaaatttttagtgataatatttcttacatcatcatgtatattcataattgaacaatgattcacctttatttattcttgtttaattgttctatcatttatctattgatgatgaacctcaatctattaatccaaagtaagaatatgatctttgcacatttctgatatctatccaattatgttttctgttggacctcagagtttcagacacgtagtattcatcgtccatgactcaaacgcca

SEQ ID NO: 1885834 - DNA, 4001 bp, Homo sapiens
ttactgacttgggtcacaagcttggtctatttttattaatggatcataacatttaagacatgtcataataattcttgttccagtaaatatactcaaaatgagaccacacttagacatatgtatctatattaacttacaagatgtttatgcatacttatccactgataataaaattagtatgtgttaacaatccaccatagcccctaagcaagtttcttgaatagtcttaatatctgtcaatgggttcatttccaagagagataatagacaaggtaatataataggctaggtctttttttgtaacgaactacaaaaatgttgtgaaatataataataatcatgtttgtctagatttgatttcagttatgtcatggtccatgcttgaaccgttttgtttaaattatatagtctatgaagatgtaacaataagccggaagaatattccacttgaacccactatgataatgacaagtatttacttcacatgtgctccttcctcagggagttcacagactaggctatctagcaatataggaacgtttgtgtaaactatgaaaaatgctaaaatgggatattaaaaatgtcccatttttagtttatctataaaatgactaaaatgacatcaatctttatcttttcaaaattgtccacagttgtactgaattacattaattataatccttagtttataacagactctcactttttgtcccctttgattttctttaggtatgtggccatttatctaccttctatagtactatgaacatcaatgaacaggcaaactacccaatcaaaaacaagaatgtcaactatgacttacataagaacacactccttgtcctctggggaacagtcaataccaccgtcgctacaggatgatcaatcacccatgaacatcaaccctgcgaagtacaaagtagatgttacaggtaagaaacaacaagattcaggctgtgtctgaataaatatgaaatgatcagggttaggttcatctcaaacattggttcacgacactccccatccttagattagattcactctccttttatttattgaattatttaagttatgaattttacatcaatagtgaacattcttgaatccatcacctgcattaagaaaaacatctgactatgggacatattggccccagtgccgccactcaaacatgtaatcgtcttgctattctctgcaagttagctttgctttacagaatcagcttcttctcattcctggctttataacacagtctcatgagtggtcagttcttgatctttttatctattaactcattcattattagtctaaatgagtttataattcaggaacaaacgaattaatttttccaaccagctattccttttcaacaaaatgagtaatcttttcattttcagaaatctagaacagaaatgcctatccgaccctagtaaaatcctacaatttgtttctaactaagagcaactttatagaggacatacttagtccatacttggttccatttttcttcgtgtattcatacatttctttggttatttgtgcactaatcaacttatgaagatataatcgatagctacgaaacacaatcggatctttgctatttctaatacagaatacaggctattatttatgttacctgcatgatttttaaccaggtgtaacagcctgaaccattggttttttaatgacattcagtgtcttcagtgtacatacacgtggattctcttgccaccacatctttccataatttgatgatgcttcaccctatttacctttatgtatttgtatccatatgttgatccttttattgatcaatttattatgatagagtaaaaactcatttaaaaaggccaaataagatccttatatattcttaaataatctataggattatttctaaaagaggcaataacctagattccttccttcttggacctcagagttccagacatatattcaccaaatatgatttatacgccaccagtggacatcattgatccaggcttggctctcattttcttcattcatatcattgaataatacatcaaaaatctaataatactaaaataaataccaagaatcacaaaaactagaagacaagattcttgaatatttctaacatctgcctatggaataagcagaaatataataatatttctaacatctgcctgtagatcaactgacctcaaggcttcatatataataattacattttttacatttgggtaatggttggcagtcactgattacattttgcacttactgcatacccttcagaagaacactgaaactgagacaagaagtttgactattacgtcagtctccatgttcctaacacatggaggcaaccactgatctcatagccacagaacaccaaaatcagcccgggtctgtccattctgaggagtacagagcagactaaaaacattgagacctaatctctgttgatcctgcctttctgcatagcatttattcagtgatttgggtatttactaatttttcatattataggtgtctttctctcttaacagaagaaacaatctctgaccaagaaaataaaactgactcttacttgttagattctatataatccttagtcaaagaggaaacactgtgatccatttctttgataagaggaatcagtatctcctatttttagtaataatttatctcatctcctatattcatagctggacactgtagcttaaatctctacttgtaatctgtttatatttgtttaatggttctatcattcatatattagtaataataaacctaaatctatgaccccaagataagaaaatgatctttgtatgtttctgacattgtctacaggatcatttccaacagaagcaaaaacctagattcttttcttctcatattcatcatccatgacttatatgccaccagtggtcaccattgattcatagttgggtctctctttcatcattcatttctaaatatttattgaataaatcatttcttctttgataataaaatgaatacatgattttgaaaacccaagaacaagatatttgaagaatccttacatttgtctatacaataatttcccacagagactacatctctttcattaattaacctcaatgttgcacattgtcattaagccaattaactttttattatattaaataatttttaataatatcaggaataccattaaacaacctaaaccaagacaagaaccattactcacattggcctaacacagaggcaacatagccttgatcacagcaaaatgatcagctcattgcatccatcctgaaaagtgcaaagcagagaagatgattaaaaaattgaatattctttacattaatctatatttttcaccattcatttacatagtcatttgagtatttattaattttttcttaatacaacaaatgtgaaacttgcaactaaccattacttactgctatctatatgatccttagtcaaagatgtattacacttggtccattaattatccaaccatttcaatttatattagtattgtttctctttactacacatttcaacaataaacaatacttcatcctcatctatattcatttatacatgtttgtttattcttcgttgctattttaataatataatatttttaaaattcataaacataaagaaaaagaacaaggttcttgtatttccctgacatctgtctacaggagtttttcagacagagggactaggctagatactgcttgtgatggacctcagagttctagacacgtattcattgtatgactcataggccaccagtggtcatcatcaatccagccagaattggccctctttttctccttttatttgtaagctgtttcctaatgattcattagttcactaacaataacataaatacctctggatcaccaagttttaaggacaagatccttaagtattcctagtatctgtctacataatcatttgcttcaattagtatattaatacttccttcattcatcatgttcattgtttaaaat

SEQ ID NO: 1885835 - DNA, 4001 bp, Homo sapiens
tgttttcaatacatattaataatatatcctgccatacctgaacaatgcttcatccactttatctttatttatatacttatttattgattctcacattgatccaattataaaaatagaatgaaattatcacaaataaaaacatttctgaattatttctgtagcatcatttgaaacagagagaatgggccatgtatcttttctaacagacctcagagtttcaaacatgtattcactgtataagactcataagccaccagtggccatcatatcatcaatccaggattggttctctttttctcctctcacttccacattatccattgattagttaattcgttcactaataattttaaagccctatattcacaaaacccaaggagaaacttgatatttctagtctgtatataaagtcatcttatgtcatcatctctcctttattatcttcagtttttcatatacccattaatttatatagtgctttatatcaattttgtcactgcacaacaattggtcttctttgattataattcactcttttcaataatatagtgagtgaataataatacctttaagcaaacaacccacaccaagaagcaaactttgatgattactcacattggtctccatgctcctaataccctgtggcaaccataaggcttctgaccatggaagcgtgcttaaatcagtttaagagcatccattctaggattgcaaagcagaacatgtgatgaaaaaaatgaagaccttatctgtatttatccctcctttccaaatttcattgacttatttattaatttttcattatatatgtgtattctttctctctgtctcaacaacaggaacaatgtcaaacttgcaaccaacccagaaaataaaacttgattgatacagaaagcctcaatgttttatatatatcaaagaacataatttacatcaatcccaacttcattactggggtgcatttggccctgtttgatatttcatatgccattatataatgaatacccttagataaaccacgcaaaccaagacataaaatgtgattgttactcacgttggtctccatgctcctactgcagacagcctccaccttgaggaatataaaggagaaccagtgattaaaaagttgagacattctctccattgacaatggctttccaactttcatttatttattcacgtaaatgtttactaattgatgttattatttgtctcttctaaaaataggacaggatggtacttgccattgatgcagaacaataacactgactgttacttatcactgtctataccaatggtccccaacatttttggcacccaggatgggttttgtagaagagaatcttcccacggaccagggcagggaggggtggtttccagatcactgttctacctcagatcatcaggcattagattctcataagtagcatgtgaccttgatccctggcatgcaccattcacaacaggttctgctcctatgagaatctaatgccactactgatctgacaagaggcggagctcaggtggtaatgcttgctcccctgctactcacttcctgctgtgtggcctggttcctaacacaccaggcactgatactggtccgcagccctgaggttagggacccctggtctatatgatactgtaccaaagaggtgacacccttgatccacttatttacttatggaccttaggactttcaaattatattaatagtatttcaggcctcacctcacatttcataattggacaatgtttcaccctcttcatcttcatgcaattgtatatattttgtcattgattgctttgtaacaatacaatcaaaactcatgaactacaaaagtccaagaacatcacctttgtgtataactaatcatcctacaggactacatccatcaaaaataacagactagatctctgtctaggtactaacctcagagtctcaggcatgtatttattcatcatctgtgactaaatatgccacaagccatcaccactagttcaggatttgacatctttttcctcatccatttctatatttgttgatttattagttcttcaatagattaattacaataaaataaatgtacatgaaccacaaattccacagaacagtattcttaagtatccataactgtctacagagtaaattcactcagcaaatataaccttcattaattaatttgtgttgtatatatccactaattaacatacatttcatatcaatgccatagtacaccatagtcaacttctttgactaaacattttgtaaacagtacagtgaatatttttaaacaagccactcatactaagacacgtgctttgactcttacattggtttctatgctcctaacacataagagttcatggccacagtagaatgcttaaatcacctaggagctttcattctgaggaatataagcacagcaaataacagaaagctgagatattctttccactgatacatgccttccccatttcctttgctcagtcatttaggtatttattattttatggcataatttatttttttccctctgcagtaagtggccacttgaactcatcactgactcaaagcaagaacatacatcacaatcttgcttacttatccttaccccaaaatgtaacccctttgatgcattaaggggttacattttggggtaaagatagcattacttactgaactccagtggttctatgttatattaataataattcttgcctcaccccatactttcatagttagataacttcattctattcatttttatacactgacatatttatttattctttcacttattgaataacaacaaaatcaaaatccatgaagcaccaaagactgagaacctgattcctgaatatcactgaaatctatctgtaggcattcctacagatataaacacttaaatccctctttgtagtggaccgcagtaggtcacagatattttgatcataaaacacatttcagaatgtattccactcgcatcgttggtccttccttagccttttttcacataatttgtatattctttctacataaacacgactcaaccaccagaagaaaacgctgacaagtgcttctagttcctatgtgtcccttcttcgtaacttacatctttatcacttgaggaatgcttagggaaaacctgcagtagaattctaaacagagcaatttgtgatagggacttgatcttttttaaaaaccatcctaaataacactaaatcaaattaatcctaaattttggttcttcatcgttagtataggcttgtccttgtttgattttattcatgtatgtagtcattcactcattttaaagatgtacaatgaacacccatgaaaacccactcaacggacaaagactgtgccaattccactgatttctaatctcctaaaatgtagcagtatcctagaaagcctggtcttttcagaatgcttaactcacctaaggtgcatccattttgtacaatataacaatgatgttatataaattagacatttctccattgagccatgttgttcccctttcatttacttagacttttaaatattaattgggtggggtgcagtggctcatgcctgtaattgcagcattttgggaggctgaggtgggcggatcacttgaggtcaggagttcaggaccaggctggccaacatggtgaaaccccgtctctactaaaaatacaaaaattagccaggcgtggtggcacacgcctgtgatcccagctactcgggaggcagaggcaggagaattgcttgaacctgggaggtggaggtttcagtgagctgagatcgcgtcactgtactcctgcctgggcaacaaacagagtgagactccatctcaaatataaataaataaatattaattgcttaattaattaattaccttctttttctcaataaaataaacaaactggaacttaccactgacacagagcaaggacattaactatttcatacatttttctcagtgattctgaaaatatttctcaggaggcagcat

SEQ ID NO: 1885836 - DNA, 4001 bp, Homo sapiens
ctcttaaacaaaccacccaaacaaaggtaaggactttgactattactccccttggtcttcacgctccttcctaagcgtggtgcaaacagagtatgtgaccttggaggcatcctcaaatcagaacaaggacatccattctgatgagtacagagaagagaagatgaaaacaaatttgagacattgtcaccattgtttcttgcttttcacccataattagtcatttatgcaatcgttatttggacttcatattaatttcattttctgttaaggaaatttcatttcattaatcatagtaatttcattttctgttaagaaaatgaacaatttcaatcttgctactggcccagaatctgaacactctctataattatactggctatatcatcattggccaaagaggtgacaggcatgtcccatttatttctctttggacttcatgttttcaatacacatgaaatgtttcttgcctcactacagattttaataattgggcaatgattaacattattcatctttttatataatatatataaattatatatataggttctcacattgagcaactataataatgcaatgaaaataagtaaaaacaaaggccataaacaaataaattctgtatctctgacatctatacacataggatcatttcaaacatacggaaggagctctacttctgtgatggacctcagagttccagacacgtattcatcatgtaagactcatacgccaccagcagtcatcatcgatccaagattgatcacctctttttccactcatttctatcttgttcactgactgacttgttaactcactaataagtctctatggttcaaaaaaaaccccaagaataacctggatgttccatatctgtatctagaatcattctaacattgatatatctgttttattaattgtcttcagtttttcatctatgcattatcagtataatactttatataactctcatatctatcattgggataataacattggccgtctctgtattataaactttttttttttttttttgagatggagtctcactctgtcgcccaggctggagtgcaatgatgcaatctcagctcactgcaacctccgcctcccgggttcaagtgattctcctccctcagcctcctgcgtagctggaattacaggcacccaccaccatacccagctgatttttgtatctttagtagaggcggggtttcaccacgttggccaggctgatctcaaactcctgaccacaggtgattcacccccctcagcctcccaaagtgcttggattacaggcatgagccaccgcacccagcctattacaaacttttttataatacatgacatactcttcaacaaaccaccaagacaagaactttgatcattaatcacatgggtctgcatgctccttcctaagcacggtgcagaggaccatggaagaattcttaaaacagtacaactacgtccattctgaggagtacaaagcagagatgatgataacaaatttgagacattatcaccatttatctttgcctttcacctttcatttagttggtcatttaggcagtaattttctggagtatacttatttcattttctcttaagaaaatgaacaattttgaacttgccactaaccaaaaaattgaacattgtctataattatactaactatgtcatcattgtccaaagaggtgacaggcatgtaccatttatttctctttggacgccactgttttcaatacatattaataatatatcctgccatacctgaacaatgcttcatccactttatctttatttatatacttatttattgattctcacattgatccaattataaaaatagaatgaaattatcacaaataaaaacatttctgaattatttctgtagcatcatttgaaacagagagaatgggccatgtatcttttctaacagacctcagagtttcaaacatgtattcactgtataagactcataagccaccagtggccatcatatcatcaatccaggattggttctctttttctcctctcacttccacattatccattgattagttaattcgttcactaataattttaaagccctatattcacaaaacccaaggagaaacttgatatttctagtctgtatataaagtcatcttatgtcatcatctctcctttattatcttcagtttttcatatacccattaatttatatagtgctttatatcaattttgtcactgcacaacaattggtcttctttgattataattcactcttttcaataatatagtgagtgaataataatacctttaagcaaacaacccacaccaagaagcaaactttgatgattactcacattggtctccatgctcctaataccctgtggcaaccataaggcttctgaccatggaagcgtgcttaaatcagtttaagagcatccattctaggattgcaaagcagaacatgtgatgaaaaaaatgaagaccttatctgtatttatccctcctttccaaatttcattgacttatttattaatttttcattatatatgtgtattctttctctctgtctcaacaacaggaacaatgtcaaacttgcaaccaacccagaaaataaaacttgattgatacagaaagcctcaatgttttatatatatcaaagaacataatttacatcaatcccaacttcattactggggtgcatttggccctgtttgatatttcatatgccattatataatgaatacccttagataaaccacgcaaaccaagacataaaatgtgattgttactcacgttggtctccatgctcctactgcagacagcctccaccttgaggaatataaaggagaaccagtgattaaaaagttgagacattctctccattgacaatggctttccaactttcatttatttattcacgtaaatgtttactaattgatgttattatttgtctcttctaaaaataggacaggatggtacttgccattgatgcagaacaataacactgactgttacttatcactgtctataccaatggtccccaacatttttggcacccaggatgggttttgtagaagagaatcttcccacggaccagggcagggaggggtggtttccagatcactgttctacctcagatcatcaggcattagattctcataagtagcatgtgaccttgatccctggcatgcaccattcacaacaggttctgctcctatgagaatctaatgccactactgatctgacaagaggcggagctcaggtggtaatgcttgctcccctgctactcacttcctgctgtgtggcctggttcctaacacaccaggcactgatactggtccgcagccctgaggttagggacccctggtctatatgatactgtaccaaagaggtgacacccttgatccacttatttacttatggaccttaggactttcaaattatattaatagtatttcaggcctcacctcacatttcataattggacaatgtttcaccctcttcatcttcatgcaattgtatatattttgtcattgattgctttgtaacaatacaatcaaaactcatgaactacaaaagtccaagaacatcacctttgtgtataactaatcatcctacaggactacatccatcaaaaataacagactagatctctgtctaggtactaacctcagagtctcaggcatgtatttattcatcatctgtgactaaatatgccacaagccatcaccactagttcaggatttgacatctttttcctcatccatttctatatttgttgatttattagttcttcaatagattaattacaataaaataaatgtacatgaaccacaaattccacagaacagtattcttaagtatccataactgtctacagagtaaattcactcagcaaatataaccttcattaattaatttgtgttgtatatatccactaattaacatacatttcatatcaatgccatagtacaccatagtcaacttctttgactaaacattttgtaaacagt

SEQ ID NO: 1885837 - DNA, 4001 bp, Homo sapiens
aaaaagaatatgattcttgaatatccctaacattcatccatataatcatttccacgaagaccatatttctttcattaactgagctcaatgtttcacatatgcattaattaacctaaagtttttaatccagattttaaatattgcatatttccccttcttttattgtgtttaatactttttaataatatagcaaataacattttaaaatggtcaaaacaagaaggagcattaacgattacccacattggtcttcatgctcctaacacatagatgcagctatagagcttgtaaccatggaatcggctggcaaacatccatcctgaggctcacagaggacggcagatcacaaacagataaaacagtcctccatgatctgtgtttatcatcttccctttaggaaaacatttgagaaatcactatctgaaggataattatttcattttctcttaagaaaatgaacactttgtgcaactttccttgacccagaggttgaccattatctataactaccacctgtatcatccttagtcaaagacgttacagtggggtaccatttatttcccttaggacttcaatgctttaatataatattttaatatgttatcatatttaatatatattaaatattgcattaattatatattaatattagatttttatttaatatattaaagctttaatataatgctttaatataataataataatacatcttgcctcaccacttattttataattggacaatacttcatccccttcatatacgtacatgtatacgtataaattatttcattgatccaattataataatacagtgaagtgaacaaacccaaagaccaaaagcaaacacattgtatattcataggatcacctgaatcagaaggaatgggccagatttcttttgtgatggacctcagagtttcagacatgtattcatcatgtgtaactcatacactaacagtagtcatcattgatcttctttttttttgctattcatttctaccttgtctattgattatgtcatttattcattaataatactttcaaggcccgtgattcacaaaacccagtaacactcttgatattccctatcagtatacagaatcactcaaacattgggtgtttcattaactatcctgttttttatatatgcatcatcaatataatacttcatgtcactcccatatcactggaataacattggccatctttgactgtatttcacacttttaaataatacgttgattactcttaaacaaaccacccaaacaaaggtaaggactttgactattactccccttggtcttcacgctccttcctaagcgtggtgcaaacagagtatgtgaccttggaggcatcctcaaatcagaacaaggacatccattctgatgagtacagagaagagaagatgaaaacaaatttgagacattgtcaccattgtttcttgcttttcacccataattagtcatttatgcaatcgttatttggacttcatattaatttcattttctgttaaggaaatttcatttcattaatcatagtaatttcattttctgttaagaaaatgaacaatttcaatcttgctactggcccagaatctgaacactctctataattatactggctatatcatcattggccaaagaggtgacaggcatgtcccatttatttctctttggacttcatgttttcaatacacatgaaatgtttcttgcctcactacagattttaataattgggcaatgattaacattattcatctttttatataatatatataaattatatatataggttctcacattgagcaactataataatgcaatgaaaataagtaaaaacaaaggccataaacaaataaattctgtatctctgacatctatacacataggatcatttcaaacatacggaaggagctctacttctgtgatggacctcagagttccagacacgtattcatcatgtaagactcatacgccaccagcagtcatcatcgatccaagattgatcacctctttttccactcatttctatcttgttcactgactgacttgttaactcactaataagtctctatggttcaaaaaaaaccccaagaataacctggatgttccatatctgtatctagaatcattctaacattgatatatctgttttattaattgtcttcagtttttcatctatgcattatcagtataatactttatataactctcatatctatcattgggataataacattggccgtctctgtattataaactttttttttttttttttgagatggagtctcactctgtcgcccaggctggagtgcaatgatgcaatctcagctcactgcaacctccgcctcccgggttcaagtgattctcctccctcagcctcctgcgtagctggaattacaggcacccaccaccatacccagctgatttttgtatctttagtagaggcggggtttcaccacgttggccaggctgatctcaaactcctgaccacaggtgattcacccccctcagcctcccaaagtgcttggattacaggcatgagccaccgcacccagcctattacaaacttttttataatacatgacatactcttcaacaaaccaccaagacaagaactttgatcattaatcacatgggtctgcatgctccttcctaagcacggtgcagaggaccatggaagaattcttaaaacagtacaactacgtccattctgaggagtacaaagcagagatgatgataacaaatttgagacattatcaccatttatctttgcctttcacctttcatttagttggtcatttaggcagtaattttctggagtatacttatttcattttctcttaagaaaatgaacaattttgaacttgccactaaccaaaaaattgaacattgtctataattatactaactatgtcatcattgtccaaagaggtgacaggcatgtaccatttatttctctttggacgccactgttttcaatacatattaataatatatcctgccatacctgaacaatgcttcatccactttatctttatttatatacttatttattgattctcacattgatccaattataaaaatagaatgaaattatcacaaataaaaacatttctgaattatttctgtagcatcatttgaaacagagagaatgggccatgtatcttttctaacagacctcagagtttcaaacatgtattcactgtataagactcataagccaccagtggccatcatatcatcaatccaggattggttctctttttctcctctcacttccacattatccattgattagttaattcgttcactaataattttaaagccctatattcacaaaacccaaggagaaacttgatatttctagtctgtatataaagtcatcttatgtcatcatctctcctttattatcttcagtttttcatatacccattaatttatatagtgctttatatcaattttgtcactgcacaacaattggtcttctttgattataattcactcttttcaataatatagtgagtgaataataatacctttaagcaaacaacccacaccaagaagcaaactttgatgattactcacattggtctccatgctcctaataccctgtggcaaccataaggcttctgaccatggaagcgtgcttaaatcagtttaagagcatccattctaggattgcaaagcagaacatgtgatgaaaaaaatgaagaccttatctgtatttatccctcctttccaaatttcattgacttatttattaatttttcattatatatgtgtattctttctctctgtctcaacaacaggaacaatgtcaaacttgcaaccaacccagaaaataaaacttgattgatacagaaagcctcaatgttttatatatatcaaagaacataatttacatcaatcccaacttcattactggggtgcatttggccctgtttgatatttcatatgccattatataatgaatacccttagataaaccacgcaaac

SEQ ID NO: 1885838 - DNA, 4001 bp, Homo sapiens
tacagaatctaagagaaatatacgcatggattctgatgacaaatagttaacatcaaactgagcatttaccgtatgctttacccacacccttactaatttaatcttcaaaataaccaccctgagtcaaatactattgccatcctctaaaatataaaactaagacatagatattaggaaacttgccaatgctgcataactggtgaagtgatagagcatgcgtttgaactcagtctgactccagaacccatatatatactatacaatgctacttctcaacatctttaattgactcttttttttggagacggaatctccctatcacccaggctggagtatagttgcgctctctctgcttactaaaacttccacctcctgggttcaagcctcagcctcctgagtagctgggactacaggcgcacaccaccaggcccagataattttttgtatttttttagtagagatggggttttgccatgttggccagtctggtctcaaactcctgagctcagacaatccacccacctcggcctcccaaagtgctaggattacaggtgtgagccaccacgcctggcctcaactgacttttaaaaagtgaaatttagccgggcgcggtggctcacgcctgtaatcccagcactttgggaggccgaggcgggcggatcacgaggtcaggagatcgagaccatcccggctaaaacggtgaaaccccgtctctactaaaaatacaaaaaattagccgggcgtagtggcgggcaactgtagtcccagctacttgggaggctgaggcaggagaatggcgtgaacccgggaggcggagcttgcagtgagccgagatcccgccactgcactccagcctgggcgacagagcaagactccgtctcaaaaaaaaaaaaaaagtgaaatttatagcaccttagcagctggccatgaagtcacaaacctgaattttcaaagactcatatatatggcaaagcttctcaatctcaacgtaagccttaccataaaagaaaaacgcagtactcatctacagtatatccaggatttacagcaccaaagaggtccagactggaacagcgaaactcagatctggtttcagtctcttgaaattttactcctgcaaaagacaacaaaagctaaaaaattatttcaagtcctgatgttactttgagttgtttgtatttcctgtatttcacccttctttctacctaattctctgctgaaaatgcaggcacgggtaaagaatataagcttgtcctaagttacctaaaataacttttaaaatattacaatacatgaatacaataaaattagaaaataggtttataataataaaagattacttgtagaacccaattctagagaaaataaccccctagtattttagtatatatgtcctttcagttttcttaagcaaacatatgcatataaaaatatttaagcagaaacatattgctctatataatctgtttttcatgtgtcatgaataccgttctatttcaataaacataaaactgtatcataacttttaagtgattctatagtgttgtaccgtatagtcttcacaaaattgatttaaccaactctgtgtttcctttaatctacatgtatagattgataaaataatgattagtttaaaactgccaggctaaattgcctatagaattataccagttgccagtgctttttctgtagtgtttgaacttttagattaatgattcctgaccctagttctaactcacaaaagtgattttttggggatatagagatatcacaaaagatcaaagcacaacaaaacattagtctcaaattcataatttattaagatttaagaattacctgggattacagactaaatcccagtatgaattccaacaagcagaattcaattgcaggtgtttgcccctagctttagtctgctcagagcatgtgtttaatcaggctgatcagctgaaacacggacttaacatgcatttcatcatggcaaactgtaaatgactgaggaagggcaaaccagcactggctcctcatccctaaacaggaaaattctcctaaggttagaactggggattttttttaattaccaaattccatccactaataacaccgagtcccaagtcttgctaagtgattagaaatccaaatgaggtaaaaacgaagattttgctcttactcttacctctggcatcacatgaatccagcttctatctagaaatccagttgaaccacaggatctatcaattatctaggatcatttctggaaaatttaaaaaacataaataaattcacaaaggttatgattacatgacaactcacaccagcatgttctataccaagtcacaagaaaatttagagtaaccgttcatcctttatttaactctccattcattaatataaattattgactcatctatttggagaatgtcaccaaatgcccaagctcaatatcaaatagggcaggatcaggagttcaaggttacagtgagctgtgatcgtgccactgtactccagcctaggcaacagagtaagaccccgtctcgaacaaaacaaaaaaaatttaacaacaacaacaaaaaaaaaccgagcaggacccctacacaagcttaattttgtataaatttacaagcttggataaaactgcacaatagtctaaccaacttctgaaaggctataaaggtcaacaacctcacagtaagaaaacagttatgcaagaggaaggagtcaagaacttttaagattcagataactgagaaaataatccaaaatagtcagttttttcaaagcatgtttcaatttcatttgagccaatgccggattgtatttaacctttactcttcgtaatcctttgtcaaaataatctgaagaaaatcttccctttatataggaaaattgaattagtaacatttgtaacccaagtctgccacaagatggcagtgtaagaaagagtcttgctttaatttcctcttccagcatttgcgtgtcatctgaactttcaggtcaaatacatactagatacgcagttcatctttgcaggcaaccttcacactattccctactcttcacctaattactagctagaaaattttttgtatttacttgtaatgatcatctaaaacttgttagctaaaaatactgcagttatactttcatcattatgttctttttcatgcagcagtgtggagatttaaaaatccataacctcagatacaatctagccagaaagacaagactcacagaaattaacataccaccaaataagtagtagaaagcaagtaaggttaagaaaagaagtaggattggtcaaggaaggcttcatgaagcaaaaagagtgggtcacaagtggaccttaaagttgcatgtccaataagtaaccacttaattagagttaaaaattaaatttctcccattaccctagtcacattttcattactcaatagctaaattggcagtacaaacatagagcatttccatcataacagaaggctccattggacatcagtgcctttaagaatgggtctaaaataagctgacagaaaagaaagcagtggctatcattctttagaaatcctatctgtcaagctgtatagaatttgtatcatttaaattttacaaccccctatttacaggaaaattgaggctcagaaaaattacataaatttcctaaggtcacctaactagtaagagctaggatttaaattcaattccatcaaaactccatactcttcaattcaccatggtacttcctacaggaaatacacagagctaaaggtttgctttaaaatgtaatgcagtgacatgctagctcagtaggttggaaagaaactgaagcattttaaatatctcagacagatatgatcaaaatgttattttactccttccttgccctatacttagctttaactatgtaaaatgttttcagatcagcaggatgcaaggttaactaagagaatgtagacaagaagcaagacatggtgtgaaaggtttctccagttttaacaatgtct

SEQ ID NO: 1885839 - DNA, 4001 bp, Homo sapiens
cctactggagattaatcccatccatctttattgacctatatattaaatatttgggtttcagggttcaatccttatcccatttcccttttcacaggattgctccttcctgccttctctcattcagtcatggtttaaattgtcattctaaaattgggaaaacagttttgaaggaaagacaaaccttatgccttcctgttaagtacatatacatttacaaaattgaatttacccccatatatatctgaggaaaaagtaaactaagcgaacattttaaaatttaacaatgtattaatctatactaatcatcaaatccccatacaaaaatatcaatgctcatttatcattcaaataggtaatataactaatatcttacttattaacatcggaaccaaaatcttcaagaaattccacttttctctgagaaaatgtaattctcattttaataggtaatgaaccatgtacagctttgtcaaaacaatttaggatattttcttcattttgtttgaggtcaccactatattccatttcaagtaaattgaggtataactttgtgttctcctgtgtaaaaagcagcatcaatgaatatttctaaaatatttttattagagcacagatatttaaaatgccttagtttttatgtctcaatttgaaaaaatattgaaaattgtattaaaatacaactcatgctaaatgttttcagcatatatctaaaggggtgaaaaaattcattaacacactgatgaatttttcaatcagttgatcatcctagtacctcctaaacaatgcaaattgttcaatgacagtaaattaaaactctatagcctatcttgtatttagtatgacatgacctaccatgacaattagaaaacaaaacataaaaaaaaatctctatgcttcaaataatttaaatctttactacaactatagataaacatcttaaccgggcgtggtggctcatgcctataatcccaccactttgggaggccaaggcaggaggatcacttgaggtctggagtttgagaccagcctggccaacatggtaaaaccccatctctactaaaaatacaaaaattaactggcgtggtggtgcacacctttaatcccagctacttgggagcctgaggcaagagaatggcttgaacccaggaggtggaagctgcagtgagctgagatcacgctactgcactccagcctcaatgacaatgaaactctgtctcaaaaaaaaaaaaaaaaaaaaaaaaaaagcccaggtgcagtggcttacgcctgtaatcccagcactttgggaggccgaggcaggcaaatcatctgaggtcaggaattcaagatcagcctgaccaacatagtaaactgtgtctactaaaaatacaaaaatcagccggacgcggtgatgcatgcctgtaatcccagctactcgggaggctgaggctggagaatcacttgaacccaggaggcagaggttgaagtgagccaagatggcaccactgcactccagcttaggcgacagactcaaaaaaaaaaagataaacatcttaaactgcagctagaagcaaactgctataaatctgtatcttaaacagacctggcaataactaaaatcctaaaacttgagaaattacctattacctatacactgcctttttcaattgatatataaaaaatataaaaagtactctatggagaagcaaaatcatctcacttctaaatgtgcttacaacataggcaacgcctatgcttttgtttatgaagtattctcccaagtcctctgttctacttagtaatcagtaaatttgttgataatttctaaagggaaaatataaagtatcacaatgtctacaacaattttaacccaataatcttaatgtctaaaacttttaattcaaaacaatttgaaaaaaatttttaaatggcaacatcagtttagagggactgttgtcctcatttagtaataaaatctattacatacagaccaaatctttcatcacagttgccacagtgaaaatacactgaccactggtttttttaatagaagatactcttaaaaatacaaatgcatactttgtctctttcgattgcttccaaaagcacctttcttgattttggaaggtttttctgtattttgaaaagatgccgggctagtttgacagcataaaatgaagattcattatttgatttggcattcttaatggcatcctgaagcaaatgttcagcttcttccagatttccatgccgtcgttctaaacttactcttcgtaaacgaaccattgccaatcctagaacacattcttcaaatgttttcaagatattcctggcttcattaatattacctagaaacagtaattaaatgtttatgctttggtttaaacaaccaaaataacgtttataaccagatactggcaacaatcacccatgggctaaatccagcaactaataatgggaaacagccatgcatatttacacactgcctatggctgtttcggggctacaatggcttacaaagcctgaaagtcagaacacgtggcttttactatctggccctttagagaaaaagtttgccaaactctgctttacaccatcccttaccactcaatttgtcactgtttcctgaaataacttaaaatctcaaaaatgtcaactgaatttctccactcttaccctgctgttcctcaaaagctgcccaaagcatatgcaccatgggtttctttgggagatgtatagtacaagctctgctgaagacatgcctcactccttcaatgctatggttttccatgtacttggcatactacatacagaaaagaggaaatactgaataatttacagttgaacaagccattaaatttgtgacagaacgataaaattctatttttaaacccattcagcacctttattgaaccactagactagtttctgtaaggaaggacgaagagaggcaacgaggttggcatatgcagcagtcaaatctggttgcaagcagaccatctcctaatgcaacagatatagttatatgaacaacattcaacagaagtacaaaaaaggttagtcactagatcaatgtttataatatattcaagtttaagagcacatgattttcttaccttaatccaaaactcctcatagagggcacatgatatgacacatctttcaaagagaaccacaactcgttcatgagtcccattttcaatttcaaattctaagtattctttccagttttttagttgtgccttttccaaaggtttcacatgaaagtaaggtcttttaatctgaaatgaaattgtaacatgccaatgaaagtaaaccaatatcaccaaaatatgcacatgtacagtgttaatacaaataattttaaatataattgatgattaaaatttttaatcatatttcataatttaaaaaacttttaaaattaacccttaaattccttaagctttacaaacaaatgaaataatacattttctctctattctgccattttgccaattacatgctttttaatgtacagaacattttatactttgttgaatattttaaaattgaacaaccatagtgacagaaagcagatcaatggctgcctagtgctaggagtggagaggggaactctggctggaaaggggccaaggggacctttggagtgctaaaagagttctgtatcttgattgctgtgatgactacaatgtatatacatatatctgtgaaatgattccatattctaagattccattcatatgaaaggccattatagggaaatctacagaaacaaaaagcagttggtggtatcttagcactgggggtagagggtcgcagctgaggaggtaggggtagtgacaactaaaagttaaggtgttattttttgaggtggtgattatgttttaaaattgactgtggtgatggttgtacatatctgtgaatatactaagaactattgaactgtatactttaaatgggtgaattatatggcatgtgaattatatctcagtaaagcagtcaaaaaaaaccaaagaatt

SEQ ID NO: 1885840 - DNA, 4001 bp, Homo sapiens
tttttaaaatgaaaataagtaggtttacttcttgaaatggcacaattccagaacagatagtcctaatcccccagagaaaagcacaggttctcaaggcaccttacaaagtatgccacctacttttcacaccagaaaagtcacttttggtattaagatgacaagaagatatattaatggcaagctcagacctttaaaatgtgagttcttgggctgggtctggtacctcagctgatgcctgtaatcccagcactttgggaggtgaaggcaggcaggcagactgagcccaggagtttgagaccagcctgggcaacatggtgaaatcccaactctaaaaaaaaaatacaaaaaatacattttgtgaggccgaggcgggtggatcacttggggtcaggagttagagattaggctagccaacatggcaaaaccccgtctctactaaaaatacaaaaatcagccaggtgtcatggtatacacctgtaataccagctactcgggaggctgaggcaggagaatcgcttgaacccgagaggtggggttgcagtgagtcgagactgcgccactgcactccagcctgggtgacagggcaagcatctcaaaaaaaaataaaataaataataataataataaaaggtgtggtggtttatacctgcacctgtaatcccagcactttgggagcagagaagagaggatggtttgaggccagggattcaagaacagcctaggcaacatagcaaggccctatctctacaaaataaaattctaaaacctagccaggtatggtggtgtgcacctgtggtccaagctactcagaaggttaagatgtcaggattgcttaagcccaggggtttggggttatagtgagctacgatagtaccactgcactccagcctaggcaacagagcaagaccctgtttcaaaaacaacagcagcaacaaaagtgcattcttaactctcttctcactgaaagaaccagagcccacatttgtatggtgcttttgactacataggcaaaagacactacgtggaaactgctctcatttacaggaaacggatggggtggataatacaaacatcatcaactgcctccctcttcccttcactagaatttaagaaacatttggttagtgacaaaacaaaaacttgaaaagcagaagttcacagctgaaacaggacttgaatatgcatcaaggaacatgttatgagcatcatagtggtcagtcctaaatgacatcatttcagctgtgtgtttccttattctcaaaaataagtgctaaacttagttgccactcctcaatgaaagctgagatctatctccaccctcaccagccaaacaggttagattttaattaaagtgcaattattactttatttaagaatatgtatttactttaattcaaacacttatgaaacatctattgggtataaggttctgagcaaaaagctgtggagctccaaagatcatgatgatcttgaacttccttttgaaaagttcacaacctaattcacagagaaagatatgtaaaagcagcaaggacacaaagtgtaaataggtaccacttcaaggacagcaaaagaccacaaagttctactttgtccttactatctatctggtgtctgtcatctagctttggcctcacccttcagaaagccagggaactcaggtgcctacttctacatcatttctggcatccatgaacttgtgtgctatcagtcattccgagattacaaagatgatcatcaaatctcagcatcccaagagtgtcagccacacaaggcgtgtcactcggagtcactgctcatgtgtaactatctacttttaaatacagggaatacattaatctgaatgaaacttggaggacttgtagttctatcaggtagtttaagtgagtacggtatttattaatgcaaaagaaaatgctacaattcattttcactcaaacccaaagtatcaacattcactaggtgaaccgctgttgacaaaaaatattgccatgattgtagtgaaaacataattttatgcacaaaaatagttcagaactttcaagtaatacctggaacataataacctttgaaaattaatctaaagaaatgcaattaaattttggttatttatgctaacacggtgaaaccccgtctctactaaaaatacaaaaaattagccgggtgcagtggcaggcgcctgtagtcccagccattcgggaggctgaggcaggagaatggcgtgaacccaggaggcggaggttgcagtgagcagagatagcgccactgcagtccggcctgagcaaaagagcgagactccgtctcaaaaaaaaaaaaaaaaaaaaaaaatttttttttttggttatttaattccagttaggccatcaacctttcaagaaaaaaagaaactctgtgtgggaatttgtcacatcttataaaggtcaattaaaagtagaacacaaactctgccacctaagatgctaaaaatgcctgtgtacttacataagatgtacaaacaagatgaaatagtggcttttatgattaaaaggctgcctgaacaaaagaaagtctgaatacttggcaaataatactaacaaagcactactccactaacaaccaaactgcagagaaaatagttcatttgatggaagcaactagaagggcaaggagagagactgaggcattggcactggaaggctggaaggattccatgaagtttttaaatgacctgctcaggagcttaacttagcctgcaggcagtgagcagctaccaaaaggtttattagaaattgtcacaatcaaaaccatatgtgcctgtatgtgtgcacacacacacacattattccccacccaccccccaaaaaatttcaatagtattgtgaaagacagcctgaaagaggaaaaatactgaataaagaaatactagtaataagatactattatatatatataaagaaatactagttaataagattgctgcaattttttaggtgagacatgactgggatctgaactggggtagtgggaataaagaaagaaatgaatgtaagggagacttaagagataaaactgacaacacacggaaaacaattaaatgtcatgatggaggaaaaatgggaccaaagtcaactaaaatccttggcttgaaggactggagaagatggctatactgttgtccaaagaaagaaactgcaccatcataaaataaatacactattctcagaaacagtatttctatcaatattacattcaactgacctttgaagttattaatagttatcttcaacagtcagaatcatccattagccacacagaggccggtcctagaaagagactcagctccaaatgggcattttgaaatttgtccatttagtttaccttaaaaaacgtcagtaaataatttaaatttgtcaaaaaatataagatattctacagaagaaacattccacaaatggaactaactcaagattctccataatgaatagcatttgctcaatgaatttcataatagaatctaattttaatgctcttgttaatgagttttagcattaactcattacatggcatttttaaatatagtaaacctttttaaatgacacatgtagcataatataacatatgataaactactaacaatgctactcaaaacaacataaaattatagatacacaacgtaattagggttaatgcttaagagcaaaaaaaaagtttttaccaaaaaattgtatcagttttaccataacaccttcttaatattcaacctcagataactgaccacttggaccaaactgctttgcaggacatgctcgtttctaaagattaacggactgatcttgaactgagaaaaaacacacaaacccaagtcaacaagtcaaagtacaagggtaaatgaacaaacaggggacaatagttggccaggagcataaaaattaggtaaaaataagtgaggcaaaagaaactaacacattttgagggtctgctagaagtctggcactgggctgagaaacccaagtgaactgatt

SEQ ID NO: 1885841 - DNA, 4001 bp, Homo sapiens
ggaagttggcactctgaaatcactttcttgtgtgtgtccttctatggcaccaagggatcaagaaaaacttctaaagaaatatatccccacaaaaacttggaaacaatcaactaaaagaacaagaaagtagaacctgaaaggtcagttcctattaacgactcaaagataatagaagtcaggaatttattagtcaaataatatctttcagtgtccagctcctccataaagttatccctgatctccccctactggcattacagtcctttccattaatattttctattctcaaatggtataattcattttccattttgtattataaattaaccaatatatttcaagattcagagaatggttgaagacttaaaactatttagtaatagagaaaagtgagactcaaatgagaattccttacctcatcatcttggtcctttgggggaccttggagtggtttatattcaggatcttcacaatctttatcaaagtcaaccctaaaattatggagaggcacaagaaaatgttaataatgtatcttctatcactaagggaacctaggatgaagacctagccacacatatatccagcatgaaataatctttattagtattatttttgagacaggtctcactctgtcgcccaggctggagtgtcatggccctatcacagctcaccgtagcctcaacctcctggactcaagcgatcctcctccctcagcctcctgagtagctgggactacaggtgtgtgccaccgcacccggctaattttcatatttttttagaagtggggttttgccatattgcccaggctcatctcaaattcctgggctcaaataattcacacgccttggcatcccaaaatgctgggattacaggagtgagccaccatgcctggccttatttttatttttatatatatattctttgacacagagtctcactctgtaggccaggctggattccagtggcatgatctcagctcactgcaacctgtgcctcccgggttcaagcgattctcctgcctcagcctcctgagtagctgggatctacacatacccaccaccatgccaggctaatttttgtattgttagtagagatggggtttcaccatgttgctcaggttggtctcaaactcttgggctcaagtgatcccatcctggcctagtcttttatttatttatttatttatttattttttgagatggagtcttgttccatcacctggagtgcagcagtgccatctcggctcactgcaacctccgcctcctgggttcaagtgtttctcctgcctcagcctcccaagtagctgggattacaggcatgcgccaccactcctggctaattttttttgtatttttagtacagacggggtttcaccttatttgccatgctggtctcgaactgatgaccttgtgatccacccactgtggcctcccaaagggctgggattacaggcatgagccacagtgcctggcctagtatttaatttcgtgtttacaggaatggcaggccaggtgcaaaactttgggtcagtctggtatagcatccaatggaatacaaataattataagaaattgacaatgtaccattcgtaattgcttgaatttgaaacactttgatcaacacagttcctttttcttgacttttattatgtaattcttcctcctacccaactatttactttttattatttcatttgtatggttcacgcttttttgtttttattactgtgttcttctgagcagacaggtggcataaacgatttgcaatgaataaataacccaatttcctttgagggtcctacactaggcaaactgagggtgtgatcgtcaaagagaaatttctcagtcatgatggaatggggaggtattcattaagccaactgtttcacatgcccctcagatcttcatgtgagaagttttgttaaactcactggcacccaaaccagggcaacactgccctacctggtggctcagtattagcatggcaactcatcattgggacatgttttcaggcaaaataagtacctttatgtgtcaggtaccattgggagatgataaaccagggctgaaagcgcctaaggctcttccacagaagcaacgtatgagagctgctggctgttatctttcaagagaccagttatcctctcagctactgtagctgtacagaagagtgttgtaaaccaaaccaaatagaacatcaaataagccatttacaagtgacattcattttcaccctcagatgtatcttatggcaacatgtggtttatgcagtttatggagtcctttctgctggtcctatttttgctaaggatctatcacttttgagtataattacaattaagaatcccattgggttcagtcaaggctagagttatttcacggcacaagttagagttttaaaagaacaaatactaatgcttacccttctactatgtcagagaagttatccaacactcgatgttctgctgcaattgctttgtcatctggtcggccagccttttctaggaaacataaggctgggtctgccctcatggtattatatttctcatagcctagaagaaaaagggtcatagttgaagaaaatgagatttgttttgcctttatgcttactttatatgctgctggaataattagaatatgttctatattgctcataatggaaaacaaagttagaatgttatcttggacaactactgggtttattactatatttaacatttttatagcaatttagaatcatgaagagtttttaactagtgactgatagccttaggctcccaaagtgttgggattccaggtgtaagccaccatgccttgcctgcagttttatttatttttatttatttatttattttttgagatggagtctcactctgtcgcccaggctggagtgcagtggtgcgatcttggctcactgcaagctctgccttccaggttcacgccattctcctgcctcagcctcctgagtagctgggactacaggtgcccaccaccacgcccagctaattttttatattttttagtagagccggcgtttcaccgtgttagccaggatagtctcaatctcctgatctgcacaccttggccacccaaagtgctgggattacaggcataagccaccatgcccagcacctgcaattttatttatcccattaaacgtctcaaaaaagatgtagattaagtgccattacttttattttatagaaaaaaaagtattcttttaaaaaaaagacattctaattcacaaagtcacttggctgaaagttaacgcttactgtttttagtgcctgggatttggcattaggcaaaactgctataagagtaaggaaatattcttacccccactgcatttttgttttggctagtcagtctcccttcttatactctacttttatttcactcaaaaactgctgcctcatacctatatcagagagactgctgaacatttagacaaatgggacatgtagaaaaacagaagattttcagctctttctctttagtgaggcagccaagctgacatagagatgcagatctctgtaaagaccctcacaggcaaaaccatcacccttgaggtccagccgagtgacaccagtgaaaatgtcaaagccaagatccacgacaaggagggcatcccacctgaccagcagcatctgatatttgtgaacaaacagttggaggatggccgtactctttcagactgtaacatccagaaagagtccaccctgcaggtggtgctttgcctctgaggtgacattattgagccttccctctgcctactcacccagaaatacaactgcgacaagatgatctgctgcaattgttatgctagtgcacatccagaggaaagtcatataaattaagtgtgattattattaacaatagttggggtatattacctgccctgattcatgggaccctaacttaccatagcatacagtgcggtaacacactgctaacagtgattagagaacagatgggaggctccctaccttgagatttacc

SEQ ID NO: 1885842 - DNA, 4001 bp, Homo sapiens
agaaattgctttaaaaccctcacttttcaggatgtaaaaactgaagaggttaaaggatttgtccaaaatcccttagttattcaatagaagaacagagtaagatctgaatgttctctctaacccatcttactaattcttaaattttcatatgcatcaagtactaaagttagtttttagaatgttatgctctcctagagatgaagataccacaggactgcaaaaatactgataaaaatactctgggccaggtgcagtgtggctcaggcctgtaatcccaacactttgggaggccgaggcgggtggatcacgaggtcaggagttcaagaccggcctggccaagatggtgaaacccaatctttactaaaaatacaaaaattagccaggcgcggtggcaggtgcctgtaatcccagctactcaggaggctgatgcacgagaattgcttgaacccggcgggcggaggttgcagtaggccaagattgcgccactgcacgacagcagagtgagactccgtctcaaaaaaaaaaaaaaaaccccagaaaactccggtttccttattggtgaactcaagataattcttcacacaaacaaacataggaaaaaagataaataacattagtcacaatcatcattgaaagacttgtaatctcacatctagtgtgggaatagagtggtaatgctgcaatttctctcacctttttcccatttctagagttagctgtctgtactggttccattcccaaacagttcaattctgccttattattttttttacatctttgccacttctgttttctgcgatcctccatatactgcaatagaaaaaatcagttatcctagaggaatagaaatcttctctggagtaattattaaagtactagtgtcttttgtttgataataaacacttattacatagataaaggattcatcctagtggaaaactgccattaagtgggatctctccaaaaaatattaggtggtttatataatagttcaatagtaaatatttgcctagcacttaaagtacttcaacattattttattttgggcatcacaacaattgtgaggttggaagactgggtattattaattattacccttatcttgcagatacagaaacgatgatacagtatgtcatgctttctctttctcatgcagcttaaataccaaaggaatgactttaaatcttgctggatgggactgccactcaccgctagaaatcggggatcaacagcaaactctggatgaccctgtaaccacatctccagttcagcccggcgaggggcatcctcacccaccagcaaagtaccatccaccttattgatgacagggatccgggtctccaggtccacatcaaggtgattaggctcttccatgcactccacctccagctgcaaacccagaatccacccccatgagcacatactcttctttgggggagggagggagggggagcagggccaatggtagtcatgaaatgactctagtattttccattcccccagtcccactgccttcatcaattattgggaataaaaagacaatctaatcgtcaggttaaagactttctctaccactcacctctactagcttctttctgttccccttcttcttatgaaacagtggatgtccatctcccattactccattcgccatcaacttgtgcttctggaatgttaacttcaatccttcctcctaggaagacaacccacccacccaagacatcatatggtacatgtttttcaaagtaaagattaagctttgagggatgtgggctataggtcatcctcttgcccaatgatggtgagaaggaaggccatctgactaaagggtaaaattagaaatacaagaaaacatacacactttttccttagaaagatttcacttcttcacctagtgcccctcagcatttacgagaaagagtttatttcaacaacacccaagttagggtaaaactccctacctggtgtctccgtattagcatggcaactcatcacaggggcaaaatcctgctattcctaagcatactaatttaagaaacttttgttgaatattaataggattaataatcaatagggttcaataaggaaaacaaccaggaaaaatgattcttcctaaatggatctttgtaagctctgttttctcatttttaaaattagctaaccaaatgagtttagtaacctattagtaaaattagttacagcaaggattccagcctccttccccacttcccaatgcccaaatgctgagcttacatctttgatttgaactgtaaactccttttcatccatgcctcggcgaagtttggtgaactgggctgccgctgtgctgactgcagatgcttcctcctctgccatggaagctgcactactacttcgtggtgtggggactggagagtcaccatattctccaggagtcaatgagggactgtctagcaagtggttgcctggccccaaaattcctcctgttaccatttcctggctcctacggctagaaggccacttccctgagagtacagcctggcagacgaggtcaatacggtttatcaggacacgatcctgaatggggaaagaaagaaataccattttaagagtctgagtactagctgtgtgatcctgtgatactcaatagtgccatcactaccaggatgggtaaaaatcataaggcagaaaagaggaagttaatactattaagattcctaagtcaactgggaagtttcctggaaaaaaaaaaaaaaacttgcagcaataaacacaattttaaaaatccagaaccatatgttcctttttccccggatatactgttacactgtatttctggactctacatgtccagggatgaggctgtttgttaccttgggccactcagaggctctttgtctttcctgcagtagcagaagctcaggggtcatttgttctccatcttcatttgggaatccatcttgggacatagtgagggacaggagactctcttcatcatagagctttgagcgggactggtcagctggtaagagagcccatagaatgtgtgagaaaagatggaagaataatgtcatatggtaatggtattatatgggctttgaataaaggcccaaagaatggcactcttttgacattttatcaaatcaaaatccaaatctctctcaagaggatgcatttagaaaagggaaagagaagagagggggaaatagggaagggggccaacagcctgtcacatgcactcacttagcttctcttccttctcatcctcactctcatcagtgctggagctggagctggatgaggatgaggaagaagaagaagatggtgacagcttgctcaagtccagctcagagtccgaatcatcctcatcctccagtttgactggtggaacactccgggaaaccagaggggtagtatcagagggggatactcgcatctcatagtcttgtggggttggtcggctcctggccaccacctcgtgctctagctttaaagtcagactctccagactggggacctgggtagctgtctcctcgggtgacttttcaacaggagcatctgggcgcaggggcagtggtgaggcagtgcgtgaggtatactgctggtgcagcagtggagtagagcagcgtgacaaggatggagctggtgctcctgcttgatggttctgcatataattcatacgggcagccagaaaagagaagtctgggtcctgcatgatgttgcagtctgtttggctcaccccatggcgggctgcccctcttagaagctccccatcatgccgaacaggctcccaccatttgggcaattcaggaccaggaggctgacacaatgccagccgatcttccaaaagggggtggcataaaacttgttcccgtaagcgccgaagcaattctatacggtagagagtccgtgaggctctctcctcagtgatgggctcaatgaacaggttagggtcggggggttctgcaagagacaggagtagaagaaattaacagagttgcttctgttggcatccatcctca

SEQ ID NO: 1885843 - DNA, 4001 bp, Homo sapiens; identical to SEQ ID NO: 1241731

SEQ ID NO: 1885844 - DNA, 4001 bp, Homo sapiens
gttgggtggaggttgggggctcccaggttacaggtagatttaaaattgactggttgacaattggttaagtttatctaaagatctgggctcaatagaaagaaaatgtctgtgctgtgataggaggttgtggagaccaaagttttaccatgcagatgaagcctccgggtagcaggcttcagagaaaatagattgtaaatgcttctcatcagagaggtataatgagtcctgtctgacctctactttccatcatggcctgaaccagtctttcaggttaaaagtaccctggcccaggaggaagtccattcagatggttgcagggagggcggggcttagaattttatttttggtttacatcctgtctcaaaagaaaaaaaaaaagaataaaagagtttttggtttacaccctgtctcaaaaaaaaaaaaatgaaagaaaagaaaaatctcaaggacatctaaaagctgataagacagaaattaccaggccaaaaataaaagggaagtagaatgcagaaagggaaaaaaaacagaatggaagctgctttttccctgagagctttttcagaacctgaaaatcagaacttgtttgagcctcccggagactggtggagaaagaagtccagccaggccctgcccaactctaaaggaaaacccaaacttgtcgatatttgatgagactataaatcgcttgcctcttttcactctctggtgctccagcagcacagccccacaccaaccttcatctggagtgtctcaagaccttctggaatcttctcccacacatacctccttacacaggtccattctgtgaaaataagcaattcaaaatctaagctgttggaactttaaaatatttcgagccttaagggaatttgatcatgggacctgagtcatgtaaacaggcagctgcaacctttgtttctctgattatagattagcctttttccttacttacattgttgtgtaaaatgtcgtatatgactgaagcgttccagggaagacccctttcctcttcactgttgatcttcattatagattaactccctctttcctctctgacagagacttcatgaccatcacattgtctgggatagaatgttaaacacattcttaaattggaaaggaaatgaaaacaagctgtagagaaaagaaaacaaggtggaggcaggggaacaacctataattaattataggttgtaactcataaaccagccttgcatagaaaatgttaaacaagaaagttaaaacaagaaaagttatacaagaaaatgttctacaaggttactaaatgtctttgctttctgcctatgtaagcaagactttaacttttaacttcagggccctggccccattttcctagagtctgtgtttctcagatggccattcccagcttttggcttgaataaactctttaaaactggattctgggctgggtgcagcggctcacgcctgtaatcccagcactttgagaagctgagacaggagaaatcacttaagcccaggagttcgaaaccagcctggtcaataaagtgagaccgattaaagagaagtaaacttaaaaacgaacaaaaacaactttgtttttaaaacttaaaaacttaaaaacaacgaaaaccctggattctgatcctttcaattactttatattgacaattctactatgggtgctgcccaatcagccttgtaaagcacagggctgaccacttcaactccctgctgagggttgaatctggaataaaatccagattccagagctacggtgcccttagatctggggctgttgcttttgtacttctgtttttccactttacttagctgaagcacaatccctacagcaagctaagaaaggaaaaggtccattccaaaacccttcgctccctagaccactgctctgtgtgcagacaacgaaaacagccgagagttcacacaaaagggaaggactaactgcccggggcaggcttcaaggaatgcctgttaagccccagggaggaagtggctgttgacttgggaagagtccgttgggtagtcaagggctaaggtggtggttgacatgaaggcaaattttccatgccctggtgagaagttggaatccttgctgtgaacgttgggtagtacagtttgcaggaccatttgcttggctattgggtcccacctgttgacaggtgccaagcctgattttccttggccttccctcctgatttagctgaacaccaaccttctcaacacaaccccgaagtacaccttgctcagtttttaacagagctgctagatttcaaggcatgattctcagcactgtgtccggaattggtgggttcttggtctcactgacttcaagaatgaagccgtggaccctcgcggtgagtgttacagctcttaaggtggcgtgtctggagtctgtcccttctgatgttcagatgtgttcggagtttcttccttctggtgggttcgtggtctcgctggctcaggagtgaagctgcagaccttcgcggtgagtggtacagctcttaaggtagcgtgtctggagttgttcattcctcccggtgggctcgtggtcttgctgggctcaggagtgaagctgcagatcttcgcggtgagtgttacagctcataaaagcagcgtggacccaaagagtgagcagtagcaagatttattgcaaagagcaaaagaacaaagcttccacagtgtggaaggggacccgagcgggttgccaatgctggctcgggcagcctgcttttattctcttatctggccccacccacatcctgctgattggtatagggataagcaagtacctagccaccaccatctttgctcccagcgtggctcacctgcctagctcaaaccttcatggagctgtgatctgtaccccaggatacaaacaaaagtgggcaccatcccatggtccatatcaaattcatgaccagctcccagaggaccctcctgctgccatgctgatcctcaggctgcagacctgcttgactcttcacacctggctactactgcactccaggattctcaatatgacccctccatccacccagctgccaggaccagaaaccctggccatgcagtaagaattcactcaacaaacactgagccccaactctggtcaggcactggggacaaatcagatgtggctctaccctgctgcagcttgcagtgtgactgggagtgatgacggtccctagcctcagcctgtcaccttgcatccgtcagtcccacatcagcccgtttacctcaggctcagattgtccatcgcagggaccatgcagctcagtgttggccctgcctctgggcttgcccctccagctcccccttcactctgcttccagagatacattgcccattctaatttaattttacctcttcccaaataaaactcctcagtagatgccaattgtttttaggataaaattaaccaccttgttttggcacccacaggactgcatgaccctcatgccaggcccccagctcagacatgttggttcagatggagcacctggcagttccttgaatgggtcacacccatcacacctcacactgctgccatgctggccttgtgccatgaatgtcccgcctcctcctgcatggtgccttggtcagataggcttcgacttgtctcccatatttcagaaagtcttccctgcccctccaaaccaggctccatgccctctggttccccatagcgcccaagccacgctctgcaacagcacacatcgtactgaatggtaaatatttacagtctgtcttctacactagaccatgagggccttgaggacgaagacaataaagccattcatttctgcatcatcagaaactagcccagcactcagtatatatgtacctggtgaatatttactatatgaatgaatgtaatgattaagtaatgtgtctagacttcatgtttggcccaccggcactaataatacctccttaatctttctcttctgacactcaacttatgaccccctgacttggattcccattaaggactgaaagtttgt

SEQ ID NO: 1885845 - DNA, 4001 bp, Homo sapiens
tgctttataagtatagtgaaaatctaagcaagttaagaagcactactatattctcctagacagtgacacagaaagtgacacacatggtttcccctgagcttcacatgatgacacatgatgtcatagaactctacactcctggtcacttgttagagtatataaaataatcatatatcccatccctagccactgtgggtttagcagggataagcacttgacctaaactgggtcaataagaccttttcttgggattctctctcctgtcacagaaactccatataaatctccatggttgccagtgatcatgtttcctgtcatggagaaaaccaaccagcagtcagacagatgagctgacacatagatgccaagaagtgaccatgagaaagggcttgtaggttccaggtgctgatcctggggcccaggtgtatctccgcccacctggaggttaggttgtttaactcatgattccataagccaatattcccttttgtcaagttagttacagtctaagtaggcgtgggtgtttatcacttcaactaaattaattttaattttactattttgaaaaaacctcttgttcttgtcctgatacttcttcaggtgcgctctttgctgttgggggctcagaagtgacagcatctaacatctgctgggtcttctctttgtctgatcttgccttttgctctgcagagtctaatgtagttttcaagttttctgttttcacaactgccttctctttcatcgtttcaacatttgccttctctttcatcctttcaacatttgctaaagattgcctgagctcttcaattgttttgtcctgtgacagcatataagatgggggaaaggaaggaaataactaggattagatctcttctaaataacagttatgataactcttgcttcttttccttttctttctttttttatgaagacagagatatatggaaaagaaaaacattccaaaatttctgaattaagaggacatttctccatgatcgtgctcatcaataactattacttagcacttttattaactggccacttgggatttaaagagtcttaacatgttttctgcatcctcaaaggtcttaaagccctacattaatcaaatacagaaatacagaagataattggcatttcagtaagagaaatattgctgataaactggcatatcagttgatcagttatttagtgcctgtttggcttaaggcataatttttgaaatagtataactgaagtttgatatggagaaggtccaaagaagagtccccaaaatgactacaacttttaactattaccccaataagagacacaagtgaaactaaaacaaaaaacagactgggtgaggtagctcacacttgtaatcccagcactttgggaggccaaggcaggcagatcacttgaggtcgggagtttgagaccagcctggccaacatggtgaaaccctgtttctactaaaaatacaaaaattaactgggcatggtggcacgcgcctgtattcccagctacttgggaggctgaggtgggaggattacttgaacctggaaggcagaggttgcagtgagccaagatcacgccactgtactccagtctgggtaacagagcaagactccatctcaaaaagaataataataataaaacaaaaaacaagggatttgtaataataacacttagaatacaaggaggaggatatatggatatatgggggtttcaattgtattggtaatatttgtttcttaaaatgagtggtgaattccaattttattctatatgcttaaatatatattcttttgtatgtatgtaaaataattttaatattaatttttttagcttcaatgaaaagcatgctgctaaaatggtaaaagaccaaagctttagtgaatttctgaaagcctcacttcctttacttactttaaggacatttactcttgtcagctgagttttcatatttttatttgacaatttcaaatcactgagctgtctctgaagtttctgaattttctcctccaatctttgcgtagtagcaatctgcaaattctgccaaatattcaataacatttgttttgttgcatgttgtctttctctagctttttgaacttcttgctatgcttgtctatctgggaatgcttagtccctgagttttcctttgcagaaatcaacagtattgaagtaaaaaattgtgctttaagatgttattatacactagcataataccacatccactccagactaacacactgcaggcttaacaatacttccataagtaaaatatttttcaccataaataagcattattaaaataatcaagaaaataaaatatgacaataaaagtgatgactcaggactaccaagagtacaatgaaatagattttataagcaccaagcagtagcatagattagttcaacttttctaggaatgtattataaagaaataatcaaatatgtggataaagattcacacacgggccgggcactgtggctcaagcctgtaatcccagcattttgggaggctgaggaaggcagatcacgaggtcaggagatcgagaccatggccaacatgatgaaacccggtctctactaaaaatacaaaaattagctgggcgtggtggcagatgcctgtaatcccagctactgaggaggctgaggcaagagaatcgcttgaaaccggaaggcggaggctgcagtgagcggagattgcaccactgcactccagcctgggcgaaagagcgaaactccgtctcggggaaaaaaaaaaagactcacacaaagatattatttattttattttattttttaagttagggtcttgctctgtcgcccatgctggaatgcagtggcgttatcacagctcactgaaggcttgacctcccaggctcaagtgatcctcccatctcaacatctggagtagctgggactacagggtgtgcacacccgggctttttttttttttttttttttttttttttccctcaatctcctgggctcaagtgatcctcctgcgttgctcatccaaggtgctggtattacaagggtgagccactgcacccggccataaagatattcagatattctttttgaatatctgagagtttcgctcttgtggcccaggctggagtgcaatggcataatcttggctaaatgcaatctccgcctcctaggttcaagtgattccccagcctcagcttcccgagtagctggaattacaggcgcttgtcaccatgcctggctaatttttttatttttagtagagacagggtttcaccatgttggccaggctgatcgcaaactcctgacctcaggtgatccgcccaccttggcctcccaaactgctgagattacaggcatgagccaccgcacctggcccacaaagatattctttacaacattattcataatagaaaaaactgaaacaatgcaaatgtcaaaaaagaaaaattattatatgatagattattccctagaaattaagttttcaaaaatatttattaagaaaaattaacaatgatgtagttaatgaaaaaagcaggattaagaaaaactatgtacatctcaatgatgataaaaatatacatggaaaataatcagagggaaatatacctatatttaatactagttatcgcaaaatggtgggattactggtgatttcaattttatttctattattttctactttacaaatcttcactaatacacatgattttttaattttttgagacagggtctcaccctgccgctcaggctggagtgcagtggtgcaatcacagcacactgcagcctcgacctcccgtgctcaacccatcctcccacctaagcctccccagtaactgggactacaagtgtgcaccatgcctggctagttcttaaattttttgtagagatggggtgttgccatgttgtccaggctgatctcaaattcctgggttccagctatccacccacctcagcctccctaagtgctggaattacggacatgagccactatgcccagctgaattaatttt

SEQ ID NO: 1885846 - DNA, 4001 bp, Homo sapiens
cccagttctgggcaccggcctgacagatgtgatgccaacagctcccatgtacaaagccttcctcccagagcacaggactcctgccgctgcgccctccactcgcctcctcccatctccgtgggcacaagggtggcagctacaatgccaatgcctgtaagcaggcagcatgaagcaactcatgcaccctcttctcccctcccagaccccaagcctctcccctccttcttccactccatccctctgtccttctggttgtacactagattggcaaccgcaatgccaacccccacccatgcccaggaggctcacatacagcacacgcttatgcgtacatgtacatgcgcgcacacacacatacacacacacacggccccatgagtgccaggcagcggtggcagacacacagcaatgcacagtgactggtacccgaggaggcagccggattcagcacctgatccagcacccgtttgggattgggtgggtaggcgggcgggcggaggggtgatggaggcagacgatggccctaggttggcagccgatggagctgggagaatggagggaacagatgctctttgcccagcctccctccctctctctccccgagatcagtgccaagctggggggatggggagaggggaggatgggggaagggtggcatttggagagctggcaggcggagggagctgggtccgcccaggctgggcagtgccggcactggctgctgcctctccactctgccatctgtctcgcttctctccccacccactttctctctttttctctctctctccttcatccacagcaatacgaaaagaggaaaacagggtcctcattccacccacccccaacctctgccagacccccctcttttcctccccacaactcaccacaccataccaccaccaagccatctgtgctctcctcctggctcagtcaccttctttcactcgccttcgccctcacaccagaacgggtgcaatttaaaatatatatatatatatgcatatatacatatatatgcatatatatatacacacacacacacacacatatatattttttaaagcaacttaaaagaaaaactcttttctttgggaatatcctatccttctgagtctgggtcctcagtaccaatatttatggcaggcagagggaggggaccccgttctcagctggtgcccatgaatcccatgccagggaggaggggtggctggggtggggtgggggtggggtgaggtggggtatcgggagagctcgcttctctctgcgcctgtggttgtttcttttttttctcctcttctacttccggagcagattcaaatagatctagagccttccccacccccagccgcacagccccagttcccagggcccctgtgcccttccctgcctgcttttgattcctcgatcaccctttcctttttgtgtgtgtgtgtatacgtgtgcgtgcgcgcaagtgtgtttgcatccatggcggtgggcactgtgccagccaccgcacagccatctgcgatgccttctgcaacctctgctatttctccctgtcacctccagcccccaaccccctgcaccccagctccccagcccccagtccccaatcattaattagctactgaattaattaaatcgtggatgctaattaacattcctacagggcaggctgccaggctgggggtgcagaggggatgtgaagagaagtagagattgggatgggggaggaggaaggagagccagtcttcttagaagaacagcggggagggaaagagaacccaaaagaaggatgaaggaggaagagagctgagtggtgatggacaggttggggcgggggaaggaggagaatagacatggaaaatggggtataaaactgcagtccaagtgagcgccaccgagccttcttacccaaattaagactcagccagttccttgtcttcaagctcatttccccaccccagcctagagaagtatattcctcaggcagctgactccaacagttgcttctcctatagaaaaccaaccccaaaccagggagtcaacagctactatttgtcaattcagccacactgaccctcagaccaggtcaccaagagaacactctgggctcagaggggtccctgttgacttgcccttgtctacctctctgtcaaggggaaggagcattctaggaacatctgctgcagggagacatgggagatcaatatagggaaatgtgagggtatcaaatcaatgggaattattaatagcagagaatcgctgacagtgcctgtaagactgccttaggaagaccacaacataacactgcctgcctttgcagttccagagtaggaaaagtgtgtactcttacctacctcaaaagtcaggaatttaggaataagtcagtaagggctatctaactttgagttgttatttttttaaaaaggagagagatgccagtatagtgaaacttcttcctgggtgtgctctgtgaaacattaatctgatgaaatgctcctcaagaaaaaaaggaccccccaatcaaattagtttgagaaatactgcatattccctcttttaagagattcacaatgtatgctggtatgttaaaggctctgaggagctggttaaaaaacccaaatggttgatcatgtttaacccactaattctcaaacttatttggccatagaggccttactttttaagttttatttttatttatttatttatttatttatttattttgaggtaggctcttgctctgtcactcaggctggagtgcagtggcatgatcacagctcactgcagcctccaactcttgggctcaagcaatctgcccacctcagccctccaagtagctgagactacagttatgtaccaccaggcccagctaactttcaattttcaattttaaattttaaattttattcccacagaagcagtattctgctttgtggaaagccctatcaagtaactagggctggttctgacctggaagctggcagatggataagccgtccccacccaggtcagcagcatcctaacagtccatgaacaaagggacagcagtgaggctgtctttctaatgtaggagtaatacaggaaagtaccaaaccagctcatggggtgcggaaatcatatcacagacctataccctttgccttcaccccatctttggaaccctgcagcatctatcttcccctggaaagtctattctgtatccctgtaggggtaggggatgggagaaggagtttgtgtttttcaaaatctcccctcagtgttcctgatatcttggattcagaacttcagttctaagccatctctgctctctcttctaaaacatccttcactatagaccattggcatcaacacaaagcttctattcctattacctcctcaatcccattctggtccagaaactacaaatgtctcctgggacatctcctgctgcatccctagcaaccttcccttttcctgtcctcacttaggcatctggagtccctgaggtcacttaacctctctatcagagtcctcaagaggataggctgtctgaaacctgcagggacatatgactcaccttaattttaaattttattcccacagaagcaggttccactttgaggaaagcttgtcaagtgaccaggagtggttctttagctccttgagcttcagaacatctaccctcatgatgactggcctccccctgccataatgagcccacctttccttgcatggccctttgtggagctgaagaacaatggtaataggtggagaccagctcattttaataagaatattaccaattttttttcactttctgggtcctattgttggtcccatcctacgtcatacccatgctcccagtgtacaaccccccccaacaacttaacaagagtgatgactcttcacaagaaaactcaccataccatttcaaagacagaatagctttaaaatacaaatttgatttgccatatttccaggtgataaggtccctccaaactctgaaagcctatcaatgtcccagctgaccc

SEQ ID NO: 1885847 - DNA, 4001 bp, Homo sapiens
gctccacccaatgcctggccaccactatgtgcacagccccctctctctgactgctgccaagtggcatcatgagcatgtttggtggctttgggtttgctgcagtgccaggatctgagacactgttcacgtgccagtgcagcactgccaaacgtggcagcatccagttggttgggtgccaagcagtaggacccaggtggtgatgagagatgaaagcggggtgaggcgaagggagggggaggagaggaaggtaccgaagaagaaaatcagacacctcacttgttcaagtggagagtccaaatgggatctgcagaaaggtacccttcccattctagagcccagctcagcaagccagcccttccctccttccaccccagcaaaagtggcatatacagaccagacaaggggatctggccatcttcagcagggaactggctgggggccaggcaggactgccagcgctttccatccttcttccttggggtcttggcaatggtgtgcttcctcctttgtgtcttcatgccactctccgtctgttgctccactccccatgcctaagagggaaggggaaggaggacctggcagaaaaaaatctggtctcccaaacaccccacctcccgaaatgtttcacctccttccttctcactcctggcacaatagccctctcaaccagattggcaagaggcactgtcaacctcccctgttccacacaatgccagagcctgtgccaggtgccatgggcagtgccagcacccacccacctcacatctggtcctcttgctgtctccttcaatactctgacaaagggccagattgccagccccaacaagttctccctgggtacggtggcacactccctcctccctggctcgtagactgtttcttggcacttccctggctactctctccaccactttacttcctcaagctggaagagcactaatcacctcatactccaaccatttttcagagctgagcttctagagggacagcaacatcagaaacacattctgcccctcctccctgcttcctggatcccccagtctccattgccccagttctgggcaccggcctgacagatgtgatgccaacagctcccatgtacaaagccttcctcccagagcacaggactcctgccgctgcgccctccactcgcctcctcccatctccgtgggcacaagggtggcagctacaatgccaatgcctgtaagcaggcagcatgaagcaactcatgcaccctcttctcccctcccagaccccaagcctctcccctccttcttccactccatccctctgtccttctggttgtacactagattggcaaccgcaatgccaacccccacccatgcccaggaggctcacatacagcacacgcttatgcgtacatgtacatgcgcgcacacacacatacacacacacacggccccatgagtgccaggcagcggtggcagacacacagcaatgcacagtgactggtacccgaggaggcagccggattcagcacctgatccagcacccgtttgggattgggtgggtaggcgggcgggcggaggggtgatggaggcagacgatggccctaggttggcagccgatggagctgggagaatggagggaacagatgctctttgcccagcctccctccctctctctccccgagatcagtgccaagctggggggatggggagaggggaggatgggggaagggtggcatttggagagctggcaggcggagggagctgggtccgcccaggctgggcagtgccggcactggctgctgcctctccactctgccatctgtctcgcttctctccccacccactttctctctttttctctctctctccttcatccacagcaatacgaaaagaggaaaacagggtcctcattccacccacccccaacctctgccagacccccctcttttcctccccacaactcaccacaccataccaccaccaagccatctgtgctctcctcctggctcagtcaccttctttcactcgccttcgccctcacaccagaacgggtgcaatttaaaatatatatatatatatgcatatatacatatatatgcatatatatatacacacacacacacacacatatatattttttaaagcaacttaaaagaaaaactcttttctttgggaatatcctatccttctgagtctgggtcctcagtaccaatatttatggcaggcagagggaggggaccccgttctcagctggtgcccatgaatcccatgccagggaggaggggtggctggggtggggtgggggtggggtgaggtggggtatcgggagagctcgcttctctctgcgcctgtggttgtttcttttttttctcctcttctacttccggagcagattcaaatagatctagagccttccccacccccagccgcacagccccagttcccagggcccctgtgcccttccctgcctgcttttgattcctcgatcaccctttcctttttgtgtgtgtgtgtatacgtgtgcgtgcgcgcaagtgtgtttgcatccatggcggtgggcactgtgccagccaccgcacagccatctgcgatgccttctgcaacctctgctatttctccctgtcacctccagcccccaaccccctgcaccccagctccccagcccccagtccccaatcattaattagctactgaattaattaaatcgtggatgctaattaacattcctacagggcaggctgccaggctgggggtgcagaggggatgtgaagagaagtagagattgggatgggggaggaggaaggagagccagtcttcttagaagaacagcggggagggaaagagaacccaaaagaaggatgaaggaggaagagagctgagtggtgatggacaggttggggcgggggaaggaggagaatagacatggaaaatggggtataaaactgcagtccaagtgagcgccaccgagccttcttacccaaattaagactcagccagttccttgtcttcaagctcatttccccaccccagcctagagaagtatattcctcaggcagctgactccaacagttgcttctcctatagaaaaccaaccccaaaccagggagtcaacagctactatttgtcaattcagccacactgaccctcagaccaggtcaccaagagaacactctgggctcagaggggtccctgttgacttgcccttgtctacctctctgtcaaggggaaggagcattctaggaacatctgctgcagggagacatgggagatcaatatagggaaatgtgagggtatcaaatcaatgggaattattaatagcagagaatcgctgacagtgcctgtaagactgccttaggaagaccacaacataacactgcctgcctttgcagttccagagtaggaaaagtgtgtactcttacctacctcaaaagtcaggaatttaggaataagtcagtaagggctatctaactttgagttgttatttttttaaaaaggagagagatgccagtatagtgaaacttcttcctgggtgtgctctgtgaaacattaatctgatgaaatgctcctcaagaaaaaaaggaccccccaatcaaattagtttgagaaatactgcatattccctcttttaagagattcacaatgtatgctggtatgttaaaggctctgaggagctggttaaaaaacccaaatggttgatcatgtttaacccactaattctcaaacttatttggccatagaggccttactttttaagttttatttttatttatttatttatttatttatttattttgaggtaggctcttgctctgtcactcaggctggagtgcagtggcatgatcacagctcactgcagcctccaactcttgggctcaagcaatctgcccacctcagccctccaagtagctgagactacagttatgtaccaccaggcccagctaactttcaattttcaattttaaattttaaattttattcccacagaagcagtattctgctttgtggaaagccctatcaagtaactagggc

SEQ ID NO: 1885848 - DNA, 4001 bp, Homo sapiens; identical to SEQ ID NO: 1241740

SEQ ID NO: 1885849 - DNA, 4001 bp, Homo sapiens
cttggaacattttatagccactatgtgttagcccagtaaataatctattaagcacagctcgagcttcacctcttttgggctgaacctgaatctcacagctccctggaaaccaagtcctcttcttggaaatcaacaacccattcagtgtagaatgttcgtccaaatgactggactaagacatcctagctcaagcctgtaacttactagttttgtcactcagaatcatttagctgaagggggtctgaagggctggtcagtccacccttgctctttactaacagagacacagaggcccctactgctaagggactttctctgcaccaacacaaatgtacgtgtagacaactgagctcaacactgtgacttcaccaatggaacaagcccctcagaccaggatcaattgattccaggtggcttgccccttcaggaactaaatgcacttaagcaaacagttaactaaatgcacttaagcaaacagttaactaaatgcacttaagcaaacagctaacagcggcaagccagagaactgggggcatgcatcaggcatcgtatctgcattaaaactccttttctttggggctcagaagtgtttggggctcagaagttctgctgacactgagggctggcaaatatgagccaacactgggccagcccctgcacagtggccatctgggatcagcccccgctccggttaagtaatcatctccaagatttacaaaaccaggggcaggtaaccttgatgagccctgcccccagggaaaggttaaggatgcagttctgaggcctagcatgtgctgggcacacaggaggaaccactgtcctttccatccttcaggaggactgggaaaacagaaccccaggaaagagaacacctaggaaaacatattatcctctcacctgaactaaaaagtagagtacacattaggggttggcagcagcgtgatggcaggatggacaaaaagtgcttgctacaggcaatttatttcatcagaacagatactcattggagcaagtattttcacacacacgcaatgactctcgagacggaagcagttagtagaagaaatgagacaggtgtgtttgttacaaagggaacagtctggcagggaagtagggtaccctggtttccaatcctggtctcccacttcctaaccttgtgaccttgattaagtcattcaacctctctaagcctcagtttcctcatctgggccaaggagaaacggggacctatttcccagagcggctttgaggcacactgcccggcacggcctggacacccactaaataagagttgttgcccccaaatgctaagtctgaacctagctgcatacacatgccgttatctagaccagacaggtctcccgcctgcatgtcaaacccacatctttctccagaaggcagaagaaagcaccaggtctgcccgggcagttcagcctccaggcggggcttcggggcaggggaaattgaacgattcaatcggaagccccgaatgtttccaggctgtaagtggggaaggagggtaggacaggggccctgaggcggcctccgggccctgcgaagggagctttgttcgcgaggcggagggcctggcttaccgagaagcgcatccggaggcggttgaggggcgcgcggggcacgcagcagagccgcagcccggcccggacccggagcgccggagccgcaggaaggcgaggagaaggaaaaaaaggaggctgccgccggctcctgcctcattctcccgggcagcgttgacccgctggccgccgccggatagggctggccgccgggcgcgggaccccgtgcgcgctgctcatgtccccgtctgccgctggctaggtgtgcgcgcagcctgctggtctctgggcggcacccgggggctcctcatgccccgcgccggggctcggcgggaggacctcggagaggcagcgcggagggaaagagagagagacagcatgagaacgcgcagagctgcaccccgcgggggccgggcgccagcagcaccgcgctgccccacccacggcgcgtctgctccccgcgctgcgcgcccagcggggcgccgagccccagaaactttagcacatggccggtccggcggccacggtggccgtagctgccctgctcttcgagcgccccccactgcttcctgccccaagccccagagcgcagcttaccagcggcgaccgcgaccgcagcggcggggcgcccacccggccgcaagcacagcagtgcgcacctgcgggaaaggaggaaggggctggcggcgtcggggtccctacaggggaggggcacctcggcggcagcaatcggcgcaggttaaggcattctgggccggggctgcgcgcgagccaggtggtggcaggccgggattggggagggtctctgcgccccccgccccgcggcgccgctgctgatgacgcgcgcgggcttccccggccccgcgtctgcggagccagccccgttacctagcgactcgctccggggagcccccgctgacgcgcgctgcgagccgggctgcggcagccgaggggcggggagggaggggagggggagctccagtgcggggagggccggcggctgcgggccaagctcctccctccgcttccctctccgcgttggggagggggcccgggaaagacgtggcctccgcctggccctggaggatgggaggccttcgcggggcgggggggacggagggaggcactgagtgcccctgtccccgcagtggggatgcagcagcaggtggcggctatgtggcctgtggaggctcggcacccagaggcgcgcggtgagcccgccccggcgggagcgtggcgaatgtggctttgggcgcgcgggtgtgtgggacacgctcccacccacgtggcgtacatggggacctggggacgcgggtgaaagaggcgcctcctccttcctctggtctctctccctccttcctggacattttgctcctgcgctgtctctttcttcatcatggaagcccaggttgctccgttccccactcccagctccttatatcttccagggaacaggcggatggcctggcagctgaaggtagttaagtcgtggtcaaaccactatacccccaatccctgccgccctttggcgcctccccagcccatccccatgtccagttgcccgccttgtaggccctctaacctgcctcggggcgccttccactttcttggaagacttgggacctctgacacagactggggttcaaatccaggcccctccaattgctttcagtacacaggacattttaacgtcttcaggaagatggagtccttgtctccaaaggtcatagctaagtactagtacctaaggccttccatgaatgtgaacatgattttctagaagataagcagcctgtctcctggttctctgggacctcaccaaaatccaccccaacgtccagggaagtaaggcaagtgccgggaaacatggtcagagcaagcagcgaccatggtctctatcgacgaggaggcaaattgcccaggtctgctgggtgcctcagaagcagagctgggggaagaacccagacatcctggttagcaggttcccagggcccaccgctgtgccccttccccagttggatggtgcaaggaaccttctgcccctacttctcagaagatcctcctgcctaccaaaaggctgcttccctcccatccctgctacagaataggaatcacctaccacctcgtccacaacaccaacccataccctccctagctggcctttctgtcttcctcatggtatggatgtggggagaaagatgcagaggagagactcagcagagatttaggggaatcaggcctgcccaggaacacccacaccccagccctgcagctctacaggacagagtccctccatgaggggctttgggaaacagcagagtctgagtggtttttgttggcttagtgacaagacatttcctccaattattattattattgagatgccagtaactcctattgaaaaaccctgcaagtccatggaaacag

SEQ ID NO: 1885850 - DNA, 4001 bp, Homo sapiens; identical to SEQ ID NO: 1241775

SEQ ID NO: 1885851 - DNA, 4001 bp, Homo sapiens; identical to SEQ ID NO: 1241778

SEQ ID NO: 1885852 - DNA, 4001 bp, Homo sapiens; identical to SEQ ID NO: 1241787

SEQ ID NO: 1885853 - DNA, 4001 bp, Homo sapiens; identical to SEQ ID NO: 1241797

SEQ ID NO: 1885854 - DNA, 4001 bp, Homo sapiens; identical to SEQ ID NO: 1241812

SEQ ID NO: 1885855 - DNA, 4001 bp, Homo sapiens
taaaccttatttcaagatacatgcaacaactgtaatgagatagaaaaatatttggtttgttctattggtaacaaaatcacaggtgctgttgggatttgctaataatattcataattgagggaaatactaaatttcattgagaggttacaaaaagtaaatatgtaatattttcccattcaagctcatggatcccctcagttcacggtcccttaggctgtggaccccaggttaggacacctgcagtagggtgtccagactgcttcctaggtgagagagcaaagggaggctcagagaggtggagagattggcctagagccacacagtgacagtgagagtggcagtgctgagactgggactcaagtcccccaaatggtttcagtctcttcagtaacattgctttatattctcaacagtccatcccttactgggcctcagtttccccatcgttaatgtgaaagagttgaattagatcacgtttctcaaatctctttggccaccaggtctagtctcaaaagaaatctcatgtgccgggggtgggggagccctggcatccatgcttttcccactcttttccctctctgcagttcccaggctctaaagagcacagttagggaacttggcaatctggagtttctcgattgggtttatacccagctcccaggatcctggctgttcacgacaatagactccacgggctcacatgaatgcctgagtgccctgctgacatcccaccaggattccttctgctgctgcccagcccaaagctccatcccagcaggctgcggaaaccaaacccgccctccagtctgtcccctgccaaactgcatgtagagtgccctgcacacgtcagtgctgtgcccctgctgagagcatctcccactgctcacaactgccccagcagtgccggcctcaaagagctttctctgagagtcaggaggttggatgggctggggcaacgtgctatgtggctctgagcaagtcttcctcatcactgagcctcaacgggccactagtgcaaggattttccagatctcacagatgagtttcttaaaaacaaattcccaggccccatcccagactcactataccagcatttccaggaaactaggactagggactaggaagctgtttttaccaagaacctccgggagctgtgatcctcaggaaagttaggaaatcccccactgggagtgaacctggctggtcatcagcagtacgtggagagctctgaaaaactgcagatgcccaggacccagcccagagattctagttccacagatccagggctctgggggccctagaatgtgtattttctgtgtttttctagaccttcccagggattctgatctagccagttcagaggctggcattcagaaaccaccggactggatgatttaaggtgacttcttgctctgacatcctaataaggacatatgggactacaactcctcaaccacagcgtgcagatttgcttgtgttgatcagttattgattttttggtttgttttggctgacacaaatattgaaaaatgttttagtcaattgccaatgtttaggaatcacatgatcttgtacaaaaatctcaattttcagcttttcttgaaaagtcttatcatccatccatgtcaggcttaaattgctccctggcagaagtggctggggtggagcagtgagttccctttaggaagggcctatgctccccggtcctcagtccccaccactccctattcattcccagcactgtggctgcaagtaggctccctttcccatcatgcttgtgtttcctttcactcagtaaagaactgagtctctaacaaaagtgggaaaacaagagatgggccaagaagccccatgtttcaggaaaaatctgtctccctacccacctcgtttgctcatttatgttacctgcctagtccatggcatttggtatgtgacccttggctactaactgtgagggggcactaggtgctccaaagtccaggacagtggataagacaccatccttgccttcaaatggagaaatggccggacgcagtggctcacacctgtaatcgcagcactttggaagaccgaggagggcagattgcttgagctcaggagttccagaccagcctgggcaacacggtgaaatcccatctctacaaaaaatacaaaaattagccaggcgtggtggtgtatgcctgtagtttcagctactctggaggctgaagtgggaggatcacttgagcctaggaggtggaggttgcagtgagcagagactgtgccactgtactccagcctggatgacagagcgagactctgacccccacaaaaaaacagaaaacaaagcagaaaaatgggtgtggtagacccaagacccccactctggcacagtgctgacaaggtccaagcaaggggaagggatggcaccttatgaatgcgttggaatgaagaaaagtttcatcaaggaggatgcatttgagatgtcccttaacatatgttaattcaacagtgaagacaaggagggcctcttggtggtaggggcactgtgtggtaaaccctcagagaagtggggaaaagccaaaagtaagaatgggcaacaagaagtttaatcttggcccaggcatgtgttttgtaaaatgggagacaatggatggacaaaataatgcactgtcaagagcgtgggctttgaaagtaacaagacccagggcaggcccaagtgggccgtttaatagttgtataatctgagtcactgcatatttgtgagtttcagtttcctcatctgagaatccaggccagaaaacataaggaggggagcccaggtcaaggagatgaaaataacagagatagggaagaactacttcctaggttcactcccagtgggggatttcctaactttctcaaggatcacagttcacggaagctacaactccaagacttgtttttgtttttgtttgtttgtttgtttttgtttttgttttgagagagagtttcattcttgtcacccaggctggaatgcaatggcgcgatcttggctcactgcaacctctggctgctgggttcaagcaattctgcctcagcctcccaagtagctgggattacaggtgcgagccaccacgcccaactaatttttgtatttttagtagagactgggtttccccatgttggccaggcttctcttgaactcctgacctcacgtgatccacctacctcggcctcccaaagtgctgggattacaagtgtgagccacagcacctgacctactttggatttaatttgcccttcttttctattttcttcaggtgtaaacttagaatcctgatttaagatctgtcttcttttctaatatatgtattcaatgccttacatttccccatagcactgtttttactgtatcccacaagaaagagagagaaagaaagagagagagaaagagagagagagaaggaaggatggaagaaggaaggaaggaaggaaggggaaggggaaggaaggaaagaagggatgaaggaaggaaggaaagaaagaaagaaagttgtttaatttccacatattttgggattttcctgttacctttctgttattgatttataatttaattccactgtggcataaaagcagacattgtatgatttctatgattttaaatgtgttaaagtgtgttttatggcccagaatgtggtctatcttgatgaatgttccatgtaagcttgagaagaattgtaatctgctattgtgggatgaagttgtctatagacatcaattatatccagttaattaatggccttgttaagtccttgttgatgttctgcctgctgaatctgtccatttctgatagagacgtgttgaagtctcctgctatgatagtggatccatctatgtttcctacacttctatcagtttttacctcagggtgtttgattctctgttgttagcacatacacattaatgattgttatgtcttcttggagaatggattcccattgtcattctgtaatgcccttctttatccttgctaaatt

SEQ ID NO: 1885856 - DNA, 4001 bp, Homo sapiens; identical to SEQ ID NO: 1241828

SEQ ID NO: 1885857 - DNA, 4001 bp, Homo sapiens
gcatggtcaggtaggctgggtaggatgaactgcgggaaggtagatgaccaggatggggaagttctgatgaggtggggctgaggagaatgaagactaatgcccaagatcaaagttagggaaataaagtttcgctgccaagtccaaaggtcagggtcacagtggaaaactggacacaaagccaaggtcaggagccgagagaattggaaaagtggaaacaaaccagggaacaagactaggccgggcattgtggctgatgagaatgagctggtacccagcctagcttcactgtctctcaacctagcctcatgcacagaaaagtatcagcgaagagagggctgggtttaagtgatgtcaccaagggggaacaaaagaaagcagcgtttctcaacccaggtccataactctcgtgttgtgcacaagattgtgtacattttccagagtttgttaaagggaacagcgcccccaaaagggttaaagtttgattgtggaataatctggttatccagaagagaacgatctctgcgggctctcctgtctcgacgaagtcctttagtggctgagggtctcggccaccttccaaaggggcggaatccccctgcctcgcgtaccccaggggtctcggcagcgccgctattctgtgagcctattcctctcagaagcgccgagcactaggcctggaagaggacaagtctagcaaatgaggggacacgggcggagggagggattaaaagatgggggtgtgatccgtgccaatggggacacccactggttcgaatattaacgcgaggtttgtccgcttcttcacaatctgtccgtttcgttttactgcgaaagcaaatgtgttcccatccctctatttggggatacgattagagttccgggaagggggtgcagcgcccggactggcacaaccgccgttgtcccacctcctccggggcggcaacaccgcagtgccaggcctgggactgaggcgtggggtcccccctcgctccgtcctggcgccgcccgtcgccccgccccttggggggccccgtggcgcacccttgtgacgtagcgcttgtgtcgacatcggcgcgcgccgagcccggaagaggcgcgggctaggaaaggagttggttcgcgcaggtgcggcgcctgggtccccatggcgctgtggcgcggctccgcgtacgcgggcttcctggcgctggccgtgggctgcgtcttcctgctggagccagagctgccaggctcggcgctgcgctctctctggagctcgctgtgtctggggcccgcgcctgcgcccccgggacccgtctcccccgagggccggttggcggcagcctgggacgcgcttatcgtgcggccagtccggcgctggcgccgcgtggcagtggggtgagtgccaacggggcctgggtctctgagcctccgaggtcggccttggaggtcgggcggagccgcgcagaaacagggcttctcagaggtccccgggaggcgctgctgtccgcgctggccccttggcgagaagtgtcggacgtctgagtggaacccggttcgtcaccgctgctctttccactcggctggcctctgcgcctttctctcatcccggtaggaccagccctaacagcttcttgctaatcccgctttgtctgacacctttctccgagccttcttcctcgttccaacttttagccccttctcttctggcgactgttgttttgcaatcaaagatacttgaccttacccactatgacaacactcttcctctttcttctgaacttcttgaagacgcgtgatgtctgcctttacccactttcgaaacgccgtgtagtctagaaaccacacgactgtactgcaactcctctcagatttgcctttttgaatcttcattatctactctgcagccttccacgcattgaacacgcccttctccgtgaaattcttttcttcccctgacttcagtgacactgcatatttaaggttcttccaaatgacactacctcctttctttgtacttttccttgggaatgtaattattttctttatagtattgatactgtaaacactaactttagtccctgtctcagttcgatttgactttcttgccgtaatctcagagttatgtataaccaccacataaaagcaggccctctaccatgtagctcactactttctgtggagtgttggggccgggaggggtaaagtagagcaaacttggcctgaagattaaatgacatcattcatgtaatctctctagcatagtgcctgctttaaaaagcattcgatattagctataattttggggtttttttttttttttttttttggacacagggtctctctctctgtcgcctaggctggagtgcagtggtgcaatcactgctcactgcagcctcgaactcccgagctcaagagatccttctgcctcagcctctggagtagctgggacgacaggcaagcaccaccacgcccagccaattttttatttattttattttttttagtagagtcgaggtcttgctatattgcccaggctggtctcgaactcctgagctcaagccagcctcccatcttggcctcccaaagtgctgggattaaattgtccttccttgctttatgcgcgttcattcagcagatattcaccaactacatggttagtgtcaggtctgtgctaggttcttaagatacagagatgggtgaagcaaggcccctgtctcacttgttggaaacatattattgtatcagtcatttgggctgctagaacagaataccacaaattaggtggattaaacaacaaatctgttttctcgtggatctggaggctgatagtccaagatcaaggtgttggcaggattggcttccgatgtggcctctcttcctagcttgcagccagctggcttttcagttagtctgcgcatgtacactcctggtgcctcttattcttcttatgtggacactaggtccttttggaatagggctcacccgtatgaccttatttaaccttaactacttccttaaaggccctacgtccaaatatagtcacattgggaattagggtttcagcatatgaattggtggggggtggacaattcaatccataacaattatggttagaagaggaacaacccacgaggaccaggcagaagccttaatgccttttacgaccttaccttagaagcacataggaactcttctaccagagtcacaggtccacctggttttaagggaggggacatagaacaaaccttgatgggaggagcatcagtgtcacattgtgaaaagaacatttggaatggggcatcttattgccaccatcttggaaaatatattttactacagtgactttcataggacagacactaaataaatgagatttcttcaagccaaagtgggaacaggtccacctaggcaagagaaccaaatgtgaaaaagtacatggtttgtttgggaacaggtcggccttgttttggagcgagaatcctatggtagagggttgtaaagagatgatgctgagaacgaagggttggaccagattgtgaagggccttttatggggaagccataaaggtttgtaagtagttaactgatgacaagttctttgttgagaattggtgggaatgtgaagggtggattttgagcagtggttctaaactgtttcactgcttctcatcatttattacccaaagaggatttttagcccaaagatagggggatataggagggatgagggggagcaggtgtagtacttgtatcagaatctcattttgaggttgtagtttgacttctctagagacacactcgtattcacactctctgtcacacagacacactcaaaatgccatttaatgtgattcataaggaggaatatcttgacatcctgacactggtttaagaggccattgtagggtttgtgtaaagggagaaaggagcccgaaccaaactcggcaatgatgtagaagaggtgagatttgagagataacctgaataatagtttggatgtggtggagtaaagaaaggcag

SEQ ID NO: 1885858 - DNA, 4001 bp, Homo sapiens
cttatctgtaaatagggataatattcccaccttcctaaggttgtggtgaggattaatgaggtaaggtatgttttcctaacacagcgtaaagagagggtgcttgttaaatactcatacccataatctttcactccatcctccttgttcattgcaagctgaaatgtaattgcccattttatacaatgccattttaatacccagggtaacccgaaagcctttctaatggtgaaactcaaatggataggcaagctactgaaatgtaatgtcaagagttatagctcaggtgtaggtattggagtcactcttatctgcactcacatttgggctttctctcagagtagctaggtagacttctaaaggtattgactgttgggcaacctagttaagcctcagtttcatcatctgtaaaatgaaatacctgtagtattttcacatatgactatggtaaagcttaaaaaattcgtggggccgggcgcagtggctcacactggtaatcccagcactttggaggccaaggcaggcggatcacgaggttaggagttggagaccagcctgaccaacatggtgaaaccccgtctctactaataatacaaaaaaaaactagccgagtgaggtggtgcgcgcctgtagtcccagctacttgggaggctgaggcagaagaattacttgaacccgagaggcagaggttgcagtgagctgagatcacaccaccgcactccagcctgggtgacagagtgagactttttctcaaaaaaaaaaaaaaaaaagtatatgtaaaacacagtgctaggcacacagtagatgctcaataaaatattagtcctctaccttccttttatttcacacgggaatactatagctagcatttaactccaaagtggcactggtcaaagggaaggatatagcctttcccatctgtagtttcagaaaataccagaggggaggaaatagcaagcattacaaaacatcctgcttcagcctaaagctctcaggaaaaaaccttatctatatttagtacaacaagttagagacagctttcagcaaagactaaagcactatctcattcattttattcaaatgaatccaaatgtatctaatttttgctttggcaaatgaatttccttctatccctcacctatttctttattcctagcttgtctactaaagatagacccatgaaggatgcctaacagggtcccatgacagtagtgtaaaaggtttagaggaagttacaggggagaagtgtcctatcttaatgactgaaactctgtttccgagttgaaataaatcccaactcatcttggagtgaaaggctcttccagaggccccaaatgattccttagaactttgagctgtgcttgattcattttttcttgtattcctcctctttctctcctacacggcttatactaaagaaccacacccactcatgccgtgggtggacaggaacaagccatcaaacgcaggagtgaacggagtgggtttggaagcctgacggccctggctctcatgcctgctctacccctcggtaatttgaacatctgtctcctcctctgagaaacccagaggtcagtcattgtggaggtgaccccacttcagaggattcagcaatcagtgggtcccttgactttctgcaggccaccgaaataatgctcttcctgtctgactagattttatctgtgaggtggaggagcaaattcatggtaagggaaaaatgggtcagagggtctgaagatgacaagaccacattttccatcttaccctaactgttgtcttcctcagctgtgctgatagcactcgtctgagctctgctgtgtgaatctccagtgatttggccaagtcactgtgtgtcctcctttctgatctcagttgagcactcggtcttgatccttgacttcctgtttttccctcagagcaggagactgaatcctgccaggctgaggcagtcctgtgagaagcagtgctcttgtgtaggatgattgtggaagcttgaactgggactttcagggctatgagccgtcctgtgaacaaacagaagacttcagtttccatggccgccagtctagcattatcccctcttgccatattccttcacagcatttataaacatgcaatttggtatttcctgcctctcatctgtttccggcttcttcctctccatcctttcttccaaagggatttgcataaaggcagtctatcaatactgttcttaaaggaagtgtccacaaaacactttgaatcaacctagtttctagctcatctgtttccatagcaaccaatcatgatgtcacaaacagagggggatgacttgaggtgggaattaggtggcaagagagcagatgggcttttgtaaagaaagaaaaggaaaacaatatcctatccgcacagagatttccttggtaataaagagcaagggagagataaataaagaagcaatgagagaaaggaagaatcctttccaaacagcactggagaaattaggagtgaaaattagcaacacttgcgagcaatgtttgtttcctttcaggcagtatgaatgatgaatcggcaccactcccttggggtgatgaacaccatgcacaatgaggaaataaaactttgagaggcgaaagaatttgccagggctgtgaagcaagtcacagactagctttgggaggaggattgagtcgatattaatgatgaaatagagcagggattgacaaactttttctgtaaagggccagatagtaaatattttagactttttgtgccagaagatctctttttcaactactgagctctgactttgtcacacaaaagcagacatagacaataaataaacaaatgggtatagttgtgttccaataaagatttatttataaaataggaatgggccagatgtggcccatgaaattcttgaagtggaagactatagaatataagtttcatatttaaatggaaaggtccttgatagttgtatggacaccagatgcactcctgagacttctggaccaagtattatagtgtcatgagtaaaaagaataggtgggtactgagtccaagcttcttcatttattcaacaaacttgattgtgaatctgcttcatgaaatattctgggcattgggaatacagcagtgcatgaatgtctgtcatcaaaagttttatgtcctaattagctggacagcttgggcaaaccatttacccaaagtcagccccagctttctcttgtggggatgtaattttttaaaatcatgagtcatattacatatacaaaacaatttatgtagaacataaacataaaataaatacctatttgcccactatccatgttaacataaagtagaacattgccactagtgtgtctctcccaggtctcattatccttctcttctcttcagaatattttgttattttcttttctgtctgttttttgatttaatcatataaatatttcataaaaaaaacttaattttgcctctgatgttttaaattatttgagccataatgtagtactatcctttgacatatatcttttactcaatgtttttttttttcccattcatccacacagacgtgtgtagctattaataaagcctgggtccaaagaccactagagccagatgtgtagtcaaacaatgttagagttattaactggctgcagcaatagagaatagagaatcactgagcctttcaaaggggagttatgggagggtatttataagatttgaagggtagagttgatcatagatttttttttttttttttttttttttggcagggattggtcaggatttgtaagccagagagttgctggaattgtcaatgggtttatctttagaatgcatgaatccatgtaaaggtctgtttgtggttttctgttaggatatatggatctgaatgaagtgttattattatatggtctgtgatgtacattgtagctgagttggccatagtttatttttcttgtgagtctgggtgaattttatatatgttgattaaatgatcagttttccccgtacag

SEQ ID NO: 1885859 - DNA, 4001 bp, Homo sapiens
tctattttttttggaaagcattttagttttttttttttttgtagagacttttttttttttttttttttttttttttttttggtaagtctcactatgttgcctaggctggttttgaactcctggcctcaagcggtcctcctaccttggcctcccaaagcgctaggattacaagcatgagccacttacttcctaaatacaatgccttatgctttcaatcatatgcagcaactattaactactttgtaaaaaggaaacgaagattgtccgcgaacgactccacaggaggccctgggaataggtagcgggtgggctaaaacattgatttggaatgaaatccaacggccgtggaaccagccctgatcatcaaattattcccagttttgaggatcgcactgcaccctcctctctccctctctttcctacaccttggacagacagcctgagattccagggcgtgtgtgaaggaaagccgaggagggcagggccgcagagagaacaaaggggacacgagttcaaattcctgccagggtctgagacctgcaacgtcagactttgggagcgtcccctcacttctccggaccccaggagtggccgcgcctgctccgcgctcaccctcggggagtctaggagccccctgctaagttgctgagcgagtcggagccccaagagctagggtcgagggggtggggcagcaggcgcctctgccgaggctgcaggtaggcacttccccacccccgcggccccctccttcctccttcctcgcagctcgcacacccacacaaccctcgcccgtcgcggctggagagctgctctcggcgccagcgggcagcagcgcgtcgtcagccagcacagccggccgaagaccaagccggaggtctggggctgcgcagagacctgcacacccgcagcgcggaaccgggggcgattcctatctttctttcatgcttctttctttttcttaaaaccaaaccaaaccaaaccaaacccaaaactcccctgctcccaccgcaacttggaggagcggtggaccgatttgaaggaactgacgcagaggttttattcacgaaccttgaagaagttctgggcaagtgactcaacaggacccgcggggcccggggtagccccagctcccggcgctggttcagtctggcagtgccctctggcagccaacccgcagctgcaggtaggggtgctggacgccccctgattttgttttgggaataataatgacactacctatagcctggacccaggtggcctcgctcggcgattgtccccaccaggtaagcgcacccccaggggtctgcattggtcacccgggtggggacctcgagctcccgagaagtcggtccatgctgtttagccacaggcaggagtggggaactggtaggagacagcttgcttttatcacaggaaattgtgggagacgggaatggaaggcggatttaacattttttatttttgcattgacgcgtggggatgagatgcgtaggggcctggattcttgtaggaaatggttgcggagcggggctgggtgataggtgtctggatttttgcagggactgaaggggaagaaaggtcgtcagtttttgcagaaacctgtgaggaactggcggtgagaggttatgatcctgaaaatgtgcacgaaattgtaaaaagtaggcacctaagcatttctgagaaatgatgggagaagcacttaccgccctggtttcacctgacccccatgctcggccttctggaagatgcccacagacactggcaataatggacgctggcacactctgccggcgcggccggagccccggagttcagcacctcggacagagcccgagccccgccgcccgaggcgcacagtgagcgtggaacagcccggctccctagcccccggccaacgctgctctcagttcagggcagctacgtaacaccgcccctagctccgcgccagaaagggctctcgaatcgcaaaagcaaacgtgttcgatttctgatctgcttctaactgcttcccgtgactgcagaaggaagaggcggagtgtaaagatatctcccaagcttccgcgaaaactacaggcaaactgtgtggcctccccggatttcggaaggtgtacccaaacttctttaaaaatctagcatttattaagcgcttaccatgtgccaaggccccgtgctaagccagtgcaccacaaatttgtgtcctatgagtatccccattttacagatgagaaaactgaagcaagagaggccgagtaacttgtccaggtttatggaactagcaaatggtatggctgcgctcttaaacgctgccagattgcagtggtgggaggatgtgcttgagtggaattccctgcgtgaaatagctctgaacttgggatcagaggaacagagtttaaatcaaagctgtagcacttaaaaacgtgtgcccttagacaaaattactaaatgtgtctgaacttcagattttaactatctgtaaatacttgataatgctttccttgcaaaagtgtcaggggagggtggccaaggagatcatatgtgtggaaagactggcaaactgggaattgtggttgggtgttaggggctgaaaggaaggagcaggtaattagaagagaaggagaattggtggtgaacacttccctcagcacactccaaagggactgggcacagagcggggctcagtgggaggaattctggatgagcttagttcagtgtgtaatagcctcttagattttttaacaggactttatagagagtgtggacatattgcctaccatttgatccttataacaatgttgttaagtaggcaggactggggttattctacttgtttggcaaaatgatgcttgcccaaaattactcaggtacttagtagcagagctgggattagaatccagatctcccgcctctctagcttataatccttccacatggactggcacatcctcaggagcttgaattatggggcagttaagcactaaagtgtatttagacaagtactataaatatgtgacattaatggtttttaaaaccattttgaaacagcagtttcatatggattaatctcataaatgtttattgattatattctattttgttccacaaagaatttaaagcaatttagaaggctccacaagatgtcaggtttgcacgtattcgaagtagtcgagaaaacagaggtgaaacaagattaaggctatagccacagataaaatgaatacaaagtatgtatattataaagtcctagaaacttgctctggtctctaagtactagaaagtgtataaccaagcactttcttggaggtctaggaactttgaaaatgtttgcaaaagtccgtagactcttctcttttgtataattccatcccttgccctctgtgagatcttcactgtgccaaacaagggatgtttaactggaaatccaatgtcagtgtgacttgaagaaggggaaataaagtgtatgacattgtatctgcactcaggtaattaagtgttagttacataatttataatggttcacatgagcaaaccatactttaaagtttatataaaggtttacatccgttagcttatttaggccttctaacaactctgaagagataagcagctacaaaatgacaggaaggacaaaatcctagcatcgcgattttatatattatgtattttactttcatacacaaacccgcatccctatacaggccagttaagtaacctgaatgtgtgaatcgggccaattgtaagactacggagaatgacagggccttttcaaactgaagagtgaataatccatcttaaaacattcaaagaaaatttaaagcacagtgccagccaagcaagacatgactgtgggctacatcggctgtcagacctttaatatgtaatcttggtctaaactactcaggccaaggatctgagaaggcatgggagtgaaagaccctggattcagagagagaaaagtttcaattcctgtatttaagtttcctgtttctaaacatggaagattg

SEQ ID NO: 1885860 - DNA, 4001 bp, Homo sapiens
caccatctctggtcagaggcatcagtagggtctctccagcccccattcaaaagcatctaaccccctaaaccaggtccagatggaatccagaaagtacaaatgggggtcctccaggaaacactgctatttcagaaacaccaatggaaattccactctgacagtgacggcagctggtggtacaaaattgggcggtgtctccgcctaggcaggaaaaacaccagctccaggcagtcagccgttgccttacctggagggctgatcaaccgtcacaaatgtgtttaaaatttctaccccctccccacacccagccatgagaaaataaatgtattattgttaataaatgcaatttggaagtctaaatctttcaaagggctgagtcttgaagataataaaacacattctgggatgaaaaggcagagggctggagcccaaggctggtgtgagcagagcagtggccggctattatacttgtccttcttgggtttaatttcatctttcccatgaatcatcccatgaattcacaccttaagctcactgggccttagcttgtttattgggaagaggacttctagaggtacttctagatcagatatcctaagttccagctcatggggtcagaagtccagtgtaaggcacttgagtgctcaaatgccacctcctcagagaggccttcctggaccacccatctcctttaacgcagccttatgggtcttcatggcactcatcacaccagcagccatgcctttgcttgaaggcttactactgactgtctcccccagcggaacagaagccccacaagagcagcataggtgatgtgtctgtctagttcctagaacagaacccagtacagagtcggcattcatcaatgtgtgtggaatgaatgaatgaatgattagccaagccaagggtcaaccagaaagacagggattccaatcttacaccttcatttgctatctgggcacctctgggtaagccacataacccctccacagtattgtgtatttgcagaaaccacccccataactctggttaacatcagacagtagtggccaagtgctgctcaccatcagggacatttgtggcagtaataagcctcctggggctaataagccattggtcgatacaagtctggtttctggtacagtgggtgcctctcagaccaagatgcacatcttgctggagtctatggccactggtcaatctcagaggcacattctcactcccatatccaaccctgccactcctgatgatgaacaccggccgctgaaactgaaggaagactcctgagtgcctacacatgccaactgcctgccctgaatgaagtacccttctggctttaagagggcagtcagcgttccatttccgctcccactactcccaccccaaagagcaaccctggagggctctcctctagaagccttcccagactcacagaccacacctaaatgcaaagacacaccagtacttttaaccaagacacagaaaggcatgtctgcaacagagccataaactagacaagggctaaaaagaacagaactgctcattatggcttcaggccaacctctgcagataggcttcatcaggcctaccagagacagctgaaagcttcacaaagtacaggcctgcccagtcttcagagaccacaaccagggtacacccaaatcttcatggggaaaggaagacgtgcagaagtggaaggaacgcctgggtggctgtgaaggccagtttctgaccctccatatggaacagccccctgtgccagaacagacaggctactcccactggcagccaggcaagaggctggagaaccacatctgccatcgtcacagagctcttctatgtccccagctgcaggagagtcacactgggctctgtacaccgtcaatgctgccctctggcagggggtatggacatataaaggagcactgaccagacagagagaaagccacagatgcacacctaagtgagtgctattggacttggctgagaggcgaacgctgctgcgtgccctggaagtccccaggacttttacctttatgtcacctaggtggacacagtttgctccctttcttccagtgagttgaggagggcttcccagaaaaggggacctctcaggagctgtatgaatgaaagataaaggactgggagaggctggcccagacttctgcagccagaggggagtttaaaggcaagaaggctagggtcacggagcaactgctatgggaaaggtgagccagcgcgacagcccccaccccagaagaggcccggggcaaggggatgcctgcagcttggctggtattcctcccgccccacctccacagaaaacgggggggggggagtctctcctttgcccagagcctccctgcccctcccctccgcttcacagctccaggcgaggcctcctcctggggcaggccgagacagctcttctcagacttgctcccaccccagcaagcaccttctggagaggggctgactccaccccacccccaccgctgaccaaacagctcattcaagccctgacgggtagaatctaaccttcagggtccgtctacaacccatacctggcataaacgatatttctttccgtgctaacaacaagctctgggaagcaggttattcaccgtttcacagatgtggcaactgaggctcagtgaggtgacctgccaacatcctcaggctcagcagttctcaagcactactgcccactgtacctgactgcctgggtctgcgcctgggcccccgcccttttacaaaaggtccacggcctctcaagagctggacatgaaggatgggccaagtccagtcttgatcggtaatgcccacttgacactcccaggagcagcatcctgagatacacgtaaatgaaaaattccaagtgtgatgagcagaacgtggttgtgtgaacaatcccatggtggtggggatgtggggggcaggtcaaggagcggatccctgaaccccagcagattaaatcctgcatccttctttcctatttcctggtttctctgctccattttcctctagtttccacttagttacttcttcctacctgctgtgaagctctgcaccctgctccatggggtggttcccaactgtgctttagagtcccctttagagctttctaaaaatacacggactggggcaccaccctcagagactgattcagttcaggcagagcctgggtattgcttcagatgctcccctggcagttctgatccacagctggggttgaaatcggctttactaaccacacaccttcttccctgcagtgtatgtgctatgctccatcactccagctccaccacaggagccaggcaccaccatccactataaccactctcttctctcctacccagcccaggatgcaaggactggattcaagaaattaaatttgctacaaaaatacttacatagcatttatacaactccttgtctcattcccgatgctgggcacacaggccatatcagtggactcccctcacccgtccattcagttacaccacttaggcctgcccatgaagccaatggctaaggtgacagttggttacataaattgaagatgagtccctcctccagatgcatggtccctgaagaaatctgaaagtaattcctctaaattgagaatgacaggcccttgcctccaccctatcaccccctgcacacgcacatgcatacacacgtagttctcacgaattctacaggaggcagcagaatccagaaacccagcactgggcactgctggctgcagagttccagcacaactttgctgaaatctctcagcaaacacactctgcgggcctctctctttcaagcttcactgtgcacctctgtctctgcccttccagcccacacatcctgcctcttacttgttccccactccaagataactaggagaaagccaccttcccacccaccctgagtctatggctgatggaatccttatcgtagctacttcctggcctctcaggacatgggcagagagaacccgggggtttacc

SEQ ID NO: 1885861 - DNA, 4001 bp, Homo sapiens
gaaaggaattgaaattaagagaagggagtgattgaagtgtagcgccaagattgaaaggagaaagaggttgagggatagtgagggaagttggagaagagagtaaaaagaggccgcttaccggatttgaaattggtgagatgtttcttgggctggtaggtctgaggacctgaggtcgtaggtggatctttctcacggagcaaagagcaggaggacgggggattgatctcccaagggaggtcccccgatccatgtcacagcaccaaatttcatgcacgtccgtgtgaagagaccaccaaacaggctttgtgtgagcaacatggctgtttatttcacctgggtgcaggcgggctgagtccgaaaagagagtcagcaaagggagataagggtggggccgttttataggatttgggaaggtaatggaaaattacagtcaaagagggttgttctctggtgggcaggggcaggggtcacaaggtgctcagtaggggagcttctgagccaggagaaggaaattcacagggttaatcactcagttaaagtggggcaggaacacatcacaatggtggaatgtcatcagttaaggcggggcagggccttttcacttcttttgtgattcttcagttacttcaggccatctgggtgtgtatgtgcaaatcacaggggatgcgatggcttggcttgggctaagaggcctgacagtattaagtgacggaattgcataggcaacatagtcttttcccaaatttccaagaagagaaagagaaccacagaaacatgaaagctttgcccaaaataatctcattactaaattgtagatgtgggaattggctccccaagtgtggctgggttctcagtagcatttgctcctgaaggtggtgtactatttgcatagctaattaaagcaggatgcatattgaaatgccttaataaaacattgcccagtagtgaggaagacaactactcccgataaagtgattttgtaagcaggaaatagttcttgccatactgttcctgacagcaagacttcatttactgcttaatggtcatttttttttttttggcagtaaaaatagtattttattccacccccacccgccctccctctccctgcaacccccagtacacctttcccctctcgttcccacagcaacgttacaatcagaaaaaaaaataagtttcagggggcaggattggagcgggggaggggatatgggtaaaaacagtcaaatcacaataggaatttttcaaaataggttattccacttagtcatcatcttctccctcatcttcaggttctccttttcgcttctgacccctttcttcttcacggagctcttcttcatcttcctcatcatcaacctctccatcgttataacctttttcatcctcctcctcctctccactcacgtcctcctcttcaccttcctcctcctcctcgtcctccactacctgagcatcttcgtcatactcctcctcatcctcatcctcctcctcctcctccaggccctccacgtagccctcagcatccaagttaggggcctccttgtcgtcccggtcatagccgtcaagatatgtgagttgcaggaggagcttgaacacattttctcggtagtcgttcaggttggttacctcgcaattgaaaaggtctaagctcttgaggttttctaagtttttcagtggctctgttgtgctgaggtctttaattttgttgccacataaatttagatgcgtgaggttcggacacttttctgccaatgcttccacgccccccgagactctgttatcgcttagttcaagcttcttaagtttgtttaacttcggtaagtttgcagttgaggtgaggcctacgttggttgcactgaagaattccagttattcagattcatctgtgaggccttcgagtttgccttcattcgaccgactgttgtccaggacaagttctttcacatcagagggcgtcctgttccgcagctctaaatgaatccgtctgcccatcttcatctctcgcgttctctgcagaggctcccgcgccgctggaattcaatcaataacacggccgcgcgttttagcactttcaaggctcaaccagctccgctcagttctcgagcccccagcacccccggcacacgctaacctcaatggtcattcttttaatgctgaatttttaaataaggaaactgggagaggtttttgtaaagattaccatcaagtaaaattgtagaggaaaacccaatacctaagcaaaacaatgcctatgtgcatgcattccaacccaagaaaaacagtcatgatgtacagtataaaacttccttcaacaactcaccagattatgtaatggagatgagccacttatctatcgactttatcaactaggaacaaaaatatctatcgactaggaacaaaaatagtgtttattaacagaatacattaaaagtgtcatagaaagcagtatgtaagagccccagtcttaagaatattgagtaactaaataacttccagattacagattgaattaaagcaattattcttactggtgatgatctaaactaatcagatcatactggtttacaggtccacaaaaaggatatcaaaatcatggtcagattaccattaggatacatataaatagtagatacctgattaccaataacacttgaagttttctttttttcttttttttttttttgagatggagtctctgtctctgtcgcccaggctggagtgcagtggcgcgatctgggctcactgcaagctccacctcccaggttcacaccattctcctgcctcagcctcccgagtagctgggactacaggcgcccgccaacacgcccggctaatttttttgtatttttagtagagacggggtttcaccgtgttagcccggatggtctcgatctcctgacctcgtgatctgcctgcctcagcctcccaaagtgctgggattacaggcgtgagccaccgcgcccagccaacacttgaggttttctaacatgtgattacaataaggcaaattcctttaaggggtttcatggcctatacttgttactttttaactatactaaattattcctatctgaaaaacttcaccaaaattcagtttgatgcttcttactttttgactacttatatggacctagatatcaactttacaaaatgaaataattatttttccatgagtatataatgctgacttaatatggcagatatctggtacctcatatttatgcatatgagagtaagaacataaaatttaatgccagaaacatgcatggttctatctaaatacttgattagaaagctctttgttcttcaattccatcttatcacacattaaactaaacatgtggtggcattatttcaatatattattagtccatgttctcttttgtttcttttttaactaagaaaatactcataacacaaattaaactttgaaagcacaatgagtagtttctaagttgaatattctccaactgcagtacactttcttgcatctcagatagcaaatctaccacagtatatatagcacactgtgagaaagaataatattgtaagcagagaccttgatatataggaattcaagtatttgagaaagaaccctccattttcaaaagctaaaatctggaagactataagtttttatgaatttgaaattttaaaacagtgtatattttgggaaacacacactcaaaactgaatttttggtaggaagagcctgaaactgcagtgcaatcaggctctctctattctctctggattacattgaatactttcataattgcattttttgaaagtacaatatccactagtgaaattcagaggtgaatagagcatttattctctgagttctaatatttttattggatttttttgccaagtaatcgacctgtgcacacacattgaggagactgtcttaagctaggagatgaagacttgtatgcaagtgtttataaacgaaggtcaggacaggaaagagaaggaagcctggcacagtgcagcct

SEQ ID NO: 1885862 - DNA, 4001 bp, Homo sapiens; identical to SEQ ID NO: 1241844

SEQ ID NO: 1885863 - DNA, 4001 bp, Homo sapiens
ttgctgaatgaaataatgagtaaaagctaggtaatagaaataatacttaggtctaagagggaccagtcttttttttgtagttgtttagctacttcattttgttaaaaaggacatcttaataactaattacttagtgccattactgccatctagtggtgactgatgttattatactgctgggtccattctcaatgatgttactgtactggcagagaagggaatcaatatatgcaagatatctgttgagtgtttgccttgtttcaggtattgtaccaggaagtttacagcagtacctgctggttacgccagcaaagggagtgtaagctgctttcccatggtcaccatctaaggaggagacctgaattcaactccaggagaccgtctctgtttttcttttctttttatttttttgaaatacatttctttattttcattcccatatagcagagatggaacaaggatagtgatgctggaaaatcctgctttgatcaaatcatcacataagttaacgtcagaaaacctgtatttgaatctgactcctctatccttgccctgggaaattggacagattgacccagttgctgtgagggctgaattagatgatgctgaaagtgcttggcctgcagtggatatgcaaaacaatagctgttattttagacagtctccaagcagggaaaaaagtcttcatgccttctaactaatcatacaaacgtatgcagtgtgtttaaactctggcttcagagtttaacaaatacaaatctaatcgaaaaaattagtcaaactctatgaacaaatttataactaatacaaatctaatcgaaaaaactagtcaaactctataaacctaacttgattttaaaattctagtggctacaacactcaataatgttttcacattgtttgtgaatccattccattgatacatacaaagatgtaggagaaaccatttcagatcctctgggaggacgactttggttatcttatgatgctgctggattccaaagcccttctgatttctaggcataactgcatcaaaagaagggggcccttctctctccaagaagagctggatcaaagggctctctggaggcaccagctccacatgacatttgccttcagcattcttggcctgggtgtctgctccaaaatccatgagcaggcaggccagctcttcactggctgtcctggccactgcatgaagtggggaatccttcatgagggccttcatgaaggccactgcatgaagtggggaacctctccctgggttcaggtctgctcctgactccagaagcttcttgacacaggctatctgctggttttcacaagccaaatacagtgaagtgcccacgtggctgatgttatggtcatttttgcccctataagctgtaagagagtcgacacactccacgtggcctctcctagcagcttcatggacgggggatgccagatcactctcaggttgaacgctggctccatgctgcagaagcataatcccagctgctgctgatacaaacattaaacagtggagtgtgccagtctgttgtcacgccattcacctgagctccatgctttaataaaatctttacacgagagggatgacctctgagacaggcttcatggagtggggaaacatgatctgccatgatgatgttcacaagccacccgtggctgatgaggttcctcagagacagctgatgtccgtagattgcagcttcaggcataggagaccaatcagacacagaatcacccatcaatgggtttgaaagaagcctggtgtcaggagagtctcttggccccgtgggcttgctcccatccatgcccccttgtttgccatccatgctgccctctcctaagcgagcaagctctgcgctccacttcagttgctcagcaaagtccaaactccatgctccccctgctcctgaaaaattccagttctgtggctggctgagctgcacacgtcctagtcaaatggtctaactggctggaggcccgccagaggccgcctgttttttttttttttttttttttttgagacggagtctcgctctgtcgcccaggctggagtgcagtggcgcagtctgggctcactgtaatctccgcctcccaggttcacaccattctcctgcctcagcctcccaagtagctgggactacaggcgcccggctaattttttgtattttcaataaagacggggtttcaccgtgttagtcaggatggtctcgatctcctgacctcgtgatccgcctgcctcggccttccaacatgctgggattacaggcgtgaggcaccgcgcccagccagccacctgtttttttctttttttttaaaagagtcttgctctgtcaccgttgcccagagcttgagtgcagtggcatgatcatagctcatggtaacctcgaattcccagcctgtagcggttctccccactcagcctcctgagtggctaggactacaggtgtgtgccaccatgcctgcctaatttttaatttttgtagatcttgctatattgtccaggctggtctcaaaatcctgggctcaagtagttggagagggccagaacaaaacgctccttaatggcaacagatatattttgttttgtttttgttttttgagacagagtctttcgctatcccccaggctggagtgcagtggcaggatcttggttcactgtaacttctgcctcccaggctcaagtgattctcgtgcctcagcctccccagtatttgggattacaggcgtgtgccgtgactaatttttgtatttttagtggagacgggggttttgccatgttgcccgggctggtctcaaactcctgacctcaagtgatctgcctgtctctggctcccagagtgctgggattacaggcatgaggcaccatgcccagccgacatattttgtaaacagggagaaaaataggtggttcttaaaatttcagtaaaatgttcacattctttcttatataacaacagaggaccactgagtgccctcaccttgaagaccccaggacacctggatacacaggatttctgtatggcttctttattttatttttattttttgagatggagtcgctctctgtcacccaggctggagtgcagtgctgtgatctcggctcactgcaacctctgcctctcgggttcgagtgattctcctgcctcagcctcccaaatagctgggaccacaggcgtgtgccaccacgcctggctaacttttgtatttttagtagagacggggtttcacaaagttggctgggctggtctggaactgctgacctcaagtggtctgcctgcctctgcctcccaaagtgctgggattacaggtgtgagccaccacgcccggcctctgcctggcttcttatagatggtttctcttggtgtatgtttcctaggctttttgactttgtggactagaaagctctggtctccaagtccctacaaacttctggatcttctacagattaaacattttaacagtcttcataaagtgcatttgaaatctaaggtaaacattcattacctgtacaccaaccacctcaaaggttttatgaaataagatggaatatacataaaatgcatgagacaggtgtactttgctttatgtgtttgtgacacgttcacacaagtaaatttttaaatttttggtgaggagataaatttggcaattttttttttttgagacagagtctcactctgtcacccaggctagagtgcagtggcgtgatctctgctcgccgcaatctctgcctccccggtttaagcagttctcctgcctcagcctcctgagtagctgggattacaggtgcatggcaccaagcccagctaatttttttttttgtatttttagtacagacagggtttcatcatgttggccaggctggtctggaactcctgacctcaggtgatccacctgccttggcctcccaaagtgttgggcttacaggcatgccccactgctccccgccaggcaattttttttttaccaagagtaaattcaaaggagcc

SEQ ID NO: 1885864 - DNA, 4001 bp, Homo sapiens
tgcccacagggaaagaatgcacttgtcatgctgaagtgaacattctggttctcctgacagttagagtatgtattttaaattaataaattgtcattcttattttatatcatcagtttcctgagctactattaatctgcccccagaaagatctgttttgggtgtgctattgaattatggtccaaagtctacaggacaaatggcccactctggccatagtaaactcaccaaaagccatccaagagaacagccctcggagctgttcggggggatggggaagcaggacatggtagaagcctgtcctttggggccacacgccctgttcttggattcctgctttttctactaactcattacagaatctggggcaaataagctctgtaaacctcagagccaacctgggtgggtcgtggggacagggcacataatgagagtgtacatttgatattagttatcttaaaggcagaccattgatgtctctttgtcaacatttctgcataaacattaggaacaaatgaggacagcgagtgtaactcctttaagacattctgcaataaaagaaaggagataatggctgggcggggtggctcatgcctgtaatcccaacactttgggaggctgaagtgggaggattgtttgaatccagaagttctagaccagcctgagcaaattgtgagacctggtctctataaaaataaataaataaatggacataagggtgaacaggtgatgggacttaaagagaagctctgtttgcagtgaggagctagagggcatgtggtaaactgaggggttggggccagtggaaagagaaagattgaaaatatgaagtagagtgacagaaaagcaaaggaattagaggagattggaaaaagggaaaaggaaggagccagggcagttgaggaagagacaggaacagtgcaggccaggaaaaagcacaggcagagccttggcagccccccttgctggcccagagacctgcccaggcgagcccctccctgtctgtctcctatctgagagcctagggagtaactgaagtgtccccaccagggtggggatcttctacttcctttgggtgtgggtgctctccagttctctgaagactcaggaaaaagcaggccaaggaggaagggacccaatatggaacatgcccaagcccagactcaatatctaacgtgcccaaccccagatctccttctatgctcctttctctgttccgttcggcttgcctcctctcctctttggaggcagagtgttacacaggagagacttttagaatagcaaggttcaagtcccagttcagtggctttctatctagcattactttgagcaagtcatgtaccctgcctgagactcaatctccacatctgtaaagtggagatgggaatgccttcctccaagctgtgtgaggttaagtacacaggtaagaacagttcactccataaaagtgtgttccctccatctcatttccacctccccagtctactttttctcctcttactccatctccttctctcccagtttcctttccgtttccctaacattttttcacaattctcaacaaggcccctgcttcccatcccaacccaccatctctctgaggactaacccaaccaagcgtggagaggaagaggctccctgtgagggctgcaccagtgtggtcttgagcaggagctgggtcttaggatgtcaagcaaggatgacaggaggaaggaacaagcccttctctcctccagctgcccagcccttcccccttcctccctctggccctaggttcccagagcctgaagagcaaagcctcagagagtcctcccaccctgggacccatgtaggggtgaccttgctgtcccacaggcatccctgcctgccaacccaaaatattacctgcagccccagtgctggccccctgaggagcaggtaggattggggaactgaaactcagccatgagaccccagagatgggcgatccagatgaagcagagtaatctcagccttgggagctgagacagcgagagaaaaaggaacaagcccaggcttctgtcctgcatgtgtgcagttttgagtgtgagggtgagggtgggagctaaagataattctatttggtatcagtgacagctgccaatagccacagtgcttgtagattgtaggaactgtacaaaagtagaagtaaaaaaaaaattaagccaatctgtgtatgtgtgtatgtgtgtacgtatgggtgtgtgtaaaagccaaatttataaggccaggagcggtggctcacacctgtaatcccagcactttgggaggccgaggtgggtggatcacctgaggtcaggagttcgagaccagcctgaccaacatggaaaaactccgtctttactaaaaatacaaaaattagctgggcgtggtggcacatgcctgtaatcccagctactcaggaggctgaggcaggagaatcacttgagcccgggaggcagaggttgcggtgagctgagatcatgccattgcactccagcccgggcaacaacacgaaactccatctcaaaaaaaaaaaaaaaaaaaaaaaaaaagccaaatttataaatggcttgcaactacaggtatatgcaattaccgtgcctcaacaataaattattgttatatttactgtataacatacagcaggttaattgttgtgagttgtcatgtccatacaggagtctctttatattctagtcatgcagccattacccagccacaacatttcaaagcttctcttcgtcctctcacatatcccctgttcattttccttcttggtctcctagtttctttttttttttttttttttttttttaattttcatagactattgggaaacagtttggttacatgagtaagttctttagtggtgatctgtgagattttggtgcacccatcacatgagtagtatacactgcacccaatttgtagtcctttattcctcactcccttcctaccctttccccctgagtccataaagtccactgtgccattcttatgcctttgcatcctcatagcttagctcccacttataagtgagaacatacgatgtttggttttccattcctgagttacttcaatcaaaacttcaggcaacattggaagtacttacagaaatgcattctagtttccttttctccttcccttctcttcctttcctagtctgctcttgctggtctctttctcattttcccctccttgtcctcatcctgtccctcttctctcaaccctgctttggccatcttccttcctcttctcacttccctattgctccaccagtgctggcgttaggccgcccaagtttgctcctgttaaccctagaatctcaagcaagttcccctcccttctaagctccagttttctcctctgtggacaatcagagtaactcataggatcactaggaaaactaaaccaagccatctccataaagaaattagctcaatgcctgctgccacaaagttagtactcaataagggaaagcgatgattatttttatttttcttaaaatgtatttttttaactctccacatggaaaaaacctcctaccaaatttgagaaccatgtcctccctctactgacattcaattatcaaagacttatcaggtgcctactctatagctaacatgggctgggcatgagggaggcaaaaattcatttccagtctttcaaaagcccacagtctggggaagatgagagcagacagaaacataaaagaccattcgaatcgtgagtgtaggccagacacagtagctcacacctgtaatcccaacactttgggaggccaaggtgggcagatgccctctatctcctcacttgagtccaggagtttgagaccagtctgggaaacatggcgaaaccctgtctttacaaaaaattagccaggcatggtggctcatgcctccagtcccactgcttgggaggctaaagtgggaggaccacttgagcccagaagctcaaggctgcagtgagctgtgattgtgccacttcactccagcctgggtgac

SEQ ID NO: 1885865 - DNA, 4001 bp, Homo sapiens; identical to SEQ ID NO: 1241863

SEQ ID NO: 1885866 - DNA, 4001 bp, Homo sapiens; identical to SEQ ID NO: 1241867

SEQ ID NO: 1885867 - DNA, 4001 bp, Homo sapiens; identical to SEQ ID NO: 1241868

SEQ ID NO: 1885868 - DNA, 4001 bp, Homo sapiens; identical to SEQ ID NO: 1241887

SEQ ID NO: 1885869 - DNA, 4001 bp, Homo sapiens
atatccaaccctgtgggcctggttaccagcagccctggcagacagcagctcaggccaatgggatgcaggcagttctgagagccggtacctgactgctgggggctccaggatgcagcaagtccagggtagaggactgcagaccctgatggagaactgtcatccactgcggggcacagagtccagcaacgagattccagctaagtgtcgctgaacatctgatgggctgattacaaattggtcccctggattcattaaagtagatttcccaagagaagctgtccacggcagagtcacacccagccaacctttgagctccattctgatgtcaggggctggctcctcagctctctgcctccaggctcctggcaactgggccctttcttgcttggggtggcatgattcccctggaggcatccggcaggtctgcagatgcacaggcactagatgcagtgcccccagggccattctcagaaagtgaagcttgattttttttctccatccatggtgtgagtatggcatgaaatgcatgcacggctcctctcacatgatgaacaatctctgggatttacacccaaacttctcctttctctcttgtcctcctcactcatgggccccatctgcatgagaagaaaagagaagaagagaagagaggaggagaggagaggagagaagaggaaaggagagaagagaagagaagaaagaaaaagaaaaagaaaaaacaaaaatcaaacaaacaagacatcactcattccccccgtctaccctcccaccccaccccaccccatttgctccccacccactcatacaactgcccctgtccagggaaaagacaattacttccagataagatgttgccatttacaaggagatttcatgcaaagcaatggttggagcttccatggtagaattttaggacaatatgtaggagtacaatattttagacattgaattatgtgaggatcaaataattgaaagctggaatttttttttctttttgagacggagtctcgctctgttgccctggctggagcacagtggcatgttctccactcactgcaacatccacctcccaagttcaagcaattctcatgcctcagcctcccaagaatctgggataacaggtggccaccaccatgcccgcctaatttttgtatttttatagagacgaggctttaccatgtaggtgaggctggtcacaaactcctgacctcaggtgatccgcccaccttggcctcctaaagtgctggaattatagtcatgagccaccacgcccggccaaaagctggaaattaatgagttcaatgcagacttcaaacttcttgaggaggctgtggctgttgagtggtggagaggagaggaagggaaggagggaggaaacaaacacatattgagcacctactcggtgctttccctgtgatgtcccatgtaggccacaaccatagagtgcaggcattatttatgcctggtttcaaaccctggtcacttggatcccatgatcctgtgttcccaagctccagcccccagctgctcctgagaaagtcaagcttcagagagcagggctcccactcccaaccagatgctcatggctttctcctttcacacccaggcctctactctgctgttcacctaccttggtctttttatctgccttggtgcctggaattaccggatcactgcttcctaccttggggtcagaattgccctcccacaggtactctgtgaccacacagacatccctgtgggggccacactcagcaccaagccctcatggaaagcaactttttaggcaggatggggtggggcacagaaaggaaaggtggggcggcggtttctgttgcaggtcctggcctggcatgtccccagcccccaaccttccctcttcagcaagctcactgattacctggagtcctcatcctcaaggctggagtctgggagaagactcttggaggtgggtttgtttggcctaattcaccaaggccccctggctcccttggtcttgtcaccatggaaaccttgtgaggtcaccagcaccattcaaataagagaaaaaaacgtttctccctcccacaaagtgagctcctagttgactccagtggcttctatggaggaaccggagggcggggcccagtccgaggaaaagacctggcccagccctcagggatgggttaaccccttgatgcccagatgatggctgctcagactcacgccttctgcctctctgaagtttctcaggcatctgtgccccggaagagtgaatcctgcagctttgtatacacaccaaacagcttcatgctatacctggaaaggtggggaaggagctctgaatccaggcaattctagtgaacaaaaactgcctactggagattcagggagctgttgagaggcagggagccgggggagagaagggagctggagctctgggtccctgcttcagacccttctccctctcaagcaaaggtgagagtaggagctgccaggtacagctggtacaagagcacagggtattttacctctccccatgcccatgcattctaaggttggctcagctactgaaggcccttcacacccgcttcctccatgctgccagcatgcctgggacacttgcctgcactggagagggcctagcctaccttctgcctccatttgaggccagcatgagggccaacagctggctcctcatccacttttcttctctagcaggccaatcggctctgacctatccctcccaggacccagaatgcctccccgtgctgccctcctggagtccacattcttctcactacttccaggactcttcccagcacccactcctgctgcacgtctcccccaccatcccctctggccagtgggtctcctcactgttctaggtctagaatatgctgcttcctttattcacattcctaagacaacctctctctccctttgtatctattttaatcctgtattgcattccttcaccatcatctatgcactttcacctttctgtttccacaacaccccagcactaccatcagcaccaggcttcccatcagcaccaactccactcaccactatcgtgaaccaccaccatcccccttctatcacgctgcccctcaccactgtcacatcttctcaccattgtcaccaccatcccacagtcaatgccacaccaccatttctaccatcaccaactgtcaacaccattctcaccaccttcttaaccaccatcacaacatagctgtgaccacaaccaccattcctaccaccctactgtcagtaccaccaccaccatctcccttatcagtgctgaactcactattaccaccacagttaccatcaccattcttaccaccatcataagtcatcatcaccaacattgtcaccactaccaccaccataactgccatcctattgtcaacaccagcaccaccaccatctccatcattggcactgcactcaccgtcagaaccactgttaacctgttactaccattgtccataccctcatcaatatcacactgtcatgaccacacattggtatcatcatgaccatgcactcatcgccaccaccatcatttggagggaaataatgtgttccttcataaaatcaatcaagcaatcaatttcaaatccttcaagagaggccataaaagaacctacatagagtgaaacagctggacctcacggcccccattcttgctccctgggattctgtatcctttggataatctcacactaattggctactgttgccaccaaactggccctaggagctctttctttaacacctcaaggcacagctgagatagagctagagcattcatagtaagtgggacaataatattaaacaactgatgagagtataaactggcacgaacttcctgaagagtagctgaacaatacaagaaaaatctttgaaaagtgcattctcagaaatcttacttctaagaagttatcataaggcaataattagataaatttgcaaagatgatgtgtggatgttataataacaatcattggaaa

SEQ ID NO: 1885870 - DNA, 4001 bp, Homo sapiens
gagagaaagatggggtgcaccagctggagctgcagagggcagggaagtggggaggaaaggggtatcctgaaacatctttctgggctggtaacagttgggcttggactgggagctgccctgttgggggaatatccaaccctgtgggcctggttaccagcagccctggcagacagcagctcaggccaatgggatgcaggcagttctgagagccggtacctgactgctgggggctccaggatgcagcaagtccagggtagaggactgcagaccctgatggagaactgtcatccactgcggggcacagagtccagcaacgagattccagctaagtgtcgctgaacatctgatgggctgattacaaattggtcccctggattcattaaagtagatttcccaagagaagctgtccacggcagagtcacacccagccaacctttgagctccattctgatgtcaggggctggctcctcagctctctgcctccaggctcctggcaactgggccctttcttgcttggggtggcatgattcccctggaggcatccggcaggtctgcagatgcacaggcactagatgcagtgcccccagggccattctcagaaagtgaagcttgattttttttctccatccatggtgtgagtatggcatgaaatgcatgcacggctcctctcacatgatgaacaatctctgggatttacacccaaacttctcctttctctcttgtcctcctcactcatgggccccatctgcatgagaagaaaagagaagaagagaagagaggaggagaggagaggagagaagaggaaaggagagaagagaagagaagaaagaaaaagaaaaagaaaaaacaaaaatcaaacaaacaagacatcactcattccccccgtctaccctcccaccccaccccaccccatttgctccccacccactcatacaactgcccctgtccagggaaaagacaattacttccagataagatgttgccatttacaaggagatttcatgcaaagcaatggttggagcttccatggtagaattttaggacaatatgtaggagtacaatattttagacattgaattatgtgaggatcaaataattgaaagctggaatttttttttctttttgagacggagtctcgctctgttgccctggctggagcacagtggcatgttctccactcactgcaacatccacctcccaagttcaagcaattctcatgcctcagcctcccaagaatctgggataacaggtggccaccaccatgcccgcctaatttttgtatttttatagagacgaggctttaccatgtaggtgaggctggtcacaaactcctgacctcaggtgatccgcccaccttggcctcctaaagtgctggaattatagtcatgagccaccacgcccggccaaaagctggaaattaatgagttcaatgcagacttcaaacttcttgaggaggctgtggctgttgagtggtggagaggagaggaagggaaggagggaggaaacaaacacatattgagcacctactcggtgctttccctgtgatgtcccatgtaggccacaaccatagagtgcaggcattatttatgcctggtttcaaaccctggtcacttggatcccatgatcctgtgttcccaagctccagcccccagctgctcctgagaaagtcaagcttcagagagcagggctcccactcccaaccagatgctcatggctttctcctttcacacccaggcctctactctgctgttcacctaccttggtctttttatctgccttggtgcctggaattaccggatcactgcttcctaccttggggtcagaattgccctcccacaggtactctgtgaccacacagacatccctgtgggggccacactcagcaccaagccctcatggaaagcaactttttaggcaggatggggtggggcacagaaaggaaaggtggggcggcggtttctgttgcaggtcctggcctggcatgtccccagcccccaaccttccctcttcagcaagctcactgattacctggagtcctcatcctcaaggctggagtctgggagaagactcttggaggtgggtttgtttggcctaattcaccaaggccccctggctcccttggtcttgtcaccatggaaaccttgtgaggtcaccagcaccattcaaataagagaaaaaaacgtttctccctcccacaaagtgagctcctagttgactccagtggcttctatggaggaaccggagggcggggcccagtccgaggaaaagacctggcccagccctcagggatgggttaaccccttgatgcccagatgatggctgctcagactcacgccttctgcctctctgaagtttctcaggcatctgtgccccggaagagtgaatcctgcagctttgtatacacaccaaacagcttcatgctatacctggaaaggtggggaaggagctctgaatccaggcaattctagtgaacaaaaactgcctactggagattcagggagctgttgagaggcagggagccgggggagagaagggagctggagctctgggtccctgcttcagacccttctccctctcaagcaaaggtgagagtaggagctgccaggtacagctggtacaagagcacagggtattttacctctccccatgcccatgcattctaaggttggctcagctactgaaggcccttcacacccgcttcctccatgctgccagcatgcctgggacacttgcctgcactggagagggcctagcctaccttctgcctccatttgaggccagcatgagggccaacagctggctcctcatccacttttcttctctagcaggccaatcggctctgacctatccctcccaggacccagaatgcctccccgtgctgccctcctggagtccacattcttctcactacttccaggactcttcccagcacccactcctgctgcacgtctcccccaccatcccctctggccagtgggtctcctcactgttctaggtctagaatatgctgcttcctttattcacattcctaagacaacctctctctccctttgtatctattttaatcctgtattgcattccttcaccatcatctatgcactttcacctttctgtttccacaacaccccagcactaccatcagcaccaggcttcccatcagcaccaactccactcaccactatcgtgaaccaccaccatcccccttctatcacgctgcccctcaccactgtcacatcttctcaccattgtcaccaccatcccacagtcaatgccacaccaccatttctaccatcaccaactgtcaacaccattctcaccaccttcttaaccaccatcacaacatagctgtgaccacaaccaccattcctaccaccctactgtcagtaccaccaccaccatctcccttatcagtgctgaactcactattaccaccacagttaccatcaccattcttaccaccatcataagtcatcatcaccaacattgtcaccactaccaccaccataactgccatcctattgtcaacaccagcaccaccaccatctccatcattggcactgcactcaccgtcagaaccactgttaacctgttactaccattgtccataccctcatcaatatcacactgtcatgaccacacattggtatcatcatgaccatgcactcatcgccaccaccatcatttggagggaaataatgtgttccttcataaaatcaatcaagcaatcaatttcaaatccttcaagagaggccataaaagaacctacatagagtgaaacagctggacctcacggcccccattcttgctccctgggattctgtatcctttggataatctcacactaattggctactgttgccaccaaactggccctaggagctctttctttaacacctcaaggcacagctgagatagagctagagcattcatagtaagtgggacaataatattaaacaactgatgagagtataaactggcacgaacttcctgaagagtagctg

SEQ ID NO: 1885871 - DNA, 4001 bp, Homo sapiens; identical to SEQ ID NO: 1241904

SEQ ID NO: 1885872 - DNA, 4001 bp, Homo sapiens
tacttgtaaaaatgtaaatgttagatcgttcactgataggcaccaatatctttaacagaaaaggttaattcaaacaaatgtcaggctaaactgacaacagaaataaaactggtcttcccaagttcagttccttgtggatttgttatattgctacatattacacctagttttatgtgtctagatgctctgtatctagtatactcttgagagcctccaaatattaatatttcttttttttttgagatggggtgcagtggcgtgatttcagctcactgcaacctcggcttcccacgatcaagcgtcctcctgcctcagcctactgagtagctgggattacaggtgcccaccaccacgcccagctaattttttctatttttagtacagatggggtttcaacatgttggctaggctggtcttgaattcctgacctcaagtgattcaaccacctcggcctcccaaagtgctgagattacaggtgtgagctaccgtgcccagcgaatatttctagattttagcagttgcataaattctactccaggaggcttaatataattgtccttaatataaatgtcacatttcaaatgacattcaaaaatgtaaaatgatcaatttagaaaaaaaaattactcctacccacttcctctttttctttttcttttttttttttttgagacagagttgtactctgtcgcccaggctgaaatgcagtggcacaatctcggctcactgaaacctacgcctcctgggtttaagcgattctcctgcctcagcctcccaagtagctgggactacaagcgcgtgctaccaagcccggctaattttttgtattttttagtagagacagggtttcaccatgttgcccaggctggtctccaactcctgagctccggcaatccacacgccccggcctcccaaagtgctaggattacacgtgtgagccggcgtgcccggcctcacttcctctttcatacaaggtcagttctcacctatttcaaccatcaatatgatcgtattcaaaaagaccaggaagatgatgaagtttttgaagagaggacctgttgtctcttaaggaaatgtacagagtggagttctttctgatttatgcagctgaaataataagagcaataacataagcagtgaaaatgagacagtggagtatggggagcaaaaaataagtcattaggcagatgatcaacagccaggataaaaatgagtgacatgaaaggatacactcaaggacccatccggcccacaaagaaagaggtggcctctgactgcagcgcacatgaagcctgctcaacagcctctgggcatgtgaaatctgttctatacgctgaggctttatagagaaacgcactagctggtgttgatctcccaatacaagtttcttctggcgggaaggatctacaacaaaaattaaaaagggatagtggataaatacaaacaaaatagaccaggtagggttgggggcagggatactggtcaggtaatgggttcccctaatgccttactgctagtccttctcttctcacagcaactaagaattctgtttggagtgagagcaaatgtattgcttatgaccaacactgtccatgcccacaaaagcagcaggctcactctcaaagttttaagagtctttgacagaaactcttcccaatcatccatggctagtggctatcctaggcctaaaagtgaaagacgtggattctatctcttcagttttatttacaagcccttgatttatcaagtttggtaaaccagcaactaaacctccccagaattttccactcttaaatgtagaggatgtggataggagtcttaaatttaaattagtgaagaaataggctgctgaccaagtaactccctgatagtgtgccgcggcacagcttggctcaagccttgcaaatgctcaatgagagagaaagtatcgatgagacgtgaacgaatggcatcagctcggggaagctgcatctgctcttcttgttggtaagcggccatgtctgctaagaaaatgtaagcatcaagtgtcatttcattcttggagctgcaccaaggattacaggttttctgtcccctcctccccaccctctttacccttaagattccttaatgtacccacatctacgaactaggagcagttgggaagaacaaacattctactaggactcagggtgttttgaaacaaaaggggctaagtggtaaagacattgcacagtcgaccaagcggccaggcatcttcactttgtgatggcatttctaattaaaactcattaaaaacaaaacaaaacaaacaaaaacaccgcaagaaaaaggagcagccacaagggcaggggcccggggctggacaaagaatctgggtcccacctgtgcctgagacaatcgggcaatgaggtggagttgggggaggtcttggcctgctcacgcaagagaaaccaagtgcagagaaattggacaaaatgccaaagcctgacattttgaaaatgggtcccgtcccaagtgtgtccactccaacactccttcgggggctagctccttctctcctccattctcgcttctgggcctcacctcagcccaggttctctttgcccactcagtccttatttcacgcttccgcctccagctcaggtgccccgagcctggctacccctatgcaagacgagctcagggccggctcccagcctcactgcgccccattccccgccccgctcgacccccaggtttcggctcaccccgggacccggccctagcccctacccacagcccaggaccatgcggagcaacgctcgcccagccactcgccgcctaggccccgccccgccccgctctccggccactcagcggtaaccagctggtcccgcccgccggacgaaggcgacgcgcagccaatcagcggctgccacacagcggcccgagccgggtttgggggttgggacctccggctgcaggtcccctgggccagacgcgccagcgcaggcagccggtttgtggtcgcgcgcccgacctccgcagtcccagccgagccgcgacccttccggccgtccccaccccacctcgccgccatgcgcctccgccgcctagcgctgttcccgggtgtggcgctgcttcttgccgcggcccgcctcgccgctgcctccgaactcacggacgacaacttcgagagtcgcatctcctacacgggatctgcgggcctcatgctcgtcgggtttttcgccccctgatgacgccactctgccaaggcgggggaagaagggccgggctgggccggggccgggggcgagggcgcggggaactgttgggcctacgcagcgccggcgcccttcattcctgtgggcccctgctgtggcgggcacatttctcattcccgggagctggaggtgcctcgccgagagcggtggagtcggtgctgatcggcccaaggaaaacccgaaggctgcgctcacgcagggcctcatccttatctcggtgctcttgtggcacttcctatttgcagagggttttgccaccccttcccccagttcaatatgtagctatattgtttctgcatgagtcagtattaatgttactccagtctacagactagacatcccaaagccttgtagtggaagcggacgtttcaccaaatgcagaagtcctggatccctagggtatttcctttcatcttacctcacgccgcacagccattggtttctagccaaggtcactgagtggctgcagaatggtcctaagtgctttcttgaggcaggcaatttgtccgtcacatggtgtacagtttctcccttcagctgatcacttacatctcagtaccggcagatacctctgtccaaacgaaaagagtacctgaacaagaataattccatcataatctgtccatattgtccattttaattaggatttctttaaaatgtcaatactccgaataggaacagctccagtcgacagctcccagcatgagtgacgcagaagacgggtgatttctgcatttccatctgaggtacccggtt

SEQ ID NO: 1885873 - DNA, 4001 bp, Homo sapiens
cagtgagaatgagacaatggagtttgggaagcaaaaaataagtcattaggcagatgatcaacagccaggataaaaatgagtgacatgaaaggatacactcaaggacccatccggcccacaaagaaagaggtggcctctgactgcagcgcacatgaagcctgctcaacagcctctgggcatgtgaaatctgttctatacgttgaggctttatagagacgcccactagctggtgttgatctcccaacataagtttcttctggcgggaaggatctacaacaaaaattgaaaaggggtagtggataaatacaaacaaaatagaccaggtagggttgggggcagggatactgttcagataatgggtccccctaatggcttactgctggtccttctcttctcacagcaactaagaattctgtttggagtgagagcaaatgtattgcttatgaccaacactgtccatgcccacaaaagcagcaggttcactctcaaagttttaagagtctttgacagaaactgttccgtatcatccacggctagtggctatcctaggcctaaaagtgaaagacgtggattctatctccttagttttatttacaagcccttgatttatcaagtttggtaaaccagcaactaaaccggcctccccagaattttccactcttaaatgtagaggatgtggataggagtcttaaatttaaattagtgaagaaataggctgctgaccaagtaactcctgatagtgtgtcgcagcacagcttggctcaagccttgcaaatgctcgatgagagagaaagtatcgatgagacgtgaacgaatggcatcagctcggggaagctgcatctgcccttcttgttggtaagcggccatgtctgctaagaaaatgtaagcatcaagtgtcatttcattcttggagctgcaccaaggattacaggttttctgtcccctcctccccaccctctttgcccttaagattccttaatgtacccacatctacgaactaggagcagttgggcagaacaaacattctactaagactcagggttttttgaaacaaaaggggctaagagtggtaaagacattgagcagtcgaccaagtggccaggcatcttcactttgtgacggcactaccaattaaaagctcattaaaaaaaaaaaaaaaaaaaaaaaaagtccgggcgtggtggctcacgcctgtaattccagcactttggaatgccgaggcgagcggatcacgaggtcaggagatagagaccatcctggctaacacggtgaaacccggtctctactaaaaatacaaaaaattagccgggcgtggtggcgggcgcctgtaggcccagctactcgggaagctgaggcaggagaatggcgtgaacccgggaggcagagcttgcagtgagcggagatcgcgccactgcactccagcgtgggggacagagcaagacggcatctcagacaaaacaaaacaaaacaaaacaagaaactcaataaaaaaggagcagccacaagggcaggggcccggggctggacaaagaagaacctgggtcccacctgggcctgagagaatcgggcaatgaggtggagttgggggagggcttggcctgcccacgcaagagaaaccaagtgaagagaaattggacaaaatgccaaagcctgacattttgaaaatgggtcccgtcccaagtgtgtccactccaacactccttcgggggctagctccttctctcctccattctcgcttctgggcctcacctcagcccaggttctcttcgcccactcagtcctgacttcacgcttccacctccagctcaggcgccccctgagcccggctacccctacgcaggacgagctcagggccggctcccagcctcactgcgccccatttcccgccccgcccgacccccaggtttcggctcaccccgggacccggccctagcccctgcccccagcccaggaccgggcccagccacgctcgcccagacactcgccgcctcggccccgccccgcgctccggccactcggcggtaacgagttggtcccgcccgcccgacgaaggcgacgcgcagccaatcagcggctgccacacagcggcccaagccgggtttgggggttgggacctccggctgcaggtccgcctgggccagacgcgcgagcgcaagcagcgggttagtggtcgcgcgcccgacctccgcagtcccagccgagccgcgacccttccggccgtccccaccccacctcgccgccatgcgcctccgccgcctagcgctgttcccgggtgtggcgctgcttcttgccgcggcccgcctcgccgctgcctccgacgtgctagaactcacggacgacaacttcgagagtcgcatctccgacacgggctctgcgggcctcatgctcgtcgagttcttcgccccctggtgagtccattctgccgaggcgggggaagaaaggcggggctgggccgggggcgagagcgcggggaactgttgggcctacgcagcgccggggcccttcattcctgtgggcccctgctgcggcgggcacatttctcattcccgggagctggaggcgcctcgccgagagcgggggagtcggtgctgatcggcccaaggaaaacccgaaggctgcgctcacgcagggcctcatccttatctcggtgctcttgtggcacttcctatttgcagagggttttgccaccccttcccccagtccaatatgtagctatatcttttctgcgtgagtcagtattaatgctcctccagtctacagactaggcatcccaaagccttgtagtggaagcggacgtttcaccaaatgcagaagtcctggatccctagggtatttcctttcatcttacctcacgccgcacagccattggtttctagccaaggtcactgagtggctgcagaatggtcgtaagtgctttcttgaggcaggtaatttgtccgtcacatggtgtacagtttctcccttcagctgatcacttacatctcagtaccggcagatacctctgtccaaacgaaaggagtacgtgaacaagaataattccatcagaatctgtccatattgtctgttttaaatagcatttctttaaaatgtcaaaaaagactccaatgagaaaataaccaatattgattacatactccactttagggtgacttaagtgatcaagggtgtaaattccttagatagaactaactcgaaataaaaaactgttggggagaaggaagagcaaataagatttctggcccagtcaacttgagtgtttgttttttttttttatttgtgtgtgtgtgtgtttttaaacctccagatcattaccagagtaaacagtgattcctttatcctggggatagctctctatatataattcaatatatataattacagtacttaatttttcccctcctggcacagtgacccttggtttaatactatccgtgttcaaaaatgtcagtaaaagttgtgtataacttttatttgcttcagactcaggtcttcccttcttagcctcaaacaacttgctaagggttacacgaaaaaagtcctgtagtaaagaccacctgaatcagaatgatgtgctagagatggcaaattttgtttgcagcttggacagattttgtgtccagggcatttctggggctaactggcagtacagattacacatatagatagttcttatacatctctggaactcatgttctctcttaggaacaactcttcccaattatataatcatgctgttagctttgagggggtgtcaataatttgtaaaaactgggggtgtcactaagtttgtcagatctgagtgatgctttttactacaggggtcatgcaacaatttaaagtaggaattgttggagaatagtgggccactagaatattagtttaaaaaaggaattttggggctgggcatggtggctcccgcctgtaatcccagcactttgggaggccgaggcaggcggatcacctgaggtcgggagttcaagaccagtctgaccatcatggag

SEQ ID NO: 1885874 - DNA, 4001 bp, Homo sapiens; identical to SEQ ID NO: 1241915

SEQ ID NO: 1885875 - DNA, 4001 bp, Homo sapiens
aatccgcatctctacaaaaaatgaggcaggcatggtggcacgtgcctgtagtctcaggaggctgaggtgggaggatcatctgagtccaggaggtcgagggtacagtgaaccacgatcgtgccactgcactccagcctgggtgacagaatgaaatcctgtctcaaaattctttactgcctccatagttttgccttttccagaatctcctatagttggaatcatacagcatgtagttttcagattggcttctgttatttaataatatacacttaaggttcctcatgtcttttcatggcttgatcctcatttctttttaggtgctaataaaggaattaggggggtggtaaggatgggtcagctcctttccccatccagcgaagaaaccctgctagggtgagaaaatagatgggaagttgaacgatgggatgggtgtcttttggtccctgattctattaaatgggccatgacaaccatctcattatacctatctcttagaattaagaaaaaaaaacaatcgggagcaattcaacaaatcaagtcaaattatgggcttccggcacaagagggacatccaagaacagagtgaccaaatgtggtccttctgatgagagtgctcaggaaaatgcctggctgggggttactgcagagagtctgtggtcacctgcaggggctagtccagcctctgcaggcaccacgactgcgctggtttgggcacctcagtgtaaagctcacgcagcagcccaggattgggtgggggaaggagggagagagggagagagagggagggagggagagagagggagggagggagagacagggagggagggagggaaggagaaagagagagagaatgaatcaccagagcaaaccgaagagtgaatgggagacagagggtaagggtgagcgagggcaggagaggagatccagtaggtctttctggagtggccagagggtccccactctcccggctcttctcggctccaccccgcccccaccccactggggtcctcaccgcccctccccccgcctcccgacgcccctccttccctgctcgcccccactcttctgccaggctccccggccgcccactgctccctccctcccgccgcccctcttccctcgcggctcggcgcgcggaggccccgtgtgtccacctgaaggtccccggggtgcgtctggccgcccgtcggaccttcgctttggggactgcgttttatccacgataaaccatttcccgagaaaggggtgagctctgctgctgcctccgcgagagcaggcgccggttcaagtcctgccgcccccgcccagccctgcacccgtccaggccaccccgacagccgcggcctcggccgtgggcaggacgggaaggctgcgaggccgggcggagaggcgccctgaggccggagcgcgtgaggacgaccttccctcgctggagacgccgccgccgccgcgcctggccgggctgcaccggggtctgggcggagggcgcgggcgcgcggggccgcgaggggaagagcagaagcggaggcgaaggcgaggggcgccgcgcacctgtcccgggctgcacggaagcggcttccagtggggactggcggtccctcccggccttcagggcctactcgcggctctgaaaccccagtgccaggcgcctgtcctggcccacgcttcgtccacctcccgcgggaaacccctcgcagcgggggtcggaggggtgccctgggagagatgagggggagaagcatgagaccaggtcctagggggaaaaagagaaacaaaaggtctgattccctccctcctcgcaccccctccgtctgtttctggcatcaacttcttgccaggggctccagggaaggggaatttgataaccacgtaacttcaccctcagatggcacaggccaaggcctttctgcggagcggagctgccggtgatttccagaatgcactcacctttctcctctcttcgctgtctctctctttccgtccctcattcccttcttcacttccttcccttcttcccgccctctgttttctctcccttcctccctccaccttccaccccccaacccctccccaagatctgagttgcacagatctgatgtaatcacaccctgcacggtgccagcagagagccatgccaagctctgattttgttctctactattattttcctcttaatccccactgctcgtactcagagtggacaatttgagaatacaacatatgtacacaccaacgtttctacagatgtgtacgtccatgaaatcatcaccgcaatcaacatagtgaacacattcaccacctccaaacatctcctccagtccctttataatttattccccatgtacctctctgcactcccccttctccaggcaaccactgatttgtcaacacattcatttgtgttttctaaaattttatgtaaatggaataatatactatgtgctcttttttaaaaaaacaatttcaacttttattttagattaaagggtacatgtgcaggtttgtttcatgagtatattgcagggtgctgaaggttggggtacagatgatccagtcacccaggtagtgagtagtagtttttcagcccacgttctgttccactccctccctgcctccctccctccctagtcgtccccagtgtctgctgctcccatctttatgtctatgtgtattcaatgtttaggtcccacttataagtgagaacatgcgttatttggtttcccattcttgggttaattccttaggacaatggctgccatccatgttgctgcgaaggacatgaccacaatgagataacgtctcacaccggtcagaatggcgattatgaaaaagtcaataaacaaccaatgcttgtgaggctgcggggaagagggaacccttatacacttgctgggaataaaaactagttcagccactgtggaaggcagtttggagatttctgaaagcacttagaactgctattcgacccagcaatccattactaggtatatacccaaaggcaagtaagtcattttatcaaaaaggcacgtgcacccatatgttcatcaaagcgttgtttacaatagcaaagacatggaatcaacctagatgcccatcagcagtggattggatgaagaaaatgtggtacctatacaccatggaatgctaagcggccataaaaaggaacatccgttctttccttcagtctggcttcccctactcaatagttattctgagattcatttatatcgttgcaggtatacctagttcataattgtttattccattgtatattctatattctacactctgcttgtctgtttacctgttcagcatttggattgcttgcatttggggatattacaaataaaactgtcatgatcattcatttacaagtctttgtataggtatatgctgggtaggtggatgtttaactctttaagaagctgccaaaatgtggttgtaccattttatgttctcaccagtaatgtacaaaaagttccaattccttcacatcctcaccaacacttagtgtggttagtttattggagttttaaatttgcacttccctaaagactagttaatgatattgagcacctgtcaaaatttattttccatctatatatctttttctttctttatttatttttatttatttatttattttttattattatactttaagttttagggtacatgtgcacaatgtgccggttagttacatatgtatacatgtgccatgctggtgtgctgcacccattaacttctcatttagcattaggtatatctcctaatgctatccctcccccctccccccaccccaaaacagtccccagagtgtgatattccccttcctgtgtccatgtgttctcattgttcaattcccacctatgagtgagaacatgtggtgtttggtttttttgtccttggtgatagtttactgagaatgatgatttccaatttcatccatgtccctacaaaggacatgtactcatcattttttatggctgcatagtattcca

SEQ ID NO: 1885876 - DNA, 4001 bp, Homo sapiens
acctatgttatgttatttgacatttaattttctattttctcttcagggaactaaagttgccaggacaaattataaaatacaaggtaactaaagacatatagtttttacacgcttgcttactcaaaggaaaccttgtaactaaaaagttacaaatgcatttattttgctcagtaaaataggtacaaggcacttgtttacattatacctaaccctcaaaaaaccttttaaggtagggattattgagggtccctttacacagaaagaaattggagacggaggttaaataacttgcctaaggccacacagctaagtagtagcagacccaggacctgagtgcatgctcttaataatttccagtgcctctcaaatggtgtgaaactaacgatagaaaataagaacagaattgacaggagaaaacaccatggaatttggaaagaaactcccaccacaggacacacacattttagcataccacaaattcttaaccctttcatattcatacctttctctgagacttctgcccagactttaggaatgaagttgtgttttccactggtgatctggtccttcagtgacacttgagtcctgtgctcagagaaaggtggatacccactaaggcttaatattggtagagagagaaaggaaaagaaatcaagtggcattctcagtggcattcagatataaagatttctttttcagcataatgaaaagtcagatttttctttaaatcaatggtcaaaaagtgagctaggctgggcacaatggctcatgcttgtaatcccagcactttgggaggccgaggcaggaggatcacttgagcccaggagttcaagaccagcgtgagcaacatggcaaaaccccatcactacaaaaaatagaaaaattagctgggcatggtggtgtgcgcatgtagtcccagctactcaggaggctgagatgggaggatcacttgacccagaaggcagaggctacagttagccaagatcaagccactgcatgccagcctggacaacagagcaagacacatttgtgacttcatctaatcacctcctaccagtctgtgaagcaatgaaaatatttcttaccagataaaaagaataactcctaaactccagcagtccacagcacggttatacccagcagtcccaacagaaacaagaacttcaggagccaagcaggtgggggttccacataaagttctcatgagagaggtctctcccaaaatcttggagtgcccaaaatcagtaatctaaaattcagtacaaaagggaataatgttgaacttgtcataaaataaaaagattaacatagtctgccagtccaagaagacatgtaggctagatcagtttctattgtacaattcacacctgccattaatctggaatctacagattcatgtctttgcaagttaagacatttaactttggttaaattaaaattcctgagcctaggaatctcaacactcaggctttccaacttaatctatgtcctctgtaatcttacaaaaagcttattacctttatcacagacacttcaggattctcattagttctacatggttcttagaccccactgtctcaaacttggctgtgctatggaatacctggggagcttggaaacacgtgcttatacctgagtgccactctcaggttctgaggtaaagcctaggtgtcataaattctaacaagagattctaaagtgatgccaggcttgataaacagggaaagggagggcatgtgattacactcattcattcattcattcattcacctattctgcccaaagcgatgcagtgctcccaaggtctgtgctgaggagaacgctgctctgccttcgctgtgtcccccgggtctgtgctgagcagaacgcagctccgcccttgcggtgcccccggcccacccgtccgcccgggtctgtgctgaggagaacactgctccgccttcgctgtatctctgaagtctgtgcagaggagaactcagctcgccctcacgatgcaatccgggtctgtgttgaggagaacgcagctccgccctcgcaaaggcgcacagcgccagcgcaggcgcagagaggcgcacattttatgaatagaaaatcagtttctccctgttcctcctacgtcgaggccggacacacgtttacaggggatcagtgtgaagggaagctggtgaggctgcctgggaagccccctgcctgcatctcccagtggactccttgggagcgccccctccccacctctgcccatcagcgcctgaaccgtggccacttgcactcctgttgcctccccagtggcttgaactccagaacttgccacccttcagtggaattcctggaggagtgaggagctctgtgctatgcttggccaccgaacatgggccatctctcctattatggtttgaaatgtaccatagtgtcttgtttggtaattgtataaaaatatggggagactgtgcgggtgtctgctagcttgtctgctggttcttactcatggtgccttcttccctttcagacttggatatctttgtgtgcttcttggggcccttggaagggtgtctgtggggtttccgtgaggccaaagacagaggttccttctcacaaggatggtgtttgctttcacatggacagcccagaccacctggaaccaagtgcacagaagccccaccatccctgggcctcccaggtgtgatgggtgaggggtccaagtccgccggagatccaaggctctttgtggttgaatctgtgagtttcctttccttttttcctcccactccttttaatgctaatgaattccttgttttggggcagggaccagggttatctctgcttctgtcttcacccaggtgaggcctttcaggctcccagcttgatatgggggtgaatcccctatcagcctcctcataccttgacctctgtctacccccctactccctccaaggtcgaagcccaacttgtcaggttggcaaatgctcacaagcaacagtggccccagcgctcctctctaggttcttggttttcccctgaaacttggcctggaggtttcccactagcttagcagccctttgatgcttttaacgtaattttgttattgtcttatccaaaattcttgcttgttttcagagggaaagcgggtctgccattactgcacagagaatctgggacagttattataaccatagaaatttattttccatgtgctgtcccatcttcttgatgagacagatgtttaacaactggagaactggaccccatctttgtccccatcttgcctagcaacagaaggtggtcactaaccagggattttcgagcccattgcttaaggccgttgttgacccaaaggatagtgggtccctgctccttttcctacggagaggcccaggtgcccagagggccctcctggctcggctgcctacttgagtggctgatgaagtgtctgctgtgcgcacagggcacccagccccgctcctccccaggcagcccctcgaacagctgttcctctactgcttcagctgtggacctgaggctgagagtctgagccatcgacctgagccacatgcgggggagtggcaggcctggacccggtgcccagacctggctcacgtgaccttactttttccactgtgcctgctgctccctcccgggctctgtgaccttgggcagccatggccgttgtgcacccattcccagctgtaaaatgagaggctgggctggctgatctcaaatgtcccctgccagcctgagattctgcgttgtgtcctggggtgtgaccgtgacatgcctccaaaggcagctgccagtgctcacgagggaggcctttttcctgagttaaggcaggtagggggactgggggtgagttgagggactgggaggtgggggaagcacacagacagtcctccccagctgaaccctcatggtgaattaccttcagtcccaggctcagtgctttggaaatgctctcaggcccagcacccagacctggaaccagcctccaggcccctggccctccc

SEQ ID NO: 1885877 - DNA, 4001 bp, Homo sapiens; identical to SEQ ID NO: 1241933

SEQ ID NO: 1885878 - DNA, 4001 bp, Homo sapiens; identical to SEQ ID NO: 1241935

SEQ ID NO: 1885879 - DNA, 4001 bp, Homo sapiens
agttagggggtctagcagggagggagtggtgggagaggtgtcaaaggaggggagcgcttgcaccttgagctctggaaggctgagaatctgctcgaagggcacttgtgcccgaagtgacgactccacgctccgctgctcctggggaagcagctcacaaaaccgcctgtgggctctggtagagagaggggaactgtcggtgttctcagcgatcggtctccctgtgtgttcattcccactccttgcctgctgctcattgtcaaccaggtgaggagctaaaaccacgtacacagaacttccgagtcatcaggcaacggtaagcaaaaggacatgtcacaaggcagtacagcctaggagtctattcttgcaatgagtatttactgagcatttactatgtgcttggcactgattctagagatccccaagggatgaagaagttgggaaaggagccagaagttggccctaaagaattggccaggcacggtggctcacacctgtaatcccagcactttgggaggccaaggcgggcggagctttggaggtcaggcgtctgagaccagtctgagcaacatggtgaaccccttctctactaaaaatacaaaaattagccgggcatggtggcgggtgcctataatcccagctactcaggaggctgaggcaggagaatcacttgaacccggaggcaggagaatcacttgaacccggaggcagagcctgcagtgagccaagatcgtgccccagcactccagcctgggcgacagagcgagacgctgtctcaaaaaaaaaaaaacggagaaaagagcaaaaccaaaaatctcattctcaccttcactccagggatctcttaccctcaaagcctcctttttagcaaccacactgaactgtcctcctcggcctccacctccttcccatgagcttatctttgccacaggaacctggcctgcataaatccggcaaaagggcttccagcccaagttcaaatctacttactcagagtgttgtcttaagcagttaccaaacctttctgaacctgtttcattgtccagtacctctctcctaaagattaaattaggtaacgcaggcaaccatttagcacagtccctggcacatggtgagtgctcagaaagcgataacggttactgtattattcaggtaaagttgggagaaggagccgggctccccaaggcttctgtggtttagccactgggcaaggtcggcccctgccggactggggcaggaagttcggcagtgctgaagctagtggagcccagggtcaaagagcgcctaacttttcctggaggctgtaaggtggctccgcggtgccacgctggggcctcaggcgagggcggggagggcgtgccgggaggagggcgcagcccgggctaggtctcccggcctccagctcccgctcctctgcagacctcaggccagcccccgcccctccctcgggacagcgcccccgaagctgtctctagaggatcccggggtcggaggcagggttcaaggcagcacttacaggaggatctcctgcttcgtcaggaacgtcaagtcctggaaggcaaagccagagcggggattagcggaccgctgggaggccgcggccgccccgcagccagctcccggaccctgctcccgagaagaggcccgcacgcgagctccccagggccaggcgtcccgcgcacctggtactcggccagcagctccttggacaggcgactgcccgagccccccatcgccccgccgcgcgcacagctccgccaactcgcctcgagacgcagacaactttctcacttccgcccttgggccgcgtcactgcccggtccccgcggcaaccgctcctggggccaccacccccgggcccgccccctcctaaaagctgccaggcgttcccagccgggtttggcaggcgagctgccggctccaagcggtcctaggcgagctggaggcggggcccggggaggggcccgacgctccggggcggagcccgggactcacggccccgcctccggggtgggaggggggggcgggccacgccgcgcgcgtgcgtgctggctgcgtatgcgtcacgggcgtcatgacctcgctgtggccccggcagcggctgcggggaaagtcgcgaggtgcatccgcttcggctgcagtaggtggtggcggcggcagccctgggtggggtcccataggggcatctgagaagtcactggagctagcgtttccgggaaacctggagactcgctgagtggcgggggtcgtcggctgcccctctgcccagcaagggcttttctagatgttatcatcaggcaatcgctgcacctgtcgcagcccccaagccacctcttccagaagtaaccataaccttgcttccttcttaggctatttactgaggacccactggatgtcaagcattgtgcatagttttcttcgattgttgcaacatcccttgcgaggtaggttcccattttacaaagatggaaatacgtaagtccaaagggtgttagtgatttttccgggcgccggcatttagaaggtaatcggtccagtccaaggcacttttaaaggctctccactgctgttctcatcattccagctgacctgccgtccttttgactccatctcacccctagactgctgaccctttgctcttgtcccctcttaacctctaggataatgtttggcacatagtaggctctcagtaaatattatcgaatgcataataaatgaatgaacgtatactattgcaaaaggtaaggattccaaactgctgggaggaggaagtggaggttgtgttggtcaggctgggattaattcttgatccttccaatccattatacttgctgatctttgtaaagtctaaatctgagtatgttagtctcagtttataaccattaaatggttaaaaacccaaatcctggccctctgtaactggacttcctcctattggctctctgtctttcagccactttgggccctcagtccctcttccatctcatcctcagggaagcctttcctgactccctagactgcctaggaatctactttacactggaagaatacccagtgctctccttggcagcatgtgtttgataagacacactgtattaacaggtacattccatcattgtagaaatattcaaggccaggcgcggtggctcatgcctgtaatctcagcactttgggaggctgaagcaggcggatcatttgaggccaggagttcaagaccagcatggccaacatggcaaaaccccatctctactaaaaatacaaaaattagccagacatggttaaacctgggagctggaggttgcagtgagcggagattgtgccactgcagtccagcctgggcaacagagtgagactctgtctcaaaaaataaaaataaaaaaaaataactagggtataggcccatcccaacctgatcatttttctctttttttttgagacagagtctcgctgtgtcgcctaggctggagtgcagtggcatgatcttggctcactgcaagctccgcctcctgggttcacgccattcttctaccttagcctccccagcagctgggactacaggcacccgccaccacacccggctaatttttttgtatttttggtagagacggggtttcaccctgttagccaggatggtctggatctcctgacctcgtgattcgcccacctcggcctctcaaagtgctgggattacaggcgtgacccaccgtgcccggccgatcatttttctcttaatagcaggctctttctgtccgagaaagagttagtcttctgttagtaaaagcttaggcaaaaagcaagaagctgtcattatgtctcctgtactaaatagaccttgtttgcctcttacaagccaaggcgaatacctggactgcatggtaataagtatctgtcttctttttttttgagacagagtttcactcctgttgcccaggctggagtgcaatggcatgatctcagctcaccgcaacctccgcctcctgagttcaagcagttctcctgcctca

SEQ ID NO: 1885880 - DNA, 4001 bp, Homo sapiens
gctgggcagtcaagaactgaaatctatgagtctggtcctactggtgctcctaagaggggctgccacagagcagggcgctcctcatttcctgcatccagttctgccccatgaatcaatccccaggatcttaggggcactgccaagcatgaatgctgcaatcccacatgttccccggtaccatctgcagcccaagaacttcaactggacaggagagccggcagccatcaactcctgttcattgtcaatgaagaaggctgggaggtgctatttttccagtgccagaatcaggctcactagccgtaagtatgcaaaactagctttggtcattttgacatatgtaaatcccactagcaagcatagagcttggatgcccctaaaatataatatggcacttccaccagtgtaagaatggggaagttagggtacccatttatttactcctttttttttgagacaaggtcacgctctgtcgccaaggctgaagtacaatggcttgatctcacttcactgcaaactccactcacgggctcaagtaattctcctgactcagcctcctgagtagctgggactataggcacacaccaccatgctcggctaacttttgtatattttgtttttgccacgtagcccaggctggtcttgaactcctgatccacctgaatcagtctcccaaagtgctaggattacaggtgtaagccaccgcaccaggcctatttaatcctttctgtacactagaccctggtgatagaaatggcagaaatacagtcccagcactcaagaggtaataggaacatggacaaaaagacataccataccaattacaatacagtgtgggaaagacagtggagggaagcatgagatgcccttcctctgtgttggtaattgggccacagttgggaaagaggtgaacaaatctcttctgtgaataccaactcagggacatccatgtttccactgcagaaggacaagccagcagaaggctagaagccataaaccgagtcctggcaggatcagtgccacccactttaaccccaaagcagggctattttctgcaaccggaaagagtggcatctgactcatggactgaatgcaccttgccctccatggtaaactctgaacacagagcagccaaggttcccctctgccctgcgtctgcacccatgctgcagcgttccagagcactcctcaacatcaatcagttcaggtaaaagcaggagggaagcactctacctctcctggataacctccccaggtttccaaagggcattaaatctttgctaaatgaatgactgccaccaagttccactttgaaaagccctgcccaggaaccccatttgtataaggcaaaatacaaagacaccaagaattcctcaataccctaagattaattggggatcggtaaagactagaagatgaagaggcgccaaggccagccatgtactcatttctgctcatcaagccttagcctgggtttatcgctaggtgatgggtctgaaccctaggtgcggcccggggctggaggccatccaggagacaatgagcccctttcccagagaagccgagtgcccaaggcactgggctgtcgccgtcagaagactgccgagcggaagccctgcccaccgaggtggcggagacaggcaggcctgggcagccgctggggcggagggacggctcttggaaacggaatccgtactttaattaaagtttatgcagttttccaggagcgtcctgtacctcatttcggccctcacgtttcagggaagccctctccacagttacaggcagaaagggtgggccactgagcagcgtgagcccagatcttacccccaccaagtgaagcgggaaataacttgctactacccagcctccggcccgccccttccacttccggtcttacccggctacttccgctgctgtttcgtagccgactgctgaaggctggtttgcgtcgacatggcggttaccctgagtctcttgctgggcgggcgcgtttgcgccgccgtcactcgctgtgggttcgcgacccggggggtggcgggcccaggccctattggccgggagccggaccccgattccgactgggagccggaggaacgggagctgcaggaggtggagaggtaccggcttctccccgggccctcagcttgaagcagggcctcgtgccccggcgctccaggccgcgcccccttggcgccgggtgtcctgccgctgcttgcgcagcggcccttgtttcttcttacccgttgttaggggcgcagcgtcaggtgttcagctcccctgggaccactggtcccttcattagtgacgtatttcatcatcagtttagagagttcggcatgcttacaggcagttattgttctaggtgttagctttctgggtgtacggagcagctctaagccggcaacatggcccggttgcccttgcgatcaaagagaagagggctgggcgctccatgatttagcctgaggctcttcaaacatccattctgcttccacgcatggcttctgccattggttctcttcccccagcaccctgaaacgacagaaacaagcaatccgattccagaaaattcggaggcaaatggaggcgcctggtgccccgcccaggaccctgacgtgggaagccatggagcagatacggtgagactcaggataccttgtttgtatccgctgtgatgagaagtgaaggatgctggagcccagaaacgggtttggcttttttgatactgcttttatattttcgtttactttttgtcgttgaaatttattatcagaaaagtagagtaatataacgaacttccctaaccctgtcattatctagatttaatagtgttttgttttgttttttaaagagacggggtttcgctatcgcctcgaactccagacctcaagtgattctcccgcctcggcctctcagagtgctgggattacaggcatgagccactgcgccccgcctggttttaatagtttttaacgttatgacgtggttggttcatttttactgaaatttttaaatagtaaatcgcagacatcacaacatttaacccttgaatgtaggttgtgacgttcccaacctaaggtacagggatgctggtgcttccataggtaggtgcatttttctgaagacaggatctataatttaggaaagcttaaaagagtttttaagtttttttgttttgagtaggtaaagtattacatatggctcaacctaacagtataacatggtatacacattgagaattatttgtcccacccactctcctgtgggtactttttttttttttttttggtagttgggggtctcactctgtcgccaaggctggagtacaatgatgtgatcaccggtcactgcagcctctacctcctgggcccaagccatcctcccacttcgtcctcccaagtagctgggactacaggtgcatgccaccatgcttggttaattttgtttattttttgtagagatagcctcatcatgttgcccatgctagtctccaattcccagggctcaagcgatcatcccacctcagcctcctaaagtgttgggattacaggcatgagccactgtgtgcagctgtactatttttaatagtttttctctaccaaaaactaggctctgtgccctgagtgagccactgcgcctggccctcaattctttttttatagatggtgttattatatttttttgaggcagtatatgaggcagtatatgacagtggtttttaatttttatttaaacaattttttctcctatttatttatttgacagagatgggggtctcactatgatgaccaggctggtctcaaacttctggcctcaactgatcttcccatctcggcctcccaaagtgctgggattagaggcgtaagccaccatgcctggccagaatgcattatttaacctgtcttttattgtgggcatttagttgggttgtttccatttctgttgctcactaatagtgccccagtgaataactacgtatgtgtatcattctgcatacctgc

SEQ ID NO: 1885881 - DNA, 4001 bp, Homo sapiens; identical to SEQ ID NO: 1241940

SEQ ID NO: 1885882 - DNA, 4001 bp, Homo sapiens; identical to SEQ ID NO: 1241948

SEQ ID NO: 1885883 - DNA, 4001 bp, Homo sapiens
cttttgggtcagagaggaggaaacgatgtcagggatcacaaactggcagccggtgagctgcatggggcccctggacatgctgggcttggctcttttcatttgaattaataaccaacattaaaattcacattcaagatttcacttaaaaaagtacttccagcttttcttgaaagatgactgggctgggacctcgtttctacatggtgcccaccagctaacagcccttttgggtgtgccttgggccttcagtgctgtcgcccaccctcacttggctcctgtgctgtaggcatctgggtgtgccaccctatcagaagcagccatcctacgctgcttgtgggccaggacaagactcaagtaggctactcctggagaaagcatggctcaagaggtaggggtcccagcgaagttgctcctgccttgtccctgtagtcatcaccctttctgcccatgacctcagcaacccaaagaagctcctgtaagtagaccaagtggatggagactggccaactcccactgtcactcaccccctcgtggacttctactcttatgctcaccacccttccccccttaatccttctgaaacactagactataatatcagcttcctctttctccatcacctcaggcagaaactgacagttacctgtccctctccccttagccattagatcaagcccaggaagacggcagcaccatccttcctaagtgccaggagaggaccggagcatagttagtgcttattaaatagtatcatgataacatgacacatgtaaaacacttagcaatgttcaataaactctggtccctttcctccccactccagtcccttgttttcccccttttctgtccaacctcttctatgtctccagcaacaccttaaaacagacccgacaactgccaaccccttttacaattctctaatagttttcctgctgtctgcagaataaaggccccttacaaaccgggcccaggcttccctccggcggtatcaggtcgcatcatcctcagtcctggtcagagggagccgctcggtgccgtcctccctctctgcctttgcttgatcttccgcctggaatgccatctccgactctgcgtttgcctggggtttccggtccgcccctgcgccaggtgccctaggacgcctgccctggagccctcgccctatcccttgccctatttctgtgaaactttctatctcagtgtgtcaggagcgccggaagcggtttctccggagaactccggtccaaagaggaccagtgatgtctttggaactttctggaacttcctgactctcgcggccccctctgcagcgcacggagcagagggtctaaagtgagtgcgcctcctggagcccaggggctacagttccgaccaaggatgccagggcaggctctcgccctggagagatcactggaagagaaggagcgcggacacgaggctctactgacgaagcgatcgccgccgctcgcaggggcttgtaaatcgtgccctctttcgttaagagggaaactgaggcccagggcagacagtgactcggcaagggtcacttaggtgatggcgcgctcaggcttaggtctctggccccccagggggcagctgtggctagcagcggcggcagtccccgccgggttccgggtgggcggcggagccctcctcggctcggcctgctaggaggggcggggcgcgagggggcggaggcgagggcccgggcggggccgacacaggtgctccgcatccggccggggggcggctccgaggagcggctcgtaggagcttcataagctgccggggtgcggggctgcgcgcggcccgctgcaaaaatagtgcccacgtgcgtgcgcgtctctcgcccgccggctggccggtcagcccgtcagccccgcagggccacaccggccccatggcgttcccgctggtaagagccacccgccgctcgcctgggcggggccgcgtcccggccgcagtagctaacggtccgcgcgcagccgggtccggcgccgcggtacccccatcccccgccccgtgcgggcgagtcccgggcggggcgcggtcacgtgcccgcgggcgtggggcctcgtggaggggtggagggcgaggggggcagggagcctcctcgtgactcagggcctttgggcttaaaggcgccgcagccctgcgggggcggccggtggggcctccgagccgcactgcggcctccaggcggcctcgagcgtctgtccagacgggagctgaccggacataaaggagcaccggcgcccggaacgtttctttctcacactgccgtcgcacgggagacccgaagccgctggcgctggaagctcacgccccctgcgggtctctttagcacccggcgcgcggtgggggcgcccgggcgggacggggcggggctgctgacggcgtagaccccgtgctctgtggagagccccacgacggcggcggtcgcggcacctttaaggtggagggctcaagcccctcgtgcggcttcccaatcctgggcaggtcacgtggcttcacaccttcgcttggcgccggagagggagtctcgggggcggggctggccaggtagtgtggcgcgagggcggaagactggcggggcttcgtgcccgggagacccgccgggctggcggcattgaggtgggtcctggtcatgggcgggagagggttaggcttgcaggccgcggaggtggcgtaggcggggagcgacccgagcccactctgggctgtgctgttcggaccctcagcctggcgagtgggtgcatgtggcctggcgttctggtcattctcctcagtgccggacgaggccaggtgcccagactcaggggcggcctcaggtttggcggagcagcggctggggccctggacgagtcgccccccgtgatgacgagcggttgggcgggcctgtgcccgcctggagtcacctgagtgtggggggactcacccacaaaggggtcctcaccttggggtgtcccacccggcgtcattccccgaggctttttcatgtcatgggttcctcagcggtcgagtcgaccgaggctttgctgcctcattcctagaggacccagggagaccagaaggctctgtgagcggccccgcgttgaccccgtgaccgagaaaagccaggcagacgcctgggctcttgggcgctttcgtgggcgcgcgcttatttttcgggggcactttgctccctgcagccctggccccttgcaccgtgctctcagctgggggaagagagtcgggagccgaattcgctcttagaagccggggtgcctcccgccaggcccgcctgggaggaggccgcgtctctcctcccccgccccgcgcctgcagccccggccctgactgacgccgcatttctctggcaaccgcttcccttggtctccctggctaccgcccagcctccccgcgctctctcctggcacctgagtcaactactgggctgtgtcgttggtggggaagaggggcaagtgggtggggttcctattctggaaggcacaggtgcaccgcccgcctcttggctgcccctcaggtgacggtgcggtcccttgctagcgggaagagtgtctgctaaggacagtttgcaccctgaggctcatgttccctttgagtctagggacacatgctgggttaaaaaataaaaataaattcaaacaggacccaaccttggaaacctcaagttggtgattgttttcctggttggttttttgcatagttagaaaagcttgtggagctcaatggggctgctggctgtcggaaaaccctggggacggtgttttggggactcatcactggtcttttatttgtccccattgagctggcttggagctgaactgtattcccagagcacgttgctgtaggagtttggctttttattttttaatatttatttatttatttatttattttgagagggagtcttgccctgtcacccaggctggaatgcagtctcgcgatcttggctcactgcagcctccgcctcccgggttcaagcgattctcctgcct

SEQ ID NO: 1885884 - DNA, 4001 bp, Homo sapiens
ctctaaacctttcactgtctttgagctacagaacaactatacaaactatagacacttcttgtctatagaaatgcaaattgtggccgggcacggtggctcatgcctgtaatcctaacactttgggaggccaagacaggcggatcacctgaggtcaggagttcgagaccagcctggccaacacggtgaaaccctgtctctactaaaatacaaaaagctagctgggcatgatggcgggtgcctgtaatcccagctactcgggaggctgagacgggagactctattgaacctgggagatggtggttgcggtgagccgagcttgcgccactgcactccagcctgggcggctgagtgagactccgtctcaaaaaaaaaaaaaaaaaaagaaatgcaaattgttttcagtagaatgcaattgattactaagctgtggatttcatcagttctgccagtttttgtatatatttgtagttatttcattattcctcatttgactatgtgtgtggtactttgaattttccattgaagcagttgtaatctttctggatatctcattcattaatgagttaaataaaatctctaacatttattttatatctgtattatatttgatattaaaattattcttcaacagtagtatacagttatatgaataagctgcaatttatctattcatctattggtggacatctgggttttttccctttggctattatgaataaagctgctatgagtcttttggtgaataaaggcattcattttttggggtaaatatctagaaatgggatttctggggtatagggtaggggtaaatttgatttcagtagagactgatgtttccaaagtggttgtaccattttacactcccatcaacactgtatgagagtcccatttctgcatctttgcaactaagggaattgtcagtcttttcatttcagctattctatggagtgtttaatagtatcatattttggtttcaatttaccatagaagattttcaggagggaggtaacttgaacagatttttacattttagaaaactctttctgcgtattatgtggagaatgattatttgtataccaaagttcatagcagcattattcacaatagccaaaaggtgggaataaccaagcatccatttatatggatgaatggataaacaaaatgtagtatacatgtataatggaatattatttagcctcaagaaggaagaaattctgatacatgctacaacatagatgctccttgaagacattatgctaagtgaaataagccaatcagaaaagagcaattattgtatgattcaatttatatgcggtacctcgcacttacagacagaaagtgcaatatcggctataaggggttgtgagaaacgggtaacggggagttactgtgtaacaggcagattttctatttgggataatgaaaaagttctggagatggatagtggtgatggtttcacaacaatgtgaatgtacttaatgccagtgaactgtacacttaaaaatggtgaattttatgttagatagattttatcacacacacaaagaggagggagggcgggagggaaggagagagggaaggaagtagagaggggagaagagaggaagaaaggaaagaaagtaagatctggcatcacagggcccacattcccgcgtgtcagcaataggctgaaacagaagcatggtttctcacgtgtccatggaggcatctgagtgtgtgcccactttcccggttcaatgacaatttgcacctgctcgtgtagaggggtacgggtgaaacagagaccagtattattaaggggatggagaggagagaccgccaaaacatcgcagagacacaccgtcggaaccaagagaatggggtgcagacgcctggcttggcctgtgggaactggcaagtctcagctctcaaacgcccgggcttttcaacccgccacagccgggttccagctgcctacttcctttaaagccttcaccgactctaaaacaccaaaaacaaagacccaactagctccggaagcccgagatgtaaccgtagtcatctgaccctcccgtccggactctgattgggctttggagatacgcgtccctcccggcgctgtacggcgaccccgccccagcagcctgagggggcgggaacagatgtccgagtgcgacagtattggtcggcttccccaggaagcagccaatcggaataggcaagcttccggcgggaagtgagccagggcttggcgcggcggccgtggttgcggcgcgggaagtttggatcctggttccgtccgctaggagtctgcgtgcgaggtgagtaccgcgcgcgtaactacgggtcggtccgcattgatctagccctgctctggcggcccggcccggagctggaggccgctcgggttcttccgtttcctgcactggttcgcctcggcccgctgagtcctctagtctggccaacatcctgggaggacagcagatacataaatacgttcccaaatggggaaacagaggcccggggcgggggcgaactctgccaaggtctcccggggcgtcggaggccgagcatgggctaggacctggcatgttgttgcccatatactccagtgcgtaacatgatgccctgcacagagtaatcccagcccagacctctggcactactacctccgtgtccctcctgaggaacaacgaaaacactttgtactttttctgtggccttccataatcacgagctgggctactcttgtttttgagtgtctactgtgtgccatgttcctggcacccttgatcttacaactgtagctttacgatatcccagcaaagcgaagtgcttaagaatactgcatcagattgcttgggttcgaattctggctccttcacatttagctctgtgtctactgcacgttactgaaacactaagtgtcttggttttcgtctgtcatatgggggaaatggtctcttctacttcctggcgtttttgttaggattaaacgacttaatatatgcaataataaatgcttcgaaggctacctgttacatagtacacagtaagggttctgttatcattacccagagaagcggatgaaattgtccccattttagacatggagaatctgaagtacaaagaggttgtctccgtacagaaagagcatttggtgattaagtgctagagatacaggatttgaactaagcgcctgattttaaagtatgtcccacaacattaggctttctcctatagccctcacctgtccttaggtcacacagaactttaggtacctcatggcgtgagatggagcaggtgactgacagctccttgtgccacccatgcagataaataacactggtgtgtcactgtcaagattaagggacaggaattcgagagactgcatgagagatcagaagatgaagaagcgggtaggcaaaagtattctgtttggggaatagtaaatagaattaattaaatcaacattttgttagctgggctgcttatactgtcagacagtagcttataatctactgggaagaaatgaaatttctgggtcctgtgtcactttcaatgccactcaccatgacaggtaccttataagtatagtttacagtcctatcagtaacctggagaagtagttatttccttcgttttactgaggaaaccaagagttaaaaaatcaggaaaagtgttagatgtgcagtagaacatcatcatgctgggaagttctacacatccgcttcaggacaggtggtattacctatgagcaggaagggaagggaaaaaggtaaggggaatgagtgatagtttattgttttgatttttaaatttttatctgttttttcctttttcatagtcattcctggaatgagtgagtttgtttttgtttttgtttttgggggatggagtctcgctctgtcgcccaggctggagtgcagtggcgcgatcttggctcactgcaagctccgcctcccgggttcatgccattctcctgcctcagcctcccaaatagctgggactacaggcaccca

SEQ ID NO: 1885885 - DNA, 4001 bp, Homo sapiens
tttttcttaagtcttcactttagatgctattatttctagcacaagtaagcaggcagtctttcatgtgctccaacattggaatctttggttgctaccctaccagctggtttgcaaacaacaagccaacaactttaagaacgttttacgtgaacaacttgcaaacccaagagatggaaaaaccctaagaatgcacaattgtgagcatttataaccatcaaaactggctgaagacggttcacgacattcttccgagatgagatctcaaagcagtatagttcaaaacaaaaggttttaacagaaaattggcatatgcataatttctccaccaatttgtgtgtgtcaaccatttagtaaactttttcacttgaaaaaaaatgcactagaaacccggccaccatgtttcactgtctcagttaatattcacaattacagtagccacagctcaggatacagcatcaccaatgctacccagagtcagtttatactaaaattaagttctttacaccaagtaaatggctgtccatgaccactggctaatgtacacatgaactaaaatttctagatttggggagaaacaaatgctgctctgatcatctgctctgctgcttctgttcctcaattcatgcttagaaacctttcatgttacccttggttttgtcaggttgcttacctgttggggtttgggcctgctgcccctcccactagaagaggctgcctgctgtgctgctttctgctttaactttgtccaatcaaatgtgtagtcatattgatggatcagggtcctgaaaagaatgcagaatagctgcgtcagatacatgtaatctggggctttctctaagtgtagcccacgacaagggtttaagtatatggcaaattctgcagcaaaccccttacaaaaaacaggagtagacatcttcttttcactaatcttttcatatttttgtttctctgctgcagcctttagcccttgccatggcaggctggttggctggttctattaaaatacatcaaaacatattctaacgattccatgtcatcccggcgactctgctcaatactaagatgtgcatggctagcatacagggcagtgccagtgaggtttttatcttctctgtatggtatgtgttgccttgtcctgttgtctccgtacgttttggccaaaccaaaatcaatacggaataacttactacagtgacgcccaatacccattaggaagttacctggtttaatggctctgtgtataaaattctttgtatgcacatgttcaattctactgatcatctggtcagctaatataagtacagttttcattgtgaaccttcttgaacagaaattggtcttcgaggctaggtcccagaaaaatccatgactagtacattatagtcttcttcctgaccacaccaccgtatgtgggggatgccaaccccaccttgaagcatcttgtaaagcctgctcttgtacagcaactggggatgcctggccctgagattctggcttcactaccacttcttcaccgttggtgatgctgatcgccagacagatgtctccgaaggagctacaccagatcttccaaagcagtttatatttccttccgacaatgaattctgctgctagccgtcctgagagacgaagatggaggctgggccaagcctaccgtggaaggcggcaggaagcggaacacggaggcctttcccggcgtccagggcccagatgccggcgaagggaacttgatgcccgctgctcggtcaggattctttgtttgttttttggttggttgcctgccaggccgcagtttgtgaagggcttctagcggttaccaggctgggccacctgttctgggcagccgccgctgcctcgctttcgcggcgacgtccgggctggaaaaggggcgcagtgagctggggagcggtaccgctgccaccactgccgtcggctccggcccagagggacccctgtcactccgccgacgacgccatcttgttactccagctccagccaacacaaaatgcccccagtacccgggagtcgcttcttcacggcgcagagcattctgggaaagggacctccggcgcttgctccaaaggatccgcctcatcgactcagaatttgagaattggaaggcgccagaggcttcagtttacagatgcgaacattgaaatctggagagggcaggtgacttgtccagggtcacatagctaataggaggcaggaccagaatctacaccccctaacttcctgtccactgtcctttccttcatagggtaaatattttactccaaggaatttccaatcccataagttatgttgactatttacaaagtaaagggtcctggtatatttttaatgaacattctgaaccttactgttttggtcctgcccagttctcttcatggtggaaatcagctaagcattttgacagaaacagttttcattttgtcagtactttactatcctaaaatccttagcgtttgatgacagtcattttctacacattgccatgagcctaaggatgcgccactaagaatgaatttggaaggactgaagacaatgttttcctttggtcaatttttatattgacttttcttctactggaaaaaaaatccacagatattatgtttaccatcttctcttcctgtaaggataaggtaatatttaaaccaacagtaattcatgaacatctactgatcatcaccaggaatgaccagtatatagtattctagaactgtaggcagtagagcctagtggctaagacacaagctttgacgagagtctggaatccccgcctgtgcacttagatataaccaaactctctaaaagcttcagtttcttcatttgtaaaattgaaattatgcccatcacacaggactattatgatagttaaataagattagtgcctaatacctcataaagcatagctctaataaaactagtatcgtatattatagttgtattatgtgttatataattataattatattactacacccattgaaaattctacttgaacgatatacagcattaaaaatgtgtgtttcctgtgttaacataaaaatcactataaggtgtgtagcttggcttattattgcttttctaaagctcatttaggaaaagccattttccaaaacttaagagacaggcagaacaagatcctcctttgagagcaggcatatgtttaattgattgttttagcagacagatgtctggtttaacattcctctgctcggaggagaggctcagagacagtgagcccatgttacttttgatagtgactgaagcctttgccataaatacagcttcagcggcggcacagcacaggaaccagccaggacttccacatctgactgacggctcaaatccaccatgcacaagatgagccccctaaaggtgcataggtttgtcatactataaaagctttctttaagaggattgaaataccttctccgggtcattgttaattcttagttgtgaaataccttcttcaggccattcttttcagtgaaagaaagcataaaatgctattcgaatttgatctttgaaaaaacaaaaaggcaaagcaaaaggaatttggggaaatcactagtttgttcctggattcttcctctgattgatgactgtgacactttttggggtggctttttaaaaggacatgattttcgaaagcgcaccactcctaaacataaacctccttaggtcacaggcaagttgtataatttctaaacaattgaaccaagtactgatgctcccctcacaaaacacaggccagtgatgttggaggcagattctgagtcagctctcctaggcagctgaaaacactgttacaaaaatgccagatatcgaaaaatgtggcttctctcatctgggggcttcagaacattctgcaaacaatgaactaagcttcccatctaagttccagttaactaagcttccagttagataagtggtcttttgttgcttacagaggatttaactaatgttgttttgcttcttgtagaagttgttta

SEQ ID NO: 1885886 - DNA, 4001 bp, Homo sapiens
ctggccaccattttaaagaccaccacagatctcaaggcatgagacctctcaccaacaaaatctatccctgctattgcacctagtgccatctcaatatgtggcagacagcaaatgttctaacttaatctgatagatgctcctttagcatataaaagagcttgctaagtccctattacctgtagcagtctatcaactaaatatttaagaagtcatttcataggcaaggtttatgaatgacttagaagtaaaattagtaatttctaaatcactgtagtgttttctatgtttttagagatattcctaacacagagttttccgaggagctgtgaaaacaagtacaaacgtacataagtaattttgtcagggatgtttctgtactaatttgggggagacttgtgggccataaataaatgagatacacatcctaaaaataatggtaaaaattatcaagtaccactttcagatggttactcaagtatcaacttggtatgcaagtaagttcaccgatttcttcacctatgatttcatactcaaagtgctacatcttacttaggtactgataacatttagaaacctttataatcagcctcttaaagaaaatccagccttttcagatggtaaacttgtctttactaactttaatgcccgtaactatttcgatataaccaaacaaaaatttttaaaaatatattccttacagctcctgattaacttattttctgatacattctgaggctagtaacaaaatttagaccagaataggttttcatatatcaaaaaaaggaaaggaacacggagagcacagatgagatgtatggaggctctatactatagacccatccttgctctgtgcgggaatcatcacaggaatcgcgcccattcgacttagattaggggcagctaccttagcaggtgggagagtcggactctgaggagtgcgttcaaagtcttcacttggtacttgtttatactgagtcttggaatatccttccatgttggaaggagatatggatcccagggatgaatgattactgcctatgtagcttctggcagtggacgtgtggctctttggaggcggcacatcttccttgatatcgtgatgaacttccttttcatatttttcttctctgcgctttttacgacagcaaaagatgataagaccaatgagcactagagcaagcaaagttcctataatggctcctgcaattagtccagctttatttgaaggagggacaacgtttacacgcaacaggcactgatcagagcccactctgtttctgatgtacagctgtatgtcccagagtactcagaagaagcatttttacagatataacagatgaagtcatttctgctaaccatgaagtgggcattttctgtgagtcagacaatttttgccactcatactgtaatggaagtgaaccttcttttggttcacattttaatttaaagtcacttccaatttcttctgatccatcaacgtaacatcttgtacctgaaggcttaccaagaactaccagctgaatcttcctatttgcaacaccaggagctcttttcactttgcactgatctgtgccaatatctgacagctgaaaattcgttacatttattgatgcatcaccagatttgagatcattactcttaaaatgtactcggcctttcagatctggatagtagtcatcataatttttgtctccagaatataaaataatcacttgatccaccttctgattatcagctggtgatatcagccactcgatgtccagtggtccctggtcttcaggactaagcgtaaatttgcatggcagataggcagtttcccctttggctttttcaatcatctgctcaggagtagtgatactccaacctctgatgaaatccgcgactctgcacaggagcacgaagcgcagcaggagcgccacggtggctgccgtgccgtgggcggcggctgcaggtaggcggctctcgctccaggtcctaggctccccgcgcctggcgcactcaaggtagagaaaatcttaaagactccaccacaataaacggttaaagctgataaagaaattcaataaagttaatagttacaaaatcatacagatagcattattgtttctatacattaatgacaaactattacctgaaaaataaattaatgaggcaattcaatttataatagaatcaaaacagatataaaaatatgtaaaagacttaggagtaaatttaatcaagaatgtgaaagatttgcacactgaaaactatagcacattgatgaaaaaagttaaaatggcataaataaatggagaaacatcctttattgattgattcaaaaattagtattgtaaaagtgtcaatgctacccaaagcaatctacagattaaatgcaaccactatcaaattcccagaaatagaaaaattactgctaaaatttgtatgaaaccacaaaagaccctgactaaccaaagcaatcttgaacaaaaagaataaagctggaggcatcagactacccgattccaaactatattacaaagctatagtaattaaaacaacatagcagtggcataaaaacagacatgtagaacagtgcaaagggatatagaacccgtaaataaatccgtatgtctgtggtcaattgactttttgataaaataactaaaaatacacaatgaagaaagaaaattattttcaataaatggtgtagaaaaaactgactatccacatacagaagaataaaatttgacttttcttttgctctttatacaagcatgaaatcaaaattaaagacttaaatgtaaaactactacaaggaaatatagaagaagactgtatgacattggcctgagctatgattttctgtagattattccaaaagcacaggcaacaaaagcaaaaacacatgaatgagattgcataaaactaaaaagcttttccacaggaaaagaagtgataatagaatgaagagaacccacaaatgggataacatttttaaaccatacatcagataaggggctcatataataatatataagtaactcaacctactcaaacataagaataaaactatgcttattaaaaaaaataagcaaagaaccagaatagacatttcgtaaggcatacaaaaggccaacaggtacatgaaaaaatcataaacatttctaattatcagagaaatgcaaatcaaagccacaatgagatatcacctcacacattttactagggctattataaaaaaagatggaagataagtgttgatgaggatgtggagaaaaagaaaccctgtgcactgttggtaagaatggaaattagcacagccatcttggaaaacagtatgaagcttcctcaagaaattataaatatatttaccctatgatccatcaatcccacttctggatacgtgtccaaaggaattttaatcagtatgtcaaaaacagacatctgcaatttcatgttcattgcagcattattcataatacccatgaattagaaacaacctaagtgcttatcaactgaagactagataaaaatatgtggaaaaattggaacccttctacaccactggtgagactttaaaatgtaaagcagtctcgcagttcttcaaatggttaaacatagagttatcacgtgacccagcaattccactcctatgtgtttaccaaaaagaaaataaaacaaatgctacacaaacagtagtacacaaatgtttatagcaacacaaagtagaaaacaacagaaatgttcatcagctgaggagtggataaataaaatgtggtgtgtccataaaatagaatcttatttagcaagaaaaggtaaaaaactgttaatgcatgctccaaaatggatgaacattaaaaatatgttaggtgaaagatgtgagtaaaaagtgactatgtgttattataattccatttatgtgaaatgtccagaataggcaaattcatagtcagaaagtagacgagtggttgcctagactaggaggggtttaaaaaagactggagaaaatggggaaagat

SEQ ID NO: 1885887 - DNA, 4001 bp, Homo sapiens
ggagcaacaataaagctctacacatgtaactaaaatgtatgcaattaatctagtcccagcactttaatttgtagagttctcaaatcaaaagtaacaaataattgtacatcaggattgttaggaatactaattattttacaactgcccctacatgtttcttcttctctgacacaattggcacagatccaggcttgctgtgtttaatacgattcacttcctttcttcgacgagcttctttcatgatgcactgttcctgaatctggctgtagatagattttggtagatgtcaatgacaagctatacattttatatcaggatgatgctgaaatttctccttcaatttctagttataatccttagctgctttttctcatgatgtaagcacaccaaatttttcagaagcattagctttccacaggcaaatgttcatttcatcagatccacacataatatacttgctgtcagaagtgcattttacacagataacatgttgcattcgctttgtgtgatatacctccctgcttcaacttttgtctataggaaagatacaaatagctttatcgaaactagcagacacaagctctttcccagtgggagggtaatccatgtcaagcactgcagatacatgatccatatggaacattacaggagtgtccagtgcacacatatcaaaagtatgtaagttatagtcttcatttgctgccgtaaaaatgaaagcttccatagggttccaacaaactgtatttgttctcatatctaatataacctttttcaaaggagtagcttgcctcatgttgtacagtactatattcctgtcagacgcacaaacttcccaagagaaatgtctcgattgggttaaatttaacactacttacactgtcaaatccccaggtcattgaacatacaggattagttctttgttcatcccaaatgtctacttgctgtccacatgtggcaaaaacagcttctttacagtgatgataaaccccagtatacactgtctttcctaatgttgtatgtaatggttcttcctcatctccatagcctggcccatccattttccattgtttcacagttttgtcaccaccaacggtgaaaaaagaagtcccacaaaagtgagtacgtattccttatacaaagccttcatgtgcttgtattgtatggatacatttctgttgagtcaggttccaaattctaacctctccatcacacgccccagaaaggacagtagccaggttctttggatgctttgccaagcaactgactccatcttggtgaccatccagcaaagcaaggaatggttttgcaaatactcattccattttggtagcatttaaagctcttacatattctcatgggacctcaaaaggatgtaaggtaggatcatagtttcttggaactctctgtaagtccaacttggtttcacagacataattgtccagattctggctcagtatcttcatcctcatcttggttgctcttctggccggactccacgagctctttgctgtgagttctgtccactgcctgattttttttttttaactgttttagttaatgtgtaacaccacttaaatctaaaaatacataggtcaccccaacaatagctttcaacttatggagctgcttcagacatgctccctgtgaactccaaattatgttatatagttttagataacatacatcaaatttatttcctattctaagaccatgaaatatggcatttccagaactgaatggggtatagtgttacaaactgtattgccagaggtcttttctattcagacttggtagctccctctcaccttctctcctcctgtatatgacagaggtaataaaacctggtaaaaaggaatcctaccccaagctacagatcactgaacatccaaggaccaaagttctcaccgtatcatttgatagaggttagaagtgacaacagcattgaagagacagtactttagtgccatctttgggcaccaaggatactcagtaactcctcaaagaattcaaatcacttttctcgctgcaggtaagggaccaaacagatcaaccttcataattttaaaagtcacctattttccctttgactctgatttttaagtgaaaggataattatgaaatacaataatattataaaccccctatctgtggttttgcttcccatggcttcagttacccacaatctaaaaaatattaaatggaaaattccagaaatcaataattcataagttttaaattgcatgcctttctgagtagcatgataaaatcttgcaccatcctactccatctgggacatgaatcatccctttgtattcacactgtatatgctaccagcccattaatcataaagtagccatcttggttatcagattgaaaatatataaatatatacatggttcaatactatctatggtttcaggcatccaatgggtgtattagaacatacttccataaataagtggggactaccaaatagcaataagaaaaaactgtacctaagtcaactttgttcaacttagtactcaactatacaaaggaaatgcatgctctgtatctgttaaagcagaacggctgtataattatttgttactgtctcttcgagccttcttatttttctaggatgtctacacgcagaaattagtacatctgcaaactgcccagatccaaggcatgtaacaattttcagactactaaaaatatgaaataaataaatatatatgaaggcaaattttttaaaaaatgtgtttcaaatgccttttaaaatttaaaatttgtaatcttcaaaaattatagttgtttaatgtaatagtgttctctcaataaactctcctattcttagctcattgcttttaagatatttagatgtttagtatttagtagattctctttttttaagaatgtaatcatgtcctttgcagcaacatggatgcagctggaagccattatcctaagtgaattaatgcaaaaacagaaaatcaaatatcacttgttctcacttataagtgggagctaaacaatgggtacacatggatgtaatgatgaaacaatagacactggggactccacaagcaggcagggagggcaggaggggaaaggaatgagttgaaaaactacctacccagtactatgtttactatttgggtgatgggttcaatagacgcccaaatctcagcattacataaaatgtccatgtaataaacccacacatgtatcccctgaatctaaaattatttaaaaaattctttttaaatctttgctatttttataaacagaattttttactcttaactaggtcccatataccatttgaaataaagatattgaatgatttcttccataagaattaaaaggaatatttatatagacacccaagtagacattgaagcaaatttacaaaaagaaaaagttggaaagaagtatattattattataagtaatatatataattatatatattaaaatgtaatatacaaaagtaatattatatataagtaacatatagtatatgctatgttatatataatatacagacatatatgatgatgatattattaagcctttccttccaagaagttcaaatcaatttatgaatatcttcattaattctttcaatatttctatctatttggtaggaaattaattaattttatagatataaaagagaacaatgagaaatcattaattaacatcaactgcatcttaaattgtacaataacaggaaattgtactaataggaagacctgggaccagaattcaggactcctattggtatgatgctcagatcgaaattatattaatgaacccacacagatgactggacctaattccttcaactcataatttaaagacattcctgtggacactgacatagtactttttagaaaagttacttaaactttagtaaaaataaataagccaggcacagtggctcacacctgtaatcccagcactttgggaggccaaggcaggcagatcacttgaggtcaggatttcaggatcgg

SEQ ID NO: 1885888 - DNA, 4001 bp, Homo sapiens
aactttagttattatagaaagggcagtagcagatgggtctgctctgtctcgcttctaagaaggtgggcaggacaaatggcagcctcctgcagaggcccagtgagaagcctggccctcggccacgcaggatggaagacagattggattccacagaggggagctgccctgggaagatctcacggatggccaggacccaccatttcttcgggattcccctgttttctccaacgggcactaatgcctgtgcctgggtcctggcaacactctggactccacactctcctgggtttcacctttgtagcaggatccctgcagaccaggcccatgacaaacaccgtctccagcgggcagagcaaaggaagggcacagcgccaggcagtgctgcagctgcctgtcaggaagaggcctacttctggtgaaactgggcagacaaaaggcagtgagaaatgtgatctcggggtggtggaggctctagggaaaggaaaaggcaggagtgaacttccacacagcagcaatggcagaaccaaaggtggctttgacctccacgagggctcagatccaggccaacagcgtgtccaggacagggtgccgggtgtatcactggtccaggagcactatgctggcagaatccctttggtgcctgatggccctgccttcgtgggaacagaggctaaggctttgagttacagctgcctccccaacagtgcatccccttctccttcctcagcctcaggtaggagacagggcaggcaacctcactttcctcttctccccttctccagcccctgtctgtcgacccagttggaggcagccaggcttgcctatggactggttgacagccttcatgcacaggttctccaccagagcctttcttgggggcccctggcctgggctctgagctgggagtgaaggggatgacccatgcagactgtttgctgcttgtagctttccctgggaaagactctgccaggccttggagccagactaggaggctttataggccaccgcaagcagcagggctccagatgacatcacagggaagatcaagagggtgtggaggggcatcgaagcctctccaggagacaggagacgccggccccgtagagccctaggggcgacgccactcccactcactgtctactctcctctcacctctgcaacactggggacactcacaagagtgtgatccaagtcggccgtcgtcttctgcagctctggagacctgatgctggggaagggcatgcctggcatcaccacacacctggggggagacaggagcctggggccggtgggcccacacatcaccagctgctccgttctaccatttcttcagccctcttggctgtgcctgcggctctgcccctcccgtctctgcacctaccacccagagagggcttgttgagctcagagatcccacctaggccaatccactgggttctgtggcagcgatggcctgcctgatcttccacctgctctcccagggccaaagccagacctgctgagcccctccctccagccggctggtctgagcagtcacagcccggctttgggctccgatggcagcagacggcaggtaggggtccagctgctggagcgagggccggccacgtatcacagccaaggagatgagcacaagcactacttactggcctaggttgtgagagaagttgatgctctcactcatctttcctccaatctttcccctatgcctggttgtggtattaagttacatgcagacaacaggggccagaagatgaacaatggcccatcccactctaggcatggctcctctccacaggaaaactccactccagtgctcagcttgcaccctggcacaggccagcagttgctggaagtcagacacctgcagatgaagaccacagcatcaagaccctgtgacctctcaaaggcccggtggaaaggacacgggaagtctgggctaagagacagcaaatacacatgaacagaaagaagaggtcaaagaaaaggctgacggcaagttaacgaaaagaaaaatggtgaatgatacccggtgctggcaatctcgtttaaactacatgcaggaacagcaaaggaaatccggcaaatttgcgcagtcattctcaacaccggccatgcagcaaaatcatcagtggaaatttaaaaaaatacacatggccaggccccagcccaaatcactaataagaatctccagggcttcacctgttagactggcaaaaatccaaaagtaaacactttgtggagaaacaggcattcctagacattgctggtgggatacagaacagtacaattctgatggtaatcagttcacaaattaaacatatttattttttacttttaaacccaggaatcccatatttaggagtctactgagaccaaacagcatatgctccgggtgtttccctataatccgccagtactgttggagcaagagggcccggcagtgtccccagctgccagcaggtgggcgtgctgccactacaccttgagcaagaggaccctgcaatgtccctagctgccagcaggcggcgtgccaccactatacagtaagcaagagggccctgcagtgccccggcgccagcagggggcgctggccaccactctaagcaagagagccctgcagttgccctagtcgccagcagggggcgccctggcacagcaccgtgagcaagcgggtcctgtagtgcccggctgcaagcaaggggcggtcgatcccggcttttcggattactgaggttctacccgtctctgcgccgcgccaccgtgacgtgagtttctgcgcgtgcacggcgccaccctccccccgccccagcccggcgccgtgcgactttgctcctgcaacacacgcccccccaacccccgcccgtaggcttgcgtctctgcgcctgcgccacgcctccacccctggacgcgctagcatgtgtctctgcgcctgcgccggcgcggtgcgcctctctgcgcctgcgccacgcctccacccctggacgcggtagcatgtgtctctgcgcctgcgccggcgcggcgcgcctctctgcgcctgcgccacgcctccaccccggacgcgctagcatgtgtctgcgcctgcgccggcgcggcgcgcctctctgcgcctgcgccggcgcggcgcgcctctctgcgcctgcgccggcgcggcgcgcctttgcgacggcggagttccgttctcctcagcacagacccggagagcaccgcgagggcggagctgcgttgtcctctgcacagatttcggtggtactgcgaaggcggagcagaattctcctcaggtcagacccgggcgggcgggctgagggtaccgcgagggcggagctgcgttctgctcagcacagacctgggggtcaccgtaaaggtggagcagcattcccctaagcacagacgttggggccactgcgtggctttgggacaactcggggcgcatcaacggtgaataaaatctttcccggttgcagccgtgaataatcaaggtcagagaccagttagagcggttcagtgcggaaaacgggaaagcaaaagcccctctgaatcctgggcagcgagattctcccaagctaaggcgaggggctgcattaaagggtccagttgcagcatcggaacgcaaatgcagcagtcctaatgcacacatgatacccaaaatataacacccacgttgctcatgtggttagggttagggtcagggtcggggtcggggtcggggtcagggtcacggttaggggttaagggttaagggttaggggttaagggttgggggttaagggttagggtagggttagggttagggttacgggttagggttagggttagggttagggttagggttagggttgttagggttagggttagggttagggttgttagggttagggttagggttagggttagggttaggggttaggggttagggttaggggttaggggttaggggttagggttggggttagggttagggttagggttagggttagggttagggttagggttagggtagg

SEQ ID NO: 1885889 - DNA, 4001 bp, Homo sapiens; identical to SEQ ID NO: 1241977

SEQ ID NO: 1885890 - DNA, 4001 bp, Homo sapiens
gacggagtcttgctctgttgccaggctggagtgcagtggcaccatctcggctcactgccacctccgcctcctgggtgcaagcgattctcctgcctcagcctcccaagtagctgggactacaggcgcgtgccacgatgcccagctaatttttgtagttttagtagagacggggtttcaccatgttgaccaggatggtctcgatctcttgacctcatgatccgcccacctcggcctcccaaagtgctggggagaatgtgtttttaaaaagctctctgaggtgattctgacacgcatccacatctgtaaccatcagcccagttactatccttcattttgcaaatgataaagctgagcccccacccctcaaaaagggtaatttaatcaaaacaaaaagtgagttagggttgtaaaatcctaagatgaatttcaagatgtggcctggtcctctttccaaaatcccaccaaaatgacagtattttactaaacagaataagtctgacacagcagcagaaaaataacagatacaaggagaatacccttagtgaaccaaaactacagggacatgccggaagacacaaagcagatggaattagactgctgggcttgagaaggccacaaacccaatccaaataatggagggaccacttttttccagaagaatctaacattctttaccgttcttgtcccaactacagttggtaagaatcaccctcccatataagaagcctatcttgatggcctcttactatgagtgtgaaaaccagagggaaaagacaaaatgttttttaatataactcaacacagcagcaaaatcttaaaacagactccatctctgccttttaactcaggagctagaaagctctcctgccagcacctccccatcctagtgtcacaggcggagcatgggtctgcaaaccaggagagggaggccacagcagaaaagaatgacaattctgaagacacttgtgatggttaatactcagagtcaacttgattggattgaaggaatcccagcacttcgggaggcagaggtgggtcatttgaggtcaggagtttgagaccagcctggccaacatggtgaaaccccgtctttactaaagacacagaagttagccaggcgtggtggcgggcgcctgtaatcccagctactccggaggctgaggcaggagaatagctttaatccgtggactgtcaagagacgtaggctgcagtgagccgagattgcgccactgcattccagcctgggcgacagagtgaggctttgtctaaaaaaaaaaaaaaaaaaagttgtttttttttgttttgttttgtttttgttttttgagagaagtctcgctcttatcccccaggtttgagtgcaatggctcgatctcggctcactgcaacctccgcctcccgggttcaaacgattctcctgcctctgcctcccaagtagctgggattaagtagcctgccaccacgccgggctaatttttgtattttttagtagagatagggtttcaccatgttagccaggctggtttcgaacaccgaaaatcttaaaggcctttgcctttccccgcctgggctcaaaagccgccattccccgccctgtcgcggtccccggagcaggccggctgactgagggcgaccatgggtcccgagagggctcccgccaccgcgggctcccacctcggggggcggcgacgggggctgagaggggccagtggcccccaagacagccccatgcgaggagccggagagacagacgcgcccgccgcctcctcccacccaagcctcgcgcagtcccggggcgggccgggccagttgcgggagaaaggggcggggagcctcgccggggcaggttcccctttgtcccgggactccgggcaccccctctccgccctcttcctgccccgcgaggccgccgccgggcgcctcacctcatgttgcagtggagcgtgagccgcagctgagcctcctggttctcgtggaagatagacgccagcaacttcagtttggccttgaatcttgacacagacatcttcccctcatctccggcgggaagggcgtggaaggggagccgtctggagccgctgtcatggccacgaccaccccgcggggccgcctggccgagctcttgtgagcctaaagacccgcctcttcctgcagcctccactctcctgggagcgcggctggaaaatggcaaggggcaccaggtcttggcgggagctgtgtggcggcctggggggctgctccctttgtaaccgactccaccgacaggaggcgcggcccctgtcaagccgcagcttaaaagggcaacaggacaacagaaccaccgcccccgctaccgcctgggaaagggctgcccctaccccgcccccgtccccgtcgcccctaccccgcccccatccccgtcgcccctaccccctcggcgcacccttttccgcgggtgcacaagtccagagcgtgcgcgcgctcccgactgccccctcctcccttgacccagcacctttctgccgggcacaggatcccggggctagactgcctgggctcaagttccaacttagccacttgctggctgtgaaatacttgctttaagcaagtatttaagcctcagtttctttctttctttctttttttaacttaatcccaaatgtgatagtctcagtttgttgatctgaaaaacagaaattatttagtgagagtctatgtgaaaactttaaagtttttaaagccactgcctggctcaggaaagtcctcagctttagctgttaaagttttaaaagccactttaaaggttttaaagccactgcctggctcaggaaagtcctcagctttagcctttatcagctatgattattattgtgttggctacacgtgcattgaggcaggaaaatgctcagggataacaaccaagtatgcaaattatctcatcagacccagcgacaggcatatgtgtgcatgctcatgtttcagctcagagccctttgtctagaaggctcttgaactcaagaggcccaggcactatcaacttgaatttgcagtggagccatcacttttgttgatcaatgaaattgacataacgctctttttttttttttttttttttttttttttttttttaacaccaaccgtgtgcctcgagctaactgtgtcaagaaaagcatgcttcagttggctggagtgagcaatttaacttgtggaggaatgagaaacgttagtgttgagaatagaaacataaaaccccagggtaaggtaggaacctacctgagaaccttgggtgagtcatccaccctttgggggctccctgtgcctcagtggagtgaagaattatcccttcctcgccttgctgcctcctgggaaagttgataagaatcaagtgaaattaagactgtcaggctgtcattgtcatccctatcaggggaagggtcctctggggcctgaaggggctttgggtgaagcacagctgtgttttctccagggacccaccgtgttcccatcctccgccattgtggcccagccactgcctgtgcaagtgtcacccaatccttccacaggccatcagaattccacttccacccaagaggggaaaggacacattggaggcagcacagacattaaacacggtattttcagaaggagcagacataaccttacagaagtgctttattttctgtaactagattttgttttactggaggcagctttgtataaggttcaggcgtctcttggtccattttatcagaaggaaccatgggggtcatttcatccatcccttttcatctaagcagcactacattccaatcgtgaaggcataagctttccctgtcaagcaggatgctgccccagacccttagcatcaggaaaccccaaagtcaaacctgaatccagcctgctgaatgaaatttcagtcccatcctccctccttctagcaaaagaaggtttgggggagatttcaaaacagaagcacttctctccccagggagaaaccgaagaggagcagcaggtactgctcttca

SEQ ID NO: 1885891 - DNA, 4001 bp, Homo sapiens
aggctggagtgcagtggcaccatctcggctcactgccacctccgcctcctgggtgcaagcgattctcctgcctcagcctcccaagtagctgggactacaggcgcgtgccacgatgcccagctaatttttgtagttttagtagagacggggtttcaccatgttgaccaggatggtctcgatctcttgacctcatgatccgcccacctcggcctcccaaagtgctggggagaatgtgtttttaaaaagctctctgaggtgattctgacacgcatccacatctgtaaccatcagcccagttactatccttcattttgcaaatgataaagctgagcccccacccctcaaaaagggtaatttaatcaaaacaaaaagtgagttagggttgtaaaatcctaagatgaatttcatttcaagatgtggcctggtcctctttccaaaatcccaccaaaatgacagtattttactaaacagaataagtctgacacagcagcagaaaaataacagatacaaggagaatacccttagtgaaccaaaactacagggacatgccggaagacacaaagcagatggaattagactgctgggcttgagaaggccacaaacccaatccaaataatggagggaccacttttttccagaagaatctaacattctttaccgtacttgtcccaactacagttggtaagaatcaccctcccatataagaagcctatcttgatggcctcttactatgagtgtgaaaaccagagggaaaagacaaaatgttttttaatataactcaacacagcagcaaaatcttaaaacagactccatctctgccttttaactcaggagctagaaagctctcctgccagcacctccccatcctagtgtcacaggcggagcatgggtctgcaaaccaggagagggaggccacagcagaaaagaatgacaattctgaagacacttgtgatggttaatactcagagtcaacttgattggattgaaggaatcccagcacttcccagcacttcgggaggcagaggtgggtcatttgaggtcaggagtttgagaccagcctggccaacatggtgaaaccccgtctttactaaagacacagaagttagccaggcgtggtggcgggcgcctgtaatcccagctactccggaggctgaggcaggagaatagctttaacccgtggactgtcaagagacgtaggctgcagtgagccgagattgcgccactgcattccagcctgggcgacagagtgaggctttgtctaaaaaaaaaaaaaaaaaaagttgtttttttttgttttgttttgtttttgtttttgttttttgagagaagtctcgctcttatcccccaggtttgagtgcaatggctcgatctcggctcactgcaacctccgcctcccgggttcaaacgattctcctgcctctgcctcccaagtagctgggattaagtagcctgccaccacgccgggctaatttttgtattttttagtagagatagggtttcaccatgttagccaggctggtttcgaacaccgaaaatcttaaaggcctttgcctttccccgcctgggctcaaaagccgccattccccgccctgtcgcggtccccggagcaggccggctgactgagggcgaccatgggtcccgagagggctcccgccaccacgggctcccacctcggggggcggcgacgggggctgagaggggccagtggcccccaagacagccccatgcgaggagccggagagacagacgcgcccgccgcctcctcccacccaagcctcgcgcagtcccggggcgggccgggccagttgcgggagaaagggggggggagcctcgccggggcaggttcccctttgtcccgggactccgggcaccccctctccgccctcctcctgccccgcgaggccgccgccgggcgcctcacctcatgttgcagtggagcgtgagccgcagctgagcctcctggttctcgtggaagatagacgccagcaacttcagtttggccttgaatcttgacacagacatcttcccctcatctccggcgggaagggcgtggaaggggagccgtctggagccgctgtcatggccacgaccaccccgcggggccgcctggccgagctcttgtgagcctaaagacccgcctcttcctgcagcctccactctcctgggagcgcggctggaaaatggcaaggggcaccaggtcttggcgggagctgtgtggcggcctggggggctgctccctttgtagccgactccaccgacaggaggcgcggcccctgtcaagccgcagcttaaaagggcaacaggacaacagaaccaccgcccccgctaccgcctgggaaaaggctgcccctaccccgcctccgtccccgtcgcccctaccccctcggcgcacccttttccgcgggtgcacaagtccagagcgtgcgcgcgctcccgactgccccctcctcccttgacccagcacctttctgccgggcacaggatcccggggctagactgcctgggctcaagttccaacttagccacttgctggctgtgaaatacttgctttaagcaagtatttaagcctcagtttctttctttctttctttttttaacttaatcccaaatgtgatagtctcagtttgttgatctgaaaaacagaaattatttagtgagagtctatgtgaaaactttaaagtttttaaagccactgcctggctcaggaaagtcctcagctttagctgttaaagttttaaaagccactttaaaggttttaaagccactgcctggctcaggaaagtcctcagctttagcctttatcagctatgattattattgtgttggctacacgtgcattgaggcaggaaaatgctcagggataacaaccaagtatgcaaattatctcatcagacccagcgacaggcatatgtgtgcatgctcatgtttcagctcagagccctttgtctagaaggctcttgaactcaagaggcccaggcactatcaacttgaatttgcagtggagccatcacttttgttgatcaatgaaattgacataacgctcttttttttttttttttaaacaccaaccgtgtgcctcgagctaactgtgtcaagaaaagcatgcttcagttggctggagtgagcaatttaacttgtggaggaatgagaaacgttagtgttgagaatagaaacataaaaccccagggtaaggtaggaacctacctgagaaccttgggtgagtcatccaccctttgggggctccctgtgcctcagtggagtgaagaattatcccttcctcgccttgctgcctcctgggaaagttgataagaatcaagtgaaattaagactgtcaggctgtcattgtcatccctatcaggggaagggtcctctggggcctgaaggggctttgggtgaagcacagctgtgttttctctagggacccaccgtgttcccatcctcccccattttggcccagccactgcctgtgcaagtgtcacccaatccttccacaggccatcagaattccacttccacccaagaggggaaaggacacattggaggcagcacagacattaaacacggtattttcagaaggagcagacataaccttacagaagtgctttattttctgtaactagattttgttttactggaggcagctttgtataaggttcaggcgtctcttggtccattttatcagaaggaaccatgggggtcatttcatccatcccttttcatctaagcagcactacattccaatcgtgaaggcataagctttccctgtcaagcaggatgctgccccagacccttagcatcaggaaaccccaaagtcaaacctgaatccagcctgctgaatgaaatttcagtcccatcctccctccttctagcaaaagaaggtttgggggagatttcaaaacagaagcacttctctccccagggagaaaccgaagaggagcagcaggtactgctcttcagcccacacacccatctcaggtgacaggtcccctcctcagtgtggg

SEQ ID NO: 1885892 - DNA, 4001 bp, Homo sapiens
gcaacgtgtggggcggccgccaagagtgaaaatagagggaagcgccatgcaagtgctggaaagaagggggcaggtgggacgagccccacagccccctccacaaaaagaccacttccgggactcagtgctcctttgggggcaggctccgccagctctccgccactcagggctccggtcccacggtcggagtgcccgggacggagacggccagttctggcggccaggtccgacgctctagaatccagccccatttccctcccggccacgcccgtccggcggcctctcctgtcatattcagcccctactcacctggggaccccgggaggggcgcgagggcacctgcagggggagggcctaaggggtcaggggaagcccccggtgtggagggtacgacgggcgcttcccccagggtggacgcagcaggcagaggcccaggagcagggctccgcaacccgggccgggctgggggcacggcggggagtcggcactgcgtcgtggggctggacttgggcgacctgcgggcgaaagggagccaggaacagaaagaggagcgatgagcggccccgcccaccctaaggccccgccccagcccagtgccagccactcccatgcatgcaagccccttcctgaaggcccgaggcggtcaccggagcttaagccccgccgccagcggcgccaacctcccagatccaccccgccccgcagcccgcgctccacggcaagccccgccctctctaagctccgcctctcgcttcaagtaggcgccaccccgggatgggggcgcgccctgcctggtccggcacttcttccgcggcccaggctggggggctttggggccgtgggggccgaccctggtacctgcgtccgaccgggacgctctgcacctgcagccaggagtcatccacaggaccccgtgggtgtgctgacgatggtcgtcttgatgtcaccgatgatgctgggcgcctccctcagcacgtggtgcatgcgccgcatctcgttgcgcccctgtgcctgctctgccgactcccccatcagcgtgttctgttccccacgcgagtacaagttggccagcagctccgagaagatgaactccttggtctgagagcgggcaaagagggaaggagactgggacctgattgatgcttgtgctgccctggccgccatagctgccccgccgggccctgttgggactgtgcgctggacttggagccgcgagtatggcttttcagacgcggcttctacaccgcttagactcgaagatccgcctccccaccgcccttttctcactcagatgaggacactgaggtccagaggaaaagtcacctgtccaaggtcacagttctgggaggggactgaggacctatcatgccaccaggacacctgtctactcagtttttaatttttggagataggatctcgctttgtcgccaggctggagtacagtgggcgagatcactgctcactgaagcctcaacctcctgggctcaaagtgatcctccaacgtcagcctgtggagcagctaggactacatgtacttgccaccaccaagcccagctattttttaaaatttttgtgttgagatgaggtctcattatgttgcccaggctggtcttgaactcctgggctcaagccgtcctcctaccttggcctcccaaagtgctgggattacaagcatgaaccactataatcccacattatatttctattggacaactctggtctggactgtgcctcccttcctgaggctggtcccataaggctggtctgcatctcccctaggccaacatggccacctgggtcccctctacccccatgaggcgacgcatgcacgttgttgatcatgaggtggatgatggtcttgggcatgaggtcctgcatgttcttgttgacaatggccatgtacgagtccaccaggttctgaatggtctccacttgccactccagctgtggtccatggagagcatgaagctgtcggagccattcccctcagtcttgctggcctgtcatgaagaacacaagggcatcagggtggccaggccatgtagccaggctccaggcatcccctgcaagggtacctggcacattgatgcacagagagaagcaactggcctaaacagacacccagctctccacatgctctaaaaggtttcaggtctctgcccatccctgtatctcttaggaccccagactcccctgattcagcctcatcttggttctgactctactgcccagaatttgcctcaattttccaaaccagaaatgagaaaaaaacatctgcagatcctttgcttaaagacctggccagagctggtgccaggctgcagacgcctggcaggaagcaagagagggtcacactcactttcttcttgtcctgggaggcccacacaccaacactgccaccactgctggcaccagggagcacagccaaagtagacacacacagagaggaaaaggggagaggttgagtgaacctgggacactgcaccccaactctaagtctcctctagacattgccacagtgaaataggggagaaaagagaaggcagtcacaggaaaccaccatcatagaaagggcatgcaagaaatgccatctgtggcagagacggagacacaaaactgccactggagaaggatgggaggaccagaagacttaactctgatctcaccccagagtaggtagtggggaggattcctggttatttctgagccaaacaagggctcagaaacatggcatgacttggcatcactgtggatggtgccccagggcccccctagtatcagcagcttgaccctcctctccttgccctgccgctcaccccaacacactcaaggtacacaccagccctcagaaagtaggacttccagctgttcacctcctcctgtgtctcatgagccagctccagctgccaataatccttgtagaggccaggtgcggtggctcacgcctgtaatcccagcactttgggaggccaaggcaggcggatcatgaggtcaggagattgagaccatcctggctaacacggtgaaactccgtctctactaaaaatacaaaaaattagccgggcgtggtggccggcgcctgtagtcccagctacttgggaggctgaggcaggagaatggtatgaacctgggaggcggaggttgcagtgagccgagattgtgccactgcactccagcctgggtgacagagcgagactccatctcaaaaagaaaaaaaaatccttgtagacattcctgcaagacagggcaggcagtgagggcagatgggcaaagccacaccctccctgggggttaagggcatgcctggactttggggtcatcacatctgagtcaagtcctggcttgctcatttcccagctgtgtgattctgggcaaatcccttcctttcagcctcagtttcctgattgggaaaatgggttaataataattcctgccttgttatggtttggctgtgtccctatccaaatctcaacttgaattgtgtctctcagaattccacttattgtgggagggacccagggagaggtaattgaatcatgggggctggtctttcctgtgctattctcatgatagtgaataagtcttatgagatctgatgggttgcttttgcttctctcattttctcctgctgctgccaatgtaagaagtacctttcgcctcccaccatgattctgaggcctccccagccatgtggaactgtaagtccaattaaacctctttttcttcccagtcttgggtatgttttcattggaagtgtgaaaatggactaatacaataaattggtaccagtagagtggggcattgctgaaaagatacctgaaaatgtggaagtagctttggaactaggtaacaggcaaaggttggaacaatttggagggctcagaagaaggcagaaaaacgtgggaaagtttggaacttcctagagacttgttgaatgactttaccccgaatgctgatagtgatacggacaataagatccaggctaaggtggtctcagatgg

SEQ ID NO: 1885893 - DNA, 4001 bp, Homo sapiens
cccatccaacagccaccagacctgatagagaaggaacactgattgaaccaaaatggtggagctataagggatggctggctggagtgaatgccagaggcccctctgggccatcagaaagcccagggtcctctgaggaaccctggggaaggcagggagggcaggtagccggatgccattggccatagacttctaagtctaagaggggagccttaactggttggcggggggctgcaggttacataggtgaggctgggcccttcctgctgggaaaagcagaagagggagactccgtggcaggaaagggaagtgagctctctaggcggagctcagctgggccagcagcactattggctgaatagcacaggcaacccctagaagcaacaggccaaggtgcgtgagcctgctggccagcagtagtgcttcagcaggggccagggaccctgccttcagtcgcacgctagcagctatcatggtacctgggagggagggaagggggctgtgtgtccttccatggcctatgaagtgtgttgtgggatgaccgcgtgtataggactctcaggcttttatcctagatcaccactggattgctgacagatagaggacgtgggaccgtgactatcacccctaatctgccgtggatttggctcttggcactcccaggctgggagctggatacctgccctggcagcatgactcagactgcgtgacaggtacggcgtgcccaggatgatgttcccaggcctctggccgcctgagtccagccccccacacaaccccctccaagctcccagcccctacaccataaaccatgagctctgtgccctctctgatggttccacaactgccaccttgggcatggagcctgttgtaagagcccccaggctcagccatggagaccttgagcagtggcactgagtcccatggctcacagggagcaaagtgagacagccagcagcacaaggacagaaagaggaaagagcaagtctgcagctccagaagggaggggcagggagcctggctctgaggctccaggtatgccccctgtgtggagctggggcagcggggcaggcagaccattcatgcagcaggcagtgaggcatgtacctaccatggctgacgctcctcaggggccactgatagtgattctgaaagacagcttcaaatcacatggcaggtcacatgcatgggtggggcaggcctgggggtgggggacacacgcacatgccggagtgtgcacacacatgctgtgaggccccacggcccgcatgcacactctaacacatgcccacaaacaacacgcatacgtcgccctccccgccacctcccaatgcccagcaccctcaccggccggcacgtgccgcatggatctggggcgtgcagccactcggcacgctgaagcacatgcgtgggcagagtcacaacacagatgctcacccgcacacagaggcatttgcaccagctccctgcacactcgtgcctggcgtgctcagaggaccacccatgctgctcagggagacagggcttgctcactaatgtccggctgtcatttctccacctaagagccttccatggctccctactgcctacagcgttgaatcccaacaagtcatactctttggactttgaaggttctccaccctgtgccccaccctccccacagagctcttcctcattctgtctctgttccctgctttggccagtggctatccgcgatgtgacccacactacacctctgcccacactgcagctctttacccagttgccctccagttcctcaccacgtatgcctatctcagtcatgccccagactgcattgaagccaggctgccttgaagaagctctcccagactgcccttttccccaaggcagggtcatgatttaccaaaggtttcgtgtgtgttagcaagactggagtcggagcaggcatcaaactttacatcccatatgtcacacctcaccatagatctgggtgccaaatagcctgaagagtctgaactcacgttggaagttagcaaagtgctcctacagccgcatctgcagttaacatagtatccctatggccactgtctcccttgatccccacagccatcctaggagaaaggcagaacgtcatttgctagaagggatgctgaggctctgggagggaaagggacttgcctaaagccccagggtgaagcagcatctctggactctcatagacagcctagagctgccagcattcccttaggatctgtgccctcgggcctggcttaattttttcctctgcaaagagccatctgtagggccagaggctggcaaagcctgactcattactggacgccagttcctttgcctgactttcagtgatttctaccttaccctggggttttatgttgcttgtctcaacactgtcacttctcattcctccacaagttgaattgctcactccagccacttgaagcatgctcttcttaacacagttagctctaggcacatggttggtgctaaaaaggaaaaaaaaaagaagagcattatgtcaatttcattgattaacaaaagcgatggctccactgcaaagcaaagttgatactcctgggcctctgagttcaagagccttttagacaaatggctctgagctaaaacatgatcatgcatgcatatgcatctgtcttggtctgatgagataatctggatacttgcttgttatccttgagcattttcctgcctcattaatgtatgtgtagccaccacaataataatcatagctaataatggctacagctgagggctttcctgaaccaggcagtggttttaaaaactttaacccctaaagctgaggactttcctaagctagatagtggctttgaaaactttaaagttttcacatagactgtcattgaataatttctgtttttcagatcaagaaactgagacttactatcatatttgggattaagctaaaaaaaaaaaaaagaaaagaaacagaggctgaacgctgtcaagtatttcacagccagcaggaaatcggaacttgaacccaggcagtctagccctgggatcctttccccttacccattatccagtgttggctacacaaaactaatgagtacatattttcaactatagtttaagtgggtgacatatttttcactatattttatgtaggtgactttcagtttgggggtattctacttacacaatctattgagctggatattaactgagagcaaacagaaactaatgaactctgaaaaacataaaacatgagcaacatgacgtcactgcaagagacaaaacagcacatagccttcttgtgactgtattttgctgacagtccatgagctgatagcctgaactcagcagtgctgttcccttgggagacacacacacacacacacacacacacacacacacacacacacacacacacacacacgagttggtggttttctgccccccacccccaccccaacacacacacgagttggtggttgtgctgcccggagcctccagtccgcgagtgtgaagaacggaccagatgggtccagcagtgctgggtcaaggccaggaggggcagccggaagcgcgcgcatgctctggactcctgcagccgccgaaacgggtgcgcagggggcgcgcgggttgaggggtgaggggcgacgggtgtgaggggcgagagggacgggagcggggtaggggcagccctttcccaggcgatagcgggggctgtggtgctgttgcccttttaagctgcggcttgacaggagcagcgcctcctgtcggtggagtctgttacaaggggagcagccgcccaggccgccacacagctccccgcagaggcctcggtgccccttgccattttccagccctactccgactagagttgaggcatcagggagaggcggagctgggagagcgccgccgagaggtcccgcgggtggttgcggccgtgacagcggctcccgacgggctcaccttccgcgcccctcccgccagaggtgagagtaaaatgtccgtgtgag

SEQ ID NO: 1885894 - DNA, 4001 bp, Homo sapiens
ccaacagccaccagacctgatagagaaggaacactgattgaaccaaaatggtggagctataagggatggctggctggagtgaatgccagaggcccctctgggccatcagaaagcccagggtcctctgaggaaccctggggaaggcagggagggcaggtagccggatgccattggccatagacttctaagtctaagaggggagccttaactggttggcggggggctgcaggttacataggtgaggctgggcccttcctgctgggaaaagcagaagagggagactccgtggcaggaaagggaagtgagctctctaggcggcgctcagctgggccagcagcactattggctgaatagcacaggcaacccctagaagcaacaggccaaggtgcgtgagcctgctggccagcagtagtgcttcagcaggggccagggaccctgccttcagtcgcacgctagcagctatcatggtacctgggagggagggaagggggctgtgtgtccttccatggcctatgaagtgtgttgtgggatgaccgcgtgtataggactctcaggcttttatcctagatcaccactggattgctgacagatagaggacgtgggaccgtgactatcacccctaatctgccgtggatttggctcttggcactcccaggctgggagctggatacctgccctggcagcatgactcagactgcgtgacaggtacggcgtgcccaggatgatgttcccaggcctctggccgcctgagtccagccccccacacaaccccctccaagctcccagcccctacaccataaaccatgagctctgtgccctctctgatggttccacaactgccaccttgggcatggagcctgttgtaagagcccccaggctcagccatggagaccttgagcagtggcactgagtcccatggctcacagggagcaaagtgagacagccagcagcacaaggacagaaagaggaaagagcaagtctgcagctccagaagggaggggcagggagcctggctctgaggctccaggtatgccccctgtgtggagctggggcagcggggcaggcagaccattcatgcagcaggcagtgaggcatgtacctaccatggctgacgctcctcaggggccactgatagtgattctgaaagacagcttcaaatcacatggcaggtcacatgcatgggtggggcaggcctgggggtgggggacacacacacgcacatgccggagtgtgcacacacatgctgtgaggccccacggcccacatgcacacactcacacacatgcccacaaacaacacgcatacgtcgccctccccgccacctcccaatgcccagcaccctcaccggccggcacgtgccgcatggatctggggcgtgcagccactcggcacgctgaagcacatgcgtgggcagagtcacaacacagatgctcacctgcacacagaggcatttgcaccagctccctgcacactcgtgcctggcgtgctcagaggaccacccatgctgctcagggagacagggcttgctcactaatgtccggctgtcatttctccacctaagagccttccatggctccctactgcctacagcgttgaatcccaacaagtcatactctttggactttgaaggttctccaccctgtgccccaccctccccacagagctcttcctcattctgtctctgttccctgctttggccagtggctatccgcgatgtgacccacactacacctctgcccacactgcagctctttacccagttgccctccagttcctcaccacgtatgcctatctcagtcatgccccagactgcattgaagccaggctgccttgaagaagctctcccagactgcccttttccccaaggcagggtcatgatttaccaaaggtttcgtgtgtgttagcaagactggagtcggagcaggcatcaaactttacatcccatatgtcacacctcaccatagatctgggtgccaaatagcctgaagagtctgaactcacgttggaagttagcaaagtgctcctacagccgcatctgcagttaacatagtatccctatggccactgtctcccttgatccccacagccatcctaggagaaaggcagaacgtcatttgctagaagggatgctgaggctctgggagggaaagggacttgcctaaagccccagggtgaagcagcatctctggactctcatagacagcctagagctgccagcattcccttaggatctgtgccctcgggcctggcttaattttttcctctgcaaagagccatctgtagggccagaggctggcaaagcctgactcattactggacgccagttcctttgcctgactttcagtgatttctaccttaccctggggttttatgttgcttgtctcaacactgtcacttctcattcctccacaagttgaattgctcactccagccacttgaagcatgctcttcttaacacagttagctctaggcacatggttggtgctaaaaaggaaaaaaaagagaagagcattatgtcaatttcattgattaacaaaagcgatggctccactgcaaagcaaagttgatactcctgggcctctgagttcaagagccttttagacaaatggctctgagctaaaacatgatcatgcatgcatatgcatctgtcttggtctgatgagataatctggatacttgcttgttatccttgagcattttcctgcctcattaatgtatgtgtagccaccacaataataatcatagctaataatggctacagctgagggctttcctgaaccaggcagtggttttaaaaactttaacccctaaagctgaggactttcctaagctagatagtggctttgaaaactttaaagttttcacatagactgtcattgaataatttctgtttttcagatcaagaaactgagacttactatcatatttgggattaagctaaaaaaaaaaaaaaagaaaagaaacagaggctgaacgctgtcaagtatttcacagccagcaggaaatcggaacttgaacccaggcagtctagccctgggatcctttccccttacccattatccagtgttggctacacaaaactaatgagtacatattttcaactatagtttaagtgggtgacatatttttcactatattttatgtaggtgactttcagtttgggggtattctacttacacaatctattgagctggatattaactgagagcaaacagaaactaatgaactctgaaaaacataaaacatgagcaacatgacgtcactgcaagagacaaaacagcacatagccttcttgtgactgtattttgctgacagtccatgagctgatagcctgaactcagcagtgctgttcccttgggagacacacacacacacacacacacacacacacacacacacacacgagttggtggttttctgccccccacccccaccccaacacacacacgagttggtggttgtgctgcccggagcctccagtccgcgagtgtgaagaacggaccagatgggtccagcagtgctgggtcaaggccaggaggggcagccggaagcgcgcgcatgctctggactcctgcagccgccgaaacgggtgcgcagggggcgcgcgggttgaggggtgaggggcgacgggtgtgaggggcgagagggacgggagcggggtaggggcagccctttcccaggcggtagcggggactgtggtgctgttgcccttttaagctgcggcttgacaggagcagcgcctcctgtcggtggagtctgttacaaggggagcagccgcccaggccgccacacagctccccgcagaggcctcggtgccccttgccattttccagccctactccgactagagttgaggcatcagggagaggcggagctgggagagcgccgccgagaggtcccgcgggtggttgcggccgtgacagcggctcccgacgggctcaccttccgcgcccctcccgccagaggtgagagtaaaatgtccgtgtgagggttcaaggcca

SEQ ID NO: 1885895 - DNA, 4001 bp, Homo sapiens
tgctaaaaaaaaaatgatcattatgtcaatttcattgatcaacaaaagtgatgcctccactgcaaagtcaagttgatagtgcctgggcctctgagttcaagagccttctagacaaagcgctctgagctgaaacatgagcatgcacacatatgcatctctctcggtctcatgagataatctggatacttggttgttatccttgagcattttcctacctcattaatgcacgtgtagccaacacaataattatcatagctaataacggctaaagctgaggactttcctgagccaggcagtggctttaaaaactttaatgttttcacatagactctcattgaataatttctgtttttcagatcaagaaactgagacttactatcacatttgggattaagtttaaaaaaaaaaaaaagaaactgaggcttaaagttgtctagtatttcacagccagcaaatggcaaagttggaaattgaaccaggcagtagagccccaggatcctgtgcctttacccattacctagtgttggctacacaaaactagtgtgtacacaacttcaactatagtttaagctatagtttaagtgggtgacatatttttcactacattttatgtaggtgactttcagtttgggggtattctacttatgcaatctattgaggtggatattaactgagaacaaatagaaactaatgaactctgaaaaacataaaacatgagcaacatgatgtcaccgcaaaacacaaaacagcccacagccttcttgtgactgcattttgctgacagtccacgacctaataatcaacctgaactcagcagtgctctgttcccttgggagacacacacacacacactcgggagaaacacacacactacagttggtggttgtgccgccctgagcctccagtaggcgagtgtgaggaatgtagggactagatgggtcgggcagaaaggtgctgggtcaaggggaggagggggcagccgggagcgcgcgcacgctctggactcgtgcaaccgccaaaacgggtgcgcgccgggttgaggggtgacagggaaggtggcagggttggggcagccctttcccaggcggtagcggggacggtggtgctgttgtcctttttctttttcttttttttttttttttgagacggagtctcgctctgtcccccaggctggagtgcggtggcgcgatctcggctcactgcaagctccgcctcccgggttcacgccattctcctgcctcagcctcccgagtagctgggaccacaggcgcccgccaccgcgcccggctcattttttgtatttttagtagagatggggtttccccgtgttagccgggatggtctcgatctcctgacctcgtgatccgcccgcctcggcctcccaaagtgctgggatgacaggcgggagcccccgcgcccggctaattttttgtatttttagtggggacggggtttccccgtgttagccgggatggtctcgatctcctgacctcgtgatccgcccgcctcggcctcccaaagtgctgggatgacaggcgggagcccccgcgcccggccgctgttgcccttttaagctgaggcttgacaggagccgcccctcctatcggtggcgtcggtcgcaaagggagcagcccccgaggccgccgcgcagctccccgccgaggcctcggtgccccttcccattttccatccgcgctcccacgaaggttgaggcggcggggagaggcgaagccgcgagcgctcggccgggcggtcccgccgggtggtcgcagccatgacagcggctccccttccgcgcccctcccgccggagatgagggaagatgtccctgtcagggttaaggccaagctgaagttgctggcgtctaccttccacaagaaccaggagccgcagccgcggctcacgctccactgcaacagacggtggggcgcgcggcggcggcctcgcagggcagggcgggggcgcagatgggggagtctcgggaccaacggcagcctaacgggtagaggccccgggtccccgccccttcctccctcagctggccccgccccgcccccgggactgcgcgaggcttgggtgggaggaggcggagggcgcgtctctccggctcctggcgcggggctgactcgggggccgctggcccctcttggccgccgtcgccacgcaccgaggtgggagcccgcggcggccggagccctcttgggacccatggtcgccctcagtcagcgggactgctcccgggaccgcgacggggcggggcggggcgctccagcgttgtttgagcccaggcgcggaagggaaaaggcctctgagatgctcgcgtgttttgcctgggcgcggtggcgcacgcctgtaatcccagcactttgggaggccgaggcgggcggatctcctgaggtcaggagttcgagaccagcgtggccaacatggtcaaaccgcgtttctactaaaaactacaaaaattagccgggcgtggtggcaggcgccttagtcccagctacttgggaggcagaggcaggagaatcgtttgaacccgggaggcggaggttgcagtgagcccagattaagccattgcactcaaacctgggggacaagagcgagacttctctcaaaaaaaaaaaaaaagtttttttttcttttcttttttttttttttttgagacagtctcactctgtcgcccaggctggagtgcagtggcgggatctcggctcactgcagcctatgtcccttgacagtccacgggttaaagagattctcctgcctcagcctccccagtagctggattacaggccccgccaccaaggctggctaacttttgtgtttttagtagagagggggtttcaccgtgttggccaggctggtctcgaactcctgacctcaaatgacccacctctgcctcccaaagtgctgggattccaggcgtgagccaccgcgccgggacccaaggcccttaagttttaaggcctcattcttcagtcaggttttccctgttcccgcgtgttcggccaattttttgttgttgttgttttgtttttgtttttgtttttgagtcaattttccagacatctttaattagcaatatgtttaagtagttacaagcctttccttcttttcttgtgacagtttgggttgaatttctatcgtttgcagcctgtcactgtaaggcacaaacatgatcacgcaagatgcgatagtagatttaagccagttgtttttaagtttgtgtttaaggagaaactaacaatgaaaacggcctcgttgacggaggaaaagttggaatgcagcctctggtgctgtttgagcgatccctctccccggggcctggccgcgcgctgctgtgttctggaagggctcattgtacagtcaaggcggcaggtaagagtcccgtacaggtgtcttcgcgcttttcctttcaggcttctgtgtgagctgtttttcccctgtaggatgcgtccctgacctccaccccttcaccctacccaatttgtctttacatgtctgaccatcaaggctctcctgggtcgtattcagttcatgctgatattttcccttcctcccctctttggtcctcactgtttttgctttggtcatgttatgctatattctgtaggcctttttaattttttttttatggtggcaggggaaaatattttataattatgctttgtgctttttatcttccagtcagtaaatgcttggtaaatatttgttttattgagtatatgaccctattctagctatatcgtgcttgaacagaaatcttaactgccttgaaagttaactgctaagaatttgtcaaaagtgcagagctacatcaagaacttgtcatggatagtacaaaaaggtctctaagggcttgaaggaagtctgtaaattgatttcatatgaaagagagcgtaagaagtgaaaatgtaaagcatgactggagagccagagagataaagcaagggtccctttctccagatcctttgtaacagtattatgtgatctcttttagaaat

SEQ ID NO: 1885896 - DNA, 4001 bp, Homo sapiens
ctggcaacatggccatccccacatatcgccacacgtgtagaacatcaaggcgacctgcatttgcatattaaaaggctagggtgggagagccaggtttttcgtgggctatgtgaatgacatgcctggtcaaaccaatcccctgagccctatgcaaatctgacaccgcctcttccagtctcctcatataactgcctgttaaccccagcactgggggtttcctctctaggctttggagcccacttccatgtgtctctacaggggagcttcttcctttcttcacccttctttcttgcctattaaattctccaccccttaaaaccactccatgtgtgtctgtgtcattttacccaattcggcatgagacgagagccctggtgcttcttccactcattggagctgtatcattttaagtgtgtttcacgtatttatctcctccaattagactgcaaacttcttaaatacttgactcatttggtaaatattcataactgcaaaatcttaaagctgtatgattctagacgctaaaactgatatgtagactgtcactgctctagtcacccctactattagagttgagaatgtcaaaataaaattgaatgcttactatgtacctggcataattttaagttccctacatatattaacttacttaattcatgcctttggcatcatccctcatgactttctttctcttgtatcccatatcgaatttgattctattggctctatcttcaaaatagagctggaatcctcttacttctcaccaaattcaccatgttgattctaggctccgccatctctctactggaacactgtaacagcttcctaataggtggattctcaacactgcaatccttttaaaattttaagtcacacccttcaaaagtctgcaattacctacaagaccctatataatccttcccctccatcaccttaacctgctctccactactctctgctttgctcaatctgctccagcaacacggatctgccttaatcttccacaaacacacaacgcacctagagccttcgatttttttttcttgtctggagcacaccccaatcatacacatagcgaactctccttatttaaattggctcaactctcatcttaccaataaggcctacatagacacgatttaattctgcaatttgcctctccacctctctcctgactctcccccaccgcaccccgcccctttccaatagcacttttcactcttcaacagactatttacctttaagatatgtattgtctgttctctccatccccatttaagctctatgcccggaatgccgggtttttgttttatttacggttgtatccacagagtctaaaacagtgcctggtacacgaaaggcactcaatacatacttggcaaataaacttagaagctagattttctttctgcaaggccattgctctttggtgaagagcctggcctggccttgtcaaatacacaagcttgaccaagagccaaagccacagagggcctagaggtggggggggctagccccagatttaaaaattaccacagcccctggggatctgagtttcacatctggacacacaggtttggaggacagaggagatgtaagttaaaaagcagaagtgtacagttgtttctgttctgtggggtgaggaaggacaaatttcttctgcgcttgcacgtccgcaactgtgtcaatttgcagcaattgggacgctaaatcccctcttaccaaaacaaatcctgcgccactgggcttgggctctgcaacgcggaccttgcccttcccccggcagcttcagtgccctcacttaggtggttaggccgtgcctaaacctcattctttcctgggccgagatgtccctgccacagggtcaaggtgccaaggtgccgcaccctccgcgctcaggtgtcccgcaggcagccgcggggctcgcagcgccgatccgcggacaggcggcggagcgaacacccgggcgaggccccgcggtgcgtcacgcgagctgcggcgcgacctcctggctcccgcccgcgctcgccgcacgcacgcgcactgcgcccagcatgagggtcgcggctctgatcaggtaatgcggtcctggagccgcctccttcctcctaggccaggctctcgtcccttccagccgccgctagcgccgaaagagtgggtgtctccgtctgagtcgcgcgttgggggttccgcggctcctccgagccacaggaagaggcggagccttcgctgttgccggcccgcatgtgcctcggcccctggctggcgcgcctcctccctgtctgtcgctctctggtcttctagcccttaaacttggattcccattggattcaagtgggaaattaaaaaaagtaccgacgcctgggccccaccgccagagggattggtttaattacttctgtgcgacccggcgtctgatttttttttttcaagctctaatgagccgtgaagtttggagccactaccttattccatcaactcagttaataaccctcgccctttccccctcgctttcttcgtcctcttctgtagttcctttggtcagctgggtccgccgcagcctggcttcctccctagttgtaagtgtttccgcccatcccaagaagtccacccctccctcatcttcacagatgtggattgcttatggcatgtgtgtgtttctgcctttgggcactcaagtacagagatctctcttcgtggtagagaccgaattgtactagtcttatgctagatccagttgctgttgcttcggactctcatcattgctttagagtgaccttaccctatactccgtattccaaaaggagtttgatgtctgtagtaaccaaatcataaatttaagtgtctaaataagtcctgtgactgacaaaccaaaaacaaacctgcttaaatatttccatactcaatctataaactgaggcagaagggaacacactagcaacattaaaaagttagactacttaaatacttgtttcatgagattttgccctgtagagtgtcttagatacagtgcaacgatgtgcttgcttttgtaatccaattgaagatttcataaacgttttcgttaagtcccttaggtaattgatactggctgtaagttttgacctattaaggacttgatatgagatttcagacctactgtagtgtctggaatattccggttccctttccttcaatgtcatttttaggagactagaccataatgtcacaataattattgttgttcagtaaatgtcctctgtaacataaatgattaagctttaaccattgtgtcttattttaagaattaaaagtaccccaggaagtgaataattcaaatttacatcgcttgccaaaagtttaacgattaaagtaaagcacaacaaacaaagacttagaagtattggaggggaggagagaagattggtagagtcagttacactaaataacctgtaatgtgcatatgttgctttataataaaaaaagtttgctaaaaaagcaatgttggaaaattcttgctgaagcgtaagagctgtaaggacatatgctgtaagtatgaatacgtaagcatttacctgtatgcttatgatacagatgcctatgtattctatatatatgcattatatataattatgtattataagtgaataagtgaaactgggattcttacatatctttctaagaagattattttccttttttaaattttttttttattatactttaagttctgggttacatgtgcagaacgtgcagtttttttacataggtatacatgtgccacggtggtttgctgcacccatcaacccatcacctacattaggtatttctcctaatgttatccctcccctaacccccaaacccccacaggccccagtgtgtgatgtgcccctccctgtgtccatatgctctcatagaacattatttttctaataaataaatgagtctttgaattttatagttgaatgttattttgaggattatccaggcagaccattcattaatttgcaatgaagtatgca

SEQ ID NO: 1885897 - DNA, 4001 bp, Homo sapiens
agttaagtactcaataaaggctatatatcaggagggcttacccttaagacatgagcccacatcttctgcttaatgtgctctaactttgactaattcagcctttaggtttatttaaatggctgctgaagcactgtatcacttaaattaggctcataagcctttttttttttctaaaacagcaattgaatgagttcaggatatgccaccccaaaatatgctgctttcatatagcgatcattttgagttaaaggcacttgaaagcagcaaatgcagggagaggttttgccagaactcctcttatctgcctaaaaacagattttccaaaggaacccaagtgtcataaatctcttcccctggagtttcattaaccagggaatattgactattctcccagaaaaggaaactacaagtcaacaccacactctgacaaattttgttaaaagctatcacatttcctatctattcttctaaggatccattcatctttcctaaaaatcatttcctgttctaagcggcctacatcccctcccccttcccctattaagacagtccctaaactctcaaatctcaccgcttggggggtattcacttttttccctgtgatgccctcaagcactaatattaaaaattcataaatttctatacattttcttctgtcaatccttctgttgttagtttattttatagacccagctattgaaccttggagagtaaaaggaaagtctatctggccgggtgtggtggctcgcacccgtaatcccagcactttgggaggtcaaggcgggtggatcacttaatgaccggtcaggagtgtgagaccagcctggccaacatggcaaaacgctctaccaaaaatacaaaaaaatttagccgggcgtggtggcggacacctataatcccagctacttgagaggctgaggtaggagaatcccttgaaccccgggggcagaggttgcagtaagccgagatcatgtcactgcactccagcctgggcgacagagcaagactcttaaaaaaaaaaaatctatcttcccctacacaatataggtgcttcaaaataaaattttttaaaaggtctgaaaccgaaaaggtacaaccagatgaacatcttttaataaagaacttaccacccgtcacagaaagggtctcccacatggccgcttcttttttatacaaggtgaagacaatggtgtcattcccaatctttgctttgctgctctcatcgtctatgggagcataaagaaatgcctcaaataaaaatggaggaaagttgacctatgcagaagggtgaaaacagaaactaagttagttacacaaattaagcacgcgtattaagaaacacgtgaaaaaggtaaaataactttctaaaaggcccactaaatttatgccaggtagtgaaagattagcaaggcatatgaggaagccctggataaaagtagtctctgatctgattatctgtctacagatggtgtgttacctgtatgggattcatttttttaataggattaaaaatttaggacgtttatcggcaaagatgagcctgttgctcgtgcccagctgcgctcttgcagaagcttcggaccacacccccggagaccggcaggcaagacttgcattcttaccttcagatagttttccgtgcagaacacgtccgtgtctctgacgcacacgcctttgaggggcagagacagaaagaccgcagtcttcgtctgctgccagctgtaatcgctaacctgaagaggcattccggtagcaacgggagcggatagcgcggctggttgcttcttgcgcctgcttggttgctagggaagctggggttaccatgcgccagcccttccgggtcaggccggccgggagcccggcgttcccagcgtgctccggcgccagcacctcgcggactccatgcgtgactatccaggcgcccagaccagagagtgatgccgattcttggggttaccttacgatctgagcgaatgttcaaagaagtagacccataccctctgcttgagaaaaaaaaaaaaaaaaaaaagcactctgtgggtcgggcgcgctagctcacgcctgtaatcccagaactttgggaggccgaggcgggcggatcacctgaggttgggagttcgagaccagcctgaccaacatggagaaaccccgcctctactaaaaatacaaaattagccgggcgtggtggtgcatgcctgtaatctcagctactctggaggctgaggctgaggcagcagaatcgcttgaacccgggaggcaggggtcgcagtgagccgaaatcgcgccattgcactccagcctgggaaacaagagcgaaactccgtctcaaaaaaaaaaaaagaaaagaaaaagaaagaaagaaaaaaaaaagcacttccagcctcataatgcgataatgctaaggagggctgtgggcataaggctcgggaaagcagcccatgaggagcaggtgcaatgcccatacgcccttggtgcagtgtcttgtctgtttattctgactgaggctattaagagttagcgctagttgttctgttttgcaaatttcttggtcatacagactgtgaacaaatgtgaacctgaaagagccaatccgtcaacatccagagcggctaactgggtctaaatttaaaatagagacacgtggtcatttacctactagaggtcacacatggactctgcgttctccccaaacccacacctctgttgagtgttgggtcttatagggctcacctgcctcaaccaatcagggctcagctgtatcaaccaatcagaactaagtgcggttcaatcgttcatttgtataaacgaacctgactgggaacctgggcagaaacttttgctgtaaaacccaaaccctccctttgttctctggaatgcacctttgttttacacctaaggcttcaactccccagtttgcaaactgttccctgaaatagttgctttgctccaaattcctcttcagaaaacgtttgttcacaacacataccaggagcttgtctaaaactattgtatcctgcaaatcctattaactgtaaggccgccaaaagcacctatataggttttgctccaaagtttgaaaactgaagagaaaccaccctatgattcatctgacaaatgctttgctacaaatctggaatagggtaaattggaattacactgacacattccgtaagtgcttaagtagaatctgaacttaagtgctgcagagaagcttgaagattatgtagtcttattctacatatttaaggaatctgaaacctatacacaaaccattttcgtatagattagtagcagaccatcattaaaatcctgatctcttaactcccattacaatgtttttgctccaggctgctttctgcacacccagtttataaattgctgggataaaacagtgaatgtatacaatatttagatacacacaaattacttcccacttggggcttttgattttcaacttttttttaactttaaaaaaaaaacagagaaactgggcctttgtggaaatctgaaagtataatacaaaaccctggattttaaacttatttacttttggaagcctttctttcacacaaatttcaatgctccttagaaattcattgaggaaagataaggagcaacagacttgaagagaaaaccatcttttccccaaaatagggcacactcactaccttagcagttcatcatctcaagcttctggtaactttgaatactgggagtcatcctagacttgctttcccttgtccctttaagctgagaaacccacgaatcccatggacttttttaaaaaaatttcttttgtcattttcccccttttgttctattcctacttttaccatattgtttccaaatcttacattatcttctaaagacagggtttatgcatttctttcatataaaatgttaaagtccaggttctcccactatacagaaatatgtgagattttatatgcatgaaagataataatgtaaaggatactttgtgctgtcggggatttcaggaa

SEQ ID NO: 1885898 - DNA, 4001 bp, Homo sapiens
ctcagcctgcttcttcacctcgccgactagtccttcacctttaggatggtaaatagactttatttcacatgcccatcccaatcactttgctatggctacctaaactacgaaggggtttgaagaggaggcttagcacgagggagcgctatggggttacagcagtatcggtcagaagcacacacaccacgcgttggctatctctgcctttcccagatgctgggctttgaccacttacatttccttcaccccttgatgacacattcccacttgtaatgtttatctccatttgtcatcttgagccaccttcaagtgtcatctctaatattaattatgttgtgaggccttttcttaatccctcatttctcaatcctctagttctcccgacattagagtctacttttttctcatgtttgtctcattttcctctgctcccccttaaatcctcctctacagctccagcctgggcaacaagagggaaattccgtcctcccccaacaaaaaaaacctcctctacagctgggctggtgccctactcataaatctccacgttctgacatacttggcaaaatatcttgaacttaacagacgtttgataaatatctgatgaattaaacaggattgcataccacagactctaaagacgttatgttaaggctacagacattttatacgtaaagccatttcgaaaacaaaaaattcaagttctggtttaaaaaacaacatgacataatatatagaagaatgctactcactaggtaaccgtgttcatttcaaatgccttatagcaaagcaggcttccctaacatcacagaaaacttttaaaggaaagacttgcttcttagcaaacaccactctcagctgcccacagcttcactccactgaggcatacagagacacacctcccttatttatcaaaataagccatttaaaaagtattcttaccacggtcaacatgagccaaaacacaaatattcctgatgttggcagtgtttttctggagttgaatcatcttatccaaactgttgagcaccatgattatttcctgtgtcaaaaaattaaatatgtattacaaatggcccagaggctaaaggttggggcaaaagaaaaaaataataataaacgctgggaggtggcaaggcttctcaaaccccttaaaccaagaacccagtgaatgtttattgatgagatagaccaccaaggcctaagtccagttcgagcactaaagtcagtatcctaccacgattatacttaaggagtttgctcatccttccggatccgaaggctgcgatgaatcactcagctcgtgggggctgggtgcacagtgacaccagtaaccctgccggtggaggagtactccagtaaacatctccaggccaatgaccacgtacaggaagggttgcatccaggagggagagaaaatgctgaagaagatgctccctttctctcttcagtcttccctcaagtccctcattctgacattctcgctcgtcctcgcgcgaggtcaaatacccagctttattcctgcccatagagccccaacaaagttttgggtcacgtgcttactatccaagcaggtgcactgtcggtctttcattcctttctaaataaaaaggaaaaacctctacactacatgcccttcatttctgcagggtcccggattcgttctatttgaggatcccgggtctacacaggcgaccgcctcggccccagactggaagcgacactccagggaccaaagcttccagcccgcgctcggccccagcccctgtttccgcctcagagccgcagcgagcagggtcctgcggcaccgcccagagactggcctaggaggttccagcccccagcgccagcacacactcaccggctgcagcagccccaccagccctgctccttctcccgggtcccggccacaccaagagcttcggaaacgccgagaactctgcgggtccagaacgcccgcgcggacgcttctcttacggcgccggaagccggcgccgagtctgtcaccgggcatccctctgttgccttgacgacggcgggcgctgtaagagtggagaagctgcaggtgctgaggcgcggtgaaagaaaccctgggagccaagagcacgaggagctggtgtctgtgtcacatttgtacttgcgggtaagaaaccgctggtgtagcggcgggccagggcttgggagccgacctagggcctaggtgcacggagcgggctcctcgggaaccctgagagtggccgtcccccggagatgaagggacgagggcgcagcgacttccgcacttatcccgccccacgaatactcgctccgcacccgccggctacccggggataaaacgtttgttcgtagcccctgagactcccaatcaaggatgcaaagtaaaatgccacccgggccaggtaaataatatatgtgaagcagcgacgggatataacgctggtgagtagtgggatgtgatccgactgggagagtgcatttccaccccataatcccccaccacaaagatgagaaagaacagtgctcaaggccctgagtctgcaacccatatcacattttctttcatctgcacctttctatcctcccagccagaccatattcccattcccgtccaggcagcagttctttgggatccgcctgactgaaaggcagtacagtagtccccaccctgaaacctagaatccaactgtgagtcctgcctaacaaccttccatcacctatgaacacagtcttctccttacttagcttcagctgacccagggattagatcattatttgctaaataaatatgaacgtgtcaatccctttgtatttgtaatcctcttcaaagaaaacaccttcatgttgatggaaagcagtttttttgatagtctcataataaacacagtttgtaattagacgtagattaaaatatcaacaaattaactttgggtgtatgaatctgcagactggggtgcaggagaaaatttttactttttttctaattcatattcaacgtaagttcctttaactgttaggaaattcagtcttcattatgttgagggctacccttagaatggtgtgattttactttttgtttgtttgtttttggttgtgtttttttttgttttttaagggttttgtctttattttctgataatgcaataaataaatacacatgaggtgtcataaaaatttgagcaaaaatatctataatattgtaaaacgccttcataattctatcttccacagataacaaatgttctttaagacttgttttacatatgcattgatttttttcttttattttcttttttttttttttgagacagagtcttgctctgttgccaggctggagtgcagtggcacaatctcggctcactgcaatctctgcctcctgggttcaagcaattatcctgcctcagcctctcgagtagctgggattacaggcacgcgccaccgcacccaactaatttttgtatttttagtagagacggggtttcaccatgttggcctctatctcctgacctcatgatctgcctgcttcggcctcccaaagtactgggattacagtcatgaaccactgcacccagcctgcatagatttttttttttaacaaaaaaggagaatattctgagcatactattctttttttttattcctttgaaggtttttttttttattattattatactttaagttctagggtaaatgtgcacaatgtgcaggtttgttacataggtatacatgtgccatgttggtttgctgcacccattaactcatcatttacattaggtatttctcctaatgctatccattcccctgcccccaccccatgacaggcccttgtgtgtgatgttccccgccctgtgtccaagtgttctcattgttcaattcccacctatgagtgacagcatgcagtatttggttttctgcctttgtgatagttttctcaggatgatggtttccagcttcatccatgtcccttcaaaggacatgaactcatccttttttatggctgcata

SEQ ID NO: 1885899 - DNA, 4001 bp, Homo sapiens
gggagttagatccgctgggatttttgggtagctaggtatttgccgcctgagtccttcatgacacaagaatcaagccgacctattcagccttaggaggagggagagactctgacacatgctacaccacagatggaccttgaggacgttgtgctgagtgaaagaagccgggcacaaaaggacacttctctgaagtacctagagtagtcaaattcatagagacaaaaagtagaatggtggtcgccaggggctagagagaggaggggagaattagtgcttaatgggttcagagtttcagttggatggtggtggtggttgtacgacaatgtgacttatttaatgccactgtgcagtacacttaaaatgcttaaagtagcaaaataatcctaactttgtagggggaggtggtaagcagaccaacctctcccagctttgatcattccttgctctcttttggacacggtgatttctactcctttgattgtgttgcctgatgtgtgacagaccgtcctcttacacctgctcagggacagaacaaacacagctctgcctacctgtacttctcgaactatattaagctctcattgttgctttaacacaagaaaatatggatatgtacctgttcctccagacatgagtattggcgtcacttatagtaaacttaaatctggcagctctgttcctaataacttttgatttcactatagcattgaaatggcatcttttttaaagatgcttaaattaactgttaggaactcaaatttaagttaaagtttaaacacaagtgttgcaatcaaaggtaaccattcaacccaggcggccctgggaggaagagagactgcatctgcacggctgggttggcacaagcacggcagggttggcgcgagcgcagctagcagcagcagctgtgtttcagtttgggtggcaggtttctttcggaaccgacagtaagaggtattccgaaatcttaaatgggggtgaggggaggattgtttaccaattgtggttttgtttgttttgttttgttttgtttttgtgacagggtctcactctctcacccaggctggagtatagtggtgggtccatggctcactgcctcaaactcctggcctcaagtgatcttcctgcctcagcctcccaagtagctgagcccacatgcatacgccaccacacccagttaatttgtttttattttttgtagagacagggtctcaccatattgccaggtggtttcaaactcctagcctcaaacaatcctcccgcctctgcctcccagagtgctggaattacaggcattagccaccgtgcccagccttatcatcactttcaatagcaaaccaaagaagctgattctaactaatttaagcagaaaagaaaatgttttggagaatttgtcacaggattaatgggaaagttggagaactaggcttagaaaagagttaggaagccgccaccaccatgagtaaattcttattttcactgtgtcttcgtgtcatttccccaaggttcagcactcctctctggtggaaggaagtgaatgtctaactctagatcacatgcttatgccccagcttgctaaggaatggggcgagggactctctgccacaccttcagcctccacaacccataaaggatacctcctgacccaacaggaagggtattcagcaaaagcaactcacattcactccatgtgcacagcgttttctttgatctgtttctgaaccttcagataccccatctgatcactaggaagaccacgtgggagagtggtcaggtcagcatggtgaatcaatcatctctcctggaaaagcaagtccccatgcaggtccatctatgggtggctccaaagcatcttcccggcacccagcaaacagccagttcattcatccgctggggacctacaatcctgtgagctagggctgtctgtgcacacgtctgtctcaaatggcagtagcacttagtgttaccctaggaggcagtttgttctggcctttcagggacagaactcagagtgaaaccttgactatgtgtgaccctgtcagtaggtctttgatattcctctgacctaaactggctgctgacagcaatgaaaataaactctggcccacattccgagaactgcctttgtcttccttatccccaaggagtcagggagtgccgcagtgagacagaacagagaaatgaaaagcatgaactggaagtatccacgcgtgtggcggcataaacaccacactcaggacagcggcctgctagtggggggaagggctcagggaggggtgcacagggggcttcagcgttaccaactgtcttgttttctttatgaaaaatggacctgaatccagtttgcttgttcagctattcctctaacacctgttcttcaaatgcatggaaaccttagtccgcagaccctctttattttcacctaatagattattcacctcagatactttttcctctgccttggattcacaccttctccacccccacagccaaccagggtctcacaatcgatgttgacatttttgtatttgtgctatagtctgtatccacagatggttgagtattttgtattttaacattttacatgaatgttatcatgctgtatatgtccttttgaaactaagcttttactcttgttcttttctggagatttacctgtgttgacaagtgaagatctagttccttctcaccaccgtatggtattttgttatctaaagaaacgatacttggttttaaaacatatctgaaatagcaaacaaagcaaagtgtcaacatttgttaaaattatgtggtaggtacatcagcattcattatatgacttacagatgtttatgtatgtttgaaagttttcaaaatctaaaagaagaggggagacgacccctagcatgggggtcaggcaggtgacatctcagcactagctgggctggattgagactctgcttctgcaactagtcagactgagattaaaagtcaactttgtgggcttggcctcctcttgtttgcttttcgtgggaatctgcctccctggggaaaggcctgagagccttgaccttgggctgaagagtgtttatgcagctgcatgatttgtggaggtggtcagaataggctggacagaatttgctgtgggccaggccattttaaaaaaagaaattggcaagagaccattttacacaatggctgtgatacgtaatgttaaaaaaatattcacaatatacctgagttataaatagtccaaagataaatattgatcacaacactggctgggccaacctttgacctcctcagcactctacaaacttgggttaattgaaggcgatgcctcttctgttatgcttactggatacccccatgggatgccaggtggcctctggttctctttcttctgtatttggggctttcagaaaagtgagacttttcagaagtaagatcttttgacccatggcctgtgtttttataaaaccattgatcaattctgccatcaagcaaaaggtctgtattaggtgaaataaaacactcatgaggactaaatgaaatcgcagatatgaaagtcagcaattcccaaagtgaccatgagccccattctctttcctccctcctcctgtggaagggctccccaggtccttcccacccggattcatccagcccgtgattttcatgtcaccaggcctccactgcctccaggttggagacagggctctctccctggcagctgctggagagcgagactgttcctgagccgcccattaaacgtgtctcctgcagcagtggctacactgacgtgtccttctctccacccaggctatgacttctgccaggtcctgcagtggtttgccgagagggtggacaggatcatcctgctctttgacgctcacaagctggacatctcagatgaattctcagaggccatcaaggccttccggggccaggacgacaagatccgtgtcgtgctgaacaaggccgaccaagtggacacgcagcagctgatgcgggtctacggggccctc

SEQ ID NO: 1885900 - DNA, 4001 bp, Homo sapiens
tggtttcttcttctccattgccattgccttaatttaggcttgtgttctcgtttaattaattcataaaatacttacgtattaggcattatgccaaatgttggagatacaattgtgagtaagattgtgtccttagggacttacattccacccttttcctgacttctttcttgcctccttccaatccacatttttttttttttttggtcttgtcactttgatgcccaggctggagtgtagtggccagaacgtggctcactgcagcctcaactgcctcagcttcctgagtagctgggaccacaggaccacaggtgcacaccactatgcctggatatatatatttttttgtaaagatggggtctcaccatgttggccaggttggtctcgaactcctgggctcaagcgatcctcccgctttggcctcccacagtgccgggattacagacgttgagccaccgtgtccggccctgatccacctttataaatggctgtctgtagatcatggcctctcacattttaactgggctgtagaatatgtattgaaggatcatctttataaaatgtttatttgtagactctgaaaagataacaccagaaagggggaacaatggttaccactagaaagaacggagcggagcagctgatcgttgtatctaccttttttgttttttttttttttttgagacgggtctaactgtcgcccaggctggagagccgtggcgcgatctcggctcactgttgcaacctccgcctcccgggttcaagcgattctcctgcctcagcctccctagtagtggggattacaggcgcccgccaccacgcccaggtgatttttgtatttttagtagaggtggggttttaccatgttggccaggctggtctcgaactcctgacagcaaatgatccgcccatctcggcctcccaaaatgctgggattacaggcgtgagccaccgcgtcctgcccacgtatctacctttttatcacatgaatgttgtaccaagttcgcgtattacatatttgaaaataaattgcgaaaataacaaaaacaaaatccatctactggctagctctttaaaatcctgcgggggagcccagtggcccaacggcgaagtttagcccatcttgccctttctggtcagtgtacctgttccatttatctctgactgcgccactcagtcaggtgagggaccactggagttttctaccggaaatgcacttcagcaaatgccacttgctctctccaacttcagtttcaaccagcgcctacctcaggaagccttccttcatcctccggcccccgccgccgctaaggttatccttttacattcaacctcataatgctgctttttgtggcagtcatcacagtgtcgaaatttgtttacatgtccatctttgctacttgatggagggcaaagatacacctcatacctagcatagaccccaggaggtccgaaattgttctgcgaaagaaaaaaaaatcaatgtgctggcctcaaaggggctcacaggaagggaaaagcctcgaagactaaggctctcttcgattccttcgtgactaactcgaggcaaacatgccaggaacgcggctctccccacccgctcctgcatctgcgcccggggatcgccggattccagaggggtcccctccacctagcgcgcgacgactccctctggggtcccggaagcccggccaccgaccccacaggcgggcgtggcctcagagccctcttctgagcacggcgtgggtatccgcaggcggccatggacggtgatcacagtgaccagagggacagcgcaccctccggtcgaagcggggtaggcgttggcaggggaggggcgacgaagactggcgaggttcaggcgccagccaaagaaccactctgctaacttcctggcacttacgtttcctacccggggcccagagtcgggcggcggtcttccagcaccacgaactccagtactggtctgcgttgtagggagctggaagcccgacccagcactcctcagccccctgtgcccctccctctgctctttccgcccctccctccgcccccctccgcccccccctccgcctctccctcagccccgcagcgccaccgaccgcgttccccgcccacttcttacccgcgcgcgtcgccgccgccgcctgagggggcgtggcctcggctcggcgcacagtcagccacggtcccatcctgctccgcgccggtcaacgagagcaaacccagtgactcacctccgccgtgctaactcctcgctagctctccctctcacacacgctcacacccggctcgagatggcggcggcggcggcggcggcgggggactcggactcctggggtgaggagaagttgctggggcagggcccgggccggcgccggccccacgcagtggcaggcactaacacggctcgctttcttccgtagacgccgacgctttctccgtggaagacccagtgcggaaggtggggggcggcggcactgccggcggggaccgctgggaaggcgaggacgaggacgaggacgtcaaggtgggtgcgggctagggcgccgggcagcgcggaagcgggctggcgctgttgccggccgactctgggccccgggtcgctgccggggcctgcgggccgtgggtccaggcgcgagcatagggcctggcggtgctctcttcccctccgcttgccggccatgtgtgggccgaagactggcagcgtggcctcccggactccctcgccggttgagagtctgctctccggcgtggatcccacccgccggctggcgacgaaaggtgacagcatcggccgggtcggcccacgtgcaagcttcgcggtccggagcctctcgcaggaatgagaccgggaagttgggaattgagccttgtagcttatccatatggaaagccttgagactcgcctgtcttttcgagctcaagtcagcccagggccagtaactcatttatgaccctgaggtctacttatacagtttgttcgagggattagatgagtgaaatattgtagttgaatttcaacctttttttcccacacgagacagctagaaacagtaaagggaaataacttttggctctcccttcccccaccctgtggtaaaaagaatgaactgaccactgagatagcccgcagttagtggacagaaacccaggtagttcacaccgtgacctgagaaatggagagacgacagttactcaactacacacatacgacacctaaggaaatattgaagatttggtggtggttgtagatgacgggcccgtggttttttgttgttgttgttgttttgtctgtgccttgtagataatcatttttacctcagtcgtttgattttgaaaactccgaagggttcattatacagctgtaagtgacatttacttctacatggtttttttttttttttacagtagttacagaagtctcaaatccaaaatgttaagactcttattaacaaagttctcaaaatcttgttatatttgtgcagataaagttttgtgtgaaatggaaaatgatttttttttgtggttttgcctaatttagtgaatttctcctaatttataaacacaaacggagaaccctataaatcctgcctgggctgaaaagtttaagctagataatcactatgaacttaataggaatgttgttttgagtttttctgttctctccccagtccgatgaggttggatgtgtggatgtccgatttactgacagcctgaggttcaagaatgttgtgagctttgcacacattgaagttaataaatcgactggttattgtttgaagacactcagatgctttatttacatgttgtagaaacatgggactagattttgttaccagccgcattacaagatattagttacccctctacattgtagcagattttcagttttgagccttgggttcatattggtcctttcatttttttccatgcatataggaagtggcagttaagacatctgttatgaaatttgggaataaattaacaaatgcagagaaaag

SEQ ID NO: 1885901 - DNA, 4001 bp, Homo sapiens
ttgccttaatttaggcttgtgttctcgtttaattaattcataaaatacttacgtattaggcattatgccaaatgttggagatacaattgtgagtaagattgtgtccttagggacttacattccacccttttcctgacttctttcttgcctccttccaatccacatttttttttttttttggtcttgtcactttgatgcccaggctggagtgtagtggccagaacgtggctcactgcagcctcaactgcctcagcttcctgagtagctgggaccacaggaccacaggtgcacaccactatgcctggatatatatatttttttgtaaagatggggtctcaccatgttggccaggttggtctcgaactcctgggctcaagcgatcctcccgctttggcctcccacagtgccgggattacagacgttgagccaccgtgtccggccctgatccacctttataaatggctgtctgtagatcatggcctctcacattttaactgggctgtagaatatgtattgaaggatcatctttataaaatgtttatttgtagactctgaaaagataacaccagaaagggggaacaatggttaccactagaaagaacggagcggagcagctgatcgttgtatctaccttttttgttttttttttttttttgagacgggtctaactgtcgcccaggctggagagccgtggcgcgatctcggctcactgttgcaacctccgcctcccgggttcaagcgattctcctgcctcagcctccctagtagtggggattacaggcgcccgccaccacgcccaggtgatttttgtatttttagtagaggtggggttttaccatgttggccaggctggtctcgaactcctgacagcaaatgatccgcccatctcggcctcccaaaatgctgggattacaggcgtgagccaccgcgtcctgcccacgtatctacctttttatcacatgaatgttgtaccaagttcgcgtattacatatttgaaaataaattgcgaaaataacaaaaacaaaatccatctactggctagctctttaaaatcctgcgggggagcccagtggcccaacggcgaagtttagcccatcttgccctttctggtcagtgtacctgttccatttatctctgactgcgccactcagtcaggtgagggaccactggagttttctaccggaaatgcacttcagcaaatgccacttgctctctccaacttcagtttcaaccagcgcctacctcaggaagccttccttcatcctccggcccccgccgccgctaaggttatccttttacattcaacctcataatgctgctttttgtggcagtcatcacagtgtcgaaatttgtttacatgtccatctttgctacttgatggagggcaaagatacacctcatacctagcatagaccccaggaggtccgaaattgttctgcgaaagaaaaaaaaatcaatgtgctggcctcaaaggggctcacaggaagggaaaagcctcgaagactaaggctctcttcgattccttcgtgactaactcgaggcaaacatgccaggaacgcggctctccccacccgctcctgcatctgcgcccggggatcgccggattccagaggggtcccctccacctagcgcgcgacgactccctctggggtcccggaagcccggccaccgaccccacaggcgggcgtggcctcagagccctcttctgagcacggcgtgggtatccgcaggcggccatggacggtgatcacagtgaccagagggacagcgcaccctccggtcgaagcggggtaggcgttggcaggggaggggcgacgaagactggcgaggttcaggcgccagccaaagaaccactctgctaacttcctggcacttacgtttcctacccggggcccagagtcgggcggcggtcttccagcaccacgaactccagtactggtctgcgttgtagggagctggaagcccgacccagcactcctcagccccctgtgcccctccctctgctctttccgcccctccctccgcccccctccgcccccccctccgcctctccctcagccccgcagcgccaccgaccgcgttccccgcccacttcttacccgcgcgcgtcgccgccgccgcctgagggggcgtggcctcggctcggcgcacagtcagccacggtcccatcctgctccgcgccggtcaacgagagcaaacccagtgactcacctccgccgtgctaactcctcgctagctctccctctcacacacgctcacacccggctcgagatggcggcggcggcggcggcggcgggggactcggactcctggggtgaggagaagttgctggggcagggcccgggccggcgccggccccacgcagtggcaggcactaacacggctcgctttcttccgtagacgccgacgctttctccgtggaagacccagtgcggaaggtggggggcggcggcactgccggcggggaccgctgggaaggcgaggacgaggacgaggacgtcaaggtgggtgcgggctagggcgccgggcagcgcggaagcgggctggcgctgttgccggccgactctgggccccgggtcgctgccggggcctgcgggccgtgggtccaggcgcgagcatagggcctggcggtgctctcttcccctccgcttgccggccatgtgtgggccgaagactggcagcgtggcctcccggactccctcgccggttgagagtctgctctccggcgtggatcccacccgccggctggcgacgaaaggtgacagcatcggccgggtcggcccacgtgcaagcttcgcggtccggagcctctcgcaggaatgagaccgggaagttgggaattgagccttgtagcttatccatatggaaagccttgagactcgcctgtcttttcgagctcaagtcagcccagggccagtaactcatttatgaccctgaggtctacttatacagtttgttcgagggattagatgagtgaaatattgtagttgaatttcaacctttttttcccacacgagacagctagaaacagtaaagggaaataacttttggctctcccttcccccaccctgtggtaaaaagaatgaactgaccactgagatagcccgcagttagtggacagaaacccaggtagttcacaccgtgacctgagaaatggagagacgacagttactcaactacacacatacgacacctaaggaaatattgaagatttggtggtggttgtagatgacgggcccgtggttttttgttgttgttgttgttttgtctgtgccttgtagataatcatttttacctcagtcgtttgattttgaaaactccgaagggttcattatacagctgtaagtgacatttacttctacatggtttttttttttttttacagtagttacagaagtctcaaatccaaaatgttaagactcttattaacaaagttctcaaaatcttgttatatttgtgcagataaagttttgtgtgaaatggaaaatgatttttttttgtggttttgcctaatttagtgaatttctcctaatttataaacacaaacggagaaccctataaatcctgcctgggctgaaaagtttaagctagataatcactatgaacttaataggaatgttgttttgagtttttctgttctctccccagtccgatgaggttggatgtgtggatgtccgatttactgacagcctgaggttcaagaatgttgtgagctttgcacacattgaagttaataaatcgactggttattgtttgaagacactcagatgctttatttacatgttgtagaaacatgggactagattttgttaccagccgcattacaagatattagttacccctctacattgtagcagattttcagttttgagccttgggttcatattggtcctttcatttttttccatgcatataggaagtggcagttaagacatctgttatgaaatttgggaataaattaacaaatgcagagaaaagattagagatattaggaaagaagt

SEQ ID NO: 1885902 - DNA, 4001 bp, Homo sapiens
ctgtgagcaaacactctgaccttattagcccaagagaacatttacatcctctctgtccaaggtcagatgacaagatatcctttattaacttgacaaaacagcatattgtactcaagttaccgactcttgtaatcactcagaaaggaaatagtggtgggtgtggaatcctggggaaggcagggtaagaagtctcttttcacttgatcacatatttttaacgtacacgaaattacagtttttgtgtttgtttttcacaatatcataagcactgccccccaagtttttttaaaactccctaaagactctatcttatctgagcacgcttgcaaatgaattcatactattacattgtagagcacagccgtggttctgtgattttaggaacagaggtccttacagaccagaagacctcatattattcttgctaaaataaatccttaagatttcccaatagctagcttagtaattgctggtaactttccaaagacatcactgataaggagcagcttctgttagatgattggaaatattgccctggttttcaaaactgtgtgtagaaggcactgaggccaggtttggcagtaaccacataagcggagtcaagaaacatatcctaggaggagacacagtatctgggtcattgtttccacagctgtcagtctatcccagggaacagaactgaagacatttcatcctggacacaggcaggcagctgtgttactgcacaagagtggacagacgtggagccagcacattcctaactttgaattctgatcatctctgagattgtgtagccctcagttctcaaccctggttgtacattaagggggggaaaaagccagtactcaggacttattacagactgattaaagaaaagaatctgagtctcccccctctggagaatctgagagagaaagctctctgttcaattttcgtagtttggatgacctggaaagcctctatggaggcagagagtgggttctatgacctctgttaggtcccctttccctccctgtgttccttagccaggacttggcaggaaaccctgggatatcaacagttccacagagcattttgcgcccagttttcttgtttttatcttgagatctcatcatcagggagacttggagaataggccggtaattttgaaaccacaacttggcttctgactgcctcaggccttcttgaaagtttccaccagccaagagtttcatccagatatctgcaagggaccttcaagggaacggctgggaagctcattgtcccattaggactccctatgaccttcccagagggcccagccacacagatgcagcctggaatgtggcaggaagctgcagaacaggcaggaagcccagctccacgttacatcgcaagcagcctccagcagccagccctgaaatatcccgtttcttcctgatccacccccactcccaaacacacatctaaccagccagtaagattcagcagttacctctgaaacgcgtcttggatcttctgtcctaacaccaactccccagcgcaggagcaatctcctaactggacttccaacctccagtctctccacctccagcccattctccatgccatggccaacatgatcttactaatctaagatcttctggtttgaagatggcataaagttagtaaccctcccttcattttctggaagtaatccaaaagcaaaaaggacttgagcgataaaaacacaaattccatttttagtaaaagtaggagacacctaaaccacaaaatagacggaagagttgccaaaagcaatagagcttcagcagagatgttgcaggaagaaatagagcaaggatgctgtgctgcaaagtctctgggacagcctgaaaaagaatcctccagaagaggaggggcacacctggatgcggaatgcacagagcccttgtgtgcagcagcagaaaacgggtgcaggtgctgtggcctgagctctgctggctcaggactcagacaagccatagttgtaggaaatggtctgtttctgtggcaacaggggaggagagactttgcctcggggaatctttgccattggttggaaagaattcaaggctcagtgaatttacatcaaccctgggtcataaggaaaatttagccaacctggaagacaatcttggcctctctcacacctgaggtccacggggaagaaaaaacattaccttcttcaataatgagtaatatatacaaagttttgacaagaaacaaaggaggaaaaaagaaaaagcaaacagcaaacagcaggtaaagaagattcatcaaaaaacattgtcatggagcagatgacaattttaacgagaaaattaagaaaacatagcaaagtaatttcccccacaaagaaaacacgcacatgagagatgagggaagaggtaatgaaacagtgggaggaaatgaatcctgagctgccagagcttggggaagaagtgaaagaaaaaaagaaaactatccaaccttcactcttaaaaaatgaagcctcaaatctgaagcagtaaaaggggaacacatactgtggaaactcaatgagagatagtgagaggaataagaaaaggaggcaaactaaatgaaaataaagaattagaaaacaataggtacatttgaaaggcaaagaagaattaattttatatgcattaaatatgtctgaaaggggccgggcatggtggctcacgcctgtattcccagcactttgggaggccgaggcaggcggatcgctagaagtcaggagttcaagaccagcctggccaacatggtgaaaccccgtctctattaaaaatacaaaaattagctggcgcgctgacacacacctgtagtcccagctacggggaggctgaggcaggaaaatgacttgaatctgggaggtggaggttgcagtgagccgaaatcgcgccactgtactccagcttaggaaacagagtgagactccatctcaaagaaaaggaaaacaaaattctgaaagggcacacaagaaattgatagtatcagttgcttttagggaagaaaattgggttggccgtgaggtagggtggaaggggtggaaggagggccagggtggaagggagatttttcacttttgtgttttttaaagttttgacttgtatgaacatattagctcatcaaaaacattcaaattaagcaatacacaccctgcctccaacacacacacactttcacaatctgattttgttactgtctgtttaaaacccttccattgttctcatttctcttaagataaaaagcacatatctaaaaatggcttattagtagggtgatcatataatttattgtccaacagggcacttaagatcaaaaagatgcactacagatgtaaactgggactaaggccatctacttatgaggcaggccatgatctggcccttgtttccatctccagcctcatctgtcaccttccagcccacaggctctaactgcagtcttactgagctataagcagccaccctcttccctccagacctctcagcacaagctgtcccctcttcacagtactttccttcttccaagtctccctacaccctacaccctactctttggcttattctgtatatccttcgtgtctgatttaccttacttatttaatcagttctaaaatgcatgttctggccaggcgcagtagctcatgcctgtaattgcagcattttggtaggtcagagtgggaggactgcatgagcccaagagttcgagactagcctgggcaacatagtgagacatcgtctttacaaaaagtttaaaaaaaattatggttgagtgcagtggcttatgtctgtaatcctagcactttgggaggctgaggcaggtggatcgcttgagctcaggagtttgaggccagcccgggcaacatggcgaaaccctgtctctaccaaaaaaaaaaaaaaaaaaattagctgggcgtggtggcatgtacctgtagtcccagctactagggaggttgagataagaggattgcctgagcctggcaggcaaaggttgca

SEQ ID NO: 1885903 - DNA, 4001 bp, Homo sapiens
atttatagcactaaatgcccacaagagacctctgcctgagaacgtgggtttcagcctaagagttgtaatatgtgtgcccattcacaggtgctgcatcagagtcccaggtgggaagaaggcaagcatacacaaaaatggtaaaaggcagaaaggagcccagtctcattctttttaagaagttttcctaagaatctccacccagcgacttgctctcacatcttcttggccagcactggaccacacaactccttctagatacagaggagtcctaggattctatgagaaagaaggggagggtgggcaaagggcagccagctgtgcagcatctgctggagacacctaacccttggtggaggggttgtggtgctgggagaaggctttctggacggtgtgacagcagagataaacttaaaggccaagtaggagttaccctggtgaagcagggcagggttacaagcattccagcaacatgaagcagcaggagtgttttaattaaaagaaggcagttgctgtaaccaactataaacaaataaaggcttaaacacaatggaagtttatttctcactaagggaacatccaaatccatgatactttaagtcagggacccaggttcctcccatctatggttctgccatcactaatctgggtcttccacaattgccgtgctccttggaggtgggaagagcaggcggaggacacgtgggaggttttagggacaagcctggaggcagcatgcgtcactcccatgcagagtccattggccaatgctggctccgatggccacatctcactgcaggggcagctgggaaatacagtctggctgtctacccagcaggaagagcagccagtttctgctgctgatgatcaggaggtggagaaaatgttcagtcaggcagggagtgggaacagacaagaccacaagcagcttggtgcctctgaaagggagaggggtggaggggagactagagaggtgggtaggaatactggattccactgaccacgtgctggatgtcacgcttagccctcctgctctgtgccgggttaggcaccttgtgttttacgtacataatctcaattctgtgagggcatccgacctgtgggaaaagagctgtttgtttcaaatgccagtcctgcttcctaacaagtgtttagagcttaatcgtgttcaaaatacatatacaatgtttaatacttacaagaatttggtggggaaaatattaccatctttcccttttgtgattggagaaaaatgaggctttgaagggtttaagaacttgcccaaggtcggccaggtgcagtggctcatgtctataatcccaacactttgggaggctgaggtgggaggatcgcttgaggccaggagttcaagaccagcctgagcaacatagtgagtctttgtctctataaaaaataaataaataaataaaaagaacttgtccaaggtcagacaggcagcctcttagtaagcacacatatcctctatattatactacctctcatggaggatctcctgtgttctacaaatagtctggacttgagccagaatgtgttataatcctgggatcacggccagtgggcttagaagaagccatctctttctcatgccaagatgaggctccgccagatttgctcagacttacctatagtcagcagcatcgggggtcaggaaagacttcatgaagccataaatgcatccttctcggggcagcacctggctctcccaggtgagagaggactccattttcacaggcaggcgtgggagcttcagcacccatctctgggcccagaatgacccactggagaccttacagctctcctgtcacccccaattcctgccccctctgcagccttggaggagaatggagctgaagggcctgccctctgtagggtgagaaagggaggctaaagcctggtgcccactgccctggctgctccgcattgcaggagctgcgcccttcctttcctggcacagggtccacagccccgaaaccccgttgtgtgggagctgggcacagggcagcaggactaatccttggaacagctcagggaggattatcccagccactgtcagcagcggtgcagctggctcattcccatatagggggaggccagagccaggggcctgccacaagttggaaggctggggaaggggaggccagcagaggtgtcctggctgtgggtggctctgagggggctctcaggggtggggctaaatctcaggggcaggattatgtaaatcaaaccaattctagccacagattcaaagtttggaaaaaaaaaaaaaacccagcctggcggaaagaatttaaattataaaaacttagaagtatggaatgtgaaatcatcctgtaggtgcttatttaacaacgaaatcatcccgacacaatgagccatatgtgaaaagtcatccttccccaacacatcccccaacaggcactcctcaagcctctcccacccaagtgctggcatcctccctgtcctgcttcacctgagacaccccttgtctcattagacatgcaactacgggaggggtgacaggaagacaagacactatttcctcaggcccagtttggtgtggggagaaagcctcctgatcctgaaagcaagaatttgaccagagcagaagtaatcagtatgcagattgactctgtggtatgttaatgtttatgcatagattatgaggaccaggtgaaaagtgggccaggggagccagatgtgtgtgtgagtcatgggtggctgagatgaggacaggagggaaactggtttggaggctgctggcgatggggtgggggtgccaggaggaagggaggcagttgtttgaatgtctgcatgaaaaagcggacgacagcggggtctgggtgaattcgggcaaccatttggaccgtggagaaaactgcctgcgtgcggctgaggacctgcactattaatttgttttttagctaaggcaaagataaatataaaaactgatactccatccagttaccagaaaacatttaggtatgtgtgagacaacttgggtatgtgaacctaccttttcaatgtaaattcagtgaaatctaagtgcagatcccatatttccaataaaaaggtaacatccaaactcagatgtcctatgagtataaaatacacaaagatcttctggacttagcatgaaaagggattttttttttgtcaggtacctcactagttatttttaaaataggattgcatgttgaaatgataatcttttggatatattgggttaaataaatttattattaaagttaatttcacttaaaaatgtttaatgtagctactagaaattttaaaattaagcatgttgctcaccttatgtttctattggacggctctctctagatacaaaggctgccaagagggacctcactctagcttcagggagaagagaggaattagcaaggccaagcagaggctcctgagggcagggccaagggcggcttggtggggtggggatgggatgcacagagataactccaacccttaagaaggtgtttcctagagcaggctgtgacctgtcagtttatatactgaggcttaggagcctcttggatgcccccagatctgcacccctgaattgccctgtgcccctgccgtctttgttcctgtgctggcatagtggtctcacctccggcagtatcaccaccactgggcacaagcttctccagcacagcaactgtgtcttatttctccttgtactcccagtgttcacaccatgctgcactcacagaagactcttcgttgatattttgtggacagagagaatgcctgtgagagtgggctgaagtgtgcgttgggctccagagaccttaaggaggggagaccaggtcctgagtaaagttgaaggggaggggctgagtcctgctagccaggagtctcatcccctggggaagttccagggacccctcagaagtgcaaggggacggtgttagtgttagtccagtaacacagcccagagcctgccttccacgtgggtttgacaggag

SEQ ID NO: 1885904 - DNA, 4001 bp, Homo sapiens; identical to SEQ ID NO: 1242020

SEQ ID NO: 1885905 - DNA, 4001 bp, Homo sapiens; identical to SEQ ID NO: 1242025

SEQ ID NO: 1885906 - DNA, 4001 bp, Homo sapiens; identical to SEQ ID NO: 1242032

SEQ ID NO: 1885907 - DNA, 4001 bp, Homo sapiens
tgtacggatagggcaatggtgattcaacatacagtttacctttgaaatgcagatacctcactcagacttataacatctgaggtgctagcttgtaagtgtagctatttgtatatcatctactttttatacctaataagagaaacaccccccaccccaatcattactcttcacatgacccattaattttaatgtggtcttcatactctgtcagtggttaagagaaaccattgagtaaatgagggctccattttaataaagtccagataacccaactgacccagtgccccaaaaggaagatgtataattctttgaggcaagattgacaatgtatattaacaattctgtaccaaagaggaaatgtgataaagttttaagagcagcagaggacttcagaagacggattttgcccctcacaaacttgttttactactagctagccttattactttagtcacttaacctttttgcgtcttagtttctcactaatccagtgactcttgcccattttatagattcagatgttggaagcatgatacaatacttgtttatcccctagtggatgttcactatattatgctttattacttttatcaatgttgtattttcttttgtaaggatatttcattttttaaaaaaaccaggcaaatataaacaaaaacaaagcatgagtttttaccatcaaattaagctgaactctagactcaaagcaataaacaagacaaaaaaataacataatcatattttctagtggactagacataaagctaaaacttctagagttaataggtttttaaaattatcctctgagtgcagtggctcatgcctgtaatcccagaactttgggaggctgaggcaggaggattgcttgagcccaggagtttgagaccagtctgagcaacatagtgagaccctatctctacaaaatgtttacagattagccaggtgtggtggcatgtatctgtagccccagctccttgagagactcaggcaggaggattgctttatcccacgagtttgaggctgcagtgagctatgattgtgccactgcacttcagcctagctaacagagaaccctatctctaaaaaaataaaatcaccctccattattatatttttaatatacatctttcagaatttgacagctgaagtcggggggaagagatgttaatgtaaacaatagcagaaggcttcgtttagtggatatctttgtgtatattaataaaattataacattccttttaaggaagtcagaaaggtaaggaaactgtactttctaataaccggatatgggtttcagaaatcgttatggatgtgcattgcccctttgtatttgtgactgaaaaaaatggtggcttctcttgatctgccttgtgcattttttatgtattaattttgatttttgaccctattttactcacctatgagggtgagcctcagattaaccataggctgctaaaggcagcagcctcccgtcagtgaatcaggaggattttgcttctatacttaaaaattttaatgtttcatgagatattgccacttttctaaattttccaggaaccctctggatattgatgcctcgggtgtggttggactgtcatttagtggacaccgaatccagagtgccactgtgctcctcaacgaggacgtcagtgatgagaagactgctgaggctgcgatgcagcgcctcaaagcggccaacattccagagcataacaccattggcttcatgtttgcatgcgttggcaggggctttcagtattacagagccaaggggaatgttgaggctgatgcatttagaaagttttttcctagtgttcccttattcggcttctttggaaatggagaaattggatgtgatcggatagtcactgggaactttatattgaggaaatgtaatgaggtaaaagatgatgatctgtttcatagctatacaacaataatggcactcatacatctggggtcatctaaataataattaaagtggctttcataatatgtaacttttgggttctgcctttttcagaaaatggaaacttgggccatgtgtatttcaaacaaaaataactttagatatatcttttttgtagctttgattgatgctctaagatcacatgagggtagtatttaatatattagatgaaggacaactttggacataacactgactaggagttgagagcttttgcatcaggcagaagcaaactgattatagttgtgttgcaccagatcatgtagctgctgtgtaacatgaccttaaatagtcttcctgcataggaagagcaaaagggtattcatcaataggatatagatttaagacattccctgactaccccttgcgttgttaggtgatgtcttttagcagaatcatgaagaccttttttctcccttaataaaggagaaaaatatactgatggctggagaaatttttctctgcctttcagttttatgaattttttcagaagtaacaatattattattgactttttacttatttgataaaaattaaagaactatttttgttttggtcagataaattgacaagactaatcagtattttattataagtaaaagatttttcttctttccttaaaaatatttttttttcacctaggtctaaatagctaactaactggtagaccagagtattacatcatcttattttggttttataccaataaaacatagcgtggaactcattcaggtaatgttttgcatttcattgcttttggatgaacaaaggaagtaaactaatcctttataaatgaaaacccagaatagttggtatgtcagctagtcattcctgtcatattcccagtagaatgattttcaagtttgaatttctgtacaaatatctaaataagagatgtgcagagagcaccaattttccttcaatatccattctttacttttcacataatgatagaacctttgatttttcaagtgggtatgcctcctagaataaagactacatttcccagtctcctgtgcaggtatgactgtgttctggacaatggaatgtgaggggaaacgattttttgtgtccttaaaatggcatgaccatttatttgcccctttctccatcctgttgcttggaatgtggatctggtagtgagccatcttggaccctgaagaggaggcaacacaccattgtagaagaaaaacaacagaaggatcctggtccctgtacgacctcattgaagaaacaccataagtggcgtggactatctacctccagactgttttacaagagagaaattagcatattccatctaatacagtatgatgtaactaatgttacttttgtaacagtcagtggtttgttctaacaggacagtagaacacttgcaaggtaagtaaaaccaaatgtattagcattattcctgcttttccttttttgtcacttttatcctttttttaaaactgaaaatatttttctcttgctatttatatatatatgataaaaatgcttggaagagtcctttaatttatggttattctaaatcctagttcctgaggcaagtccaaagaaaaatttgtcaaaacttttcatctatgaatatttatatttagctcttgctatttagctattatcaaaatacctcaaaattttagtccttgaatgtgctcatatagcccataaggcaaatattttttaaactttattgtccctgatattaaccagaattggttgaatagtagaggaaaagggatttttaaaactgaaaatatgaacaaaatgagccttagaattgaatggattattttaaacaaattaatactcatataaaatgttttgctgcttctcaaagagtctgatacagggtaatttcatacaatatttgatgttgttaaagcattcctttttatagctgagcctttggagcttgttatgaacagtaaaatcatttagtcacatggttgtaaccttagtgcaaagtaaaaagggaaaagttgacctaatagaaacaatagtagtattgataagaacaaaagtcatcctc

SEQ ID NO: 1885908 - DNA, 4001 bp, Homo sapiens
ataattgtctcccaataagtataattgtctcccaacctagaaaacccagaatgattcagagagacaaagaactctaaggatatgtctctgcaaactgttcgtttcaccaaaggattcactgcagaattaattttctgtaaaatctgtacctcctataattttcaacatgttctatctttaaagataacatttacacaagtgttgatagcatatgtggaattcacgtgttacttgtgtaaatcattataaatatgtaatagaattaaatgttttaatcacttaagaatatcttcgaatgttcctgagtctccgagatcataggcagattatgcagtcttcatctgtgattttgtttagtcacctaaattccaacttttaaaaaagttagagcccagtaaaaaaagtatgggaatcaatcttattcagtcttgttaaaatgtgtcttgcataacagcttgatttgacttgtatggtgaaagcacggtaagaatgacacatttctgttttttggttttttttttaaaaaagtatgagtgtacagtggagtgttccagaggttacatggtgtgctaaccacaacagtctgacgtagatctgagaatcttctattaaaccaggcattaaaaagatttgcaaaaatgcaagatgtcactcttatcatctatgttaacatgtaatggatttattttttgtttttggaaaaaaaaaaccaagagaaaagaaaataaagtcatctttagtttccttaaattcaaagtctgagcctgaaaatggaagtatcaaagctgatggttatacgtcagtgagaaaaaaatttaaaccaagctgggtgggtctttacatgagataaactatctacaggaaagaatgaccactaacttctgcataataaatgagagtggatcttttaattctgagatggcaatgtactttacaaggaccatttacagactacatcaaacctttttctagataaaaaacgtacttcagtaacttgcctgaattgagagagcaaaacagtccggagagaaaacttaaaatgtttccacattatcaagcccccttcagaagtactgtggtctcggcccctcctttgaacagatgtccgctcgccacagtccaatcaggtttaaagcaagagtatttgtactgaaaacaagcttaaagtgggaagacacacacaaagcaggcctgtatcattcctttggtttcagttttcacgatgcacccttgaggctaggcacgctgattcaacacacttggagagcttcaccgaaacacactaaacacacagtgatgaactgtgccctggcagagatgacctggcaaaattctcaacttcttccctgaggcagtgcacccgcagttctcggcggcgaagtctttggggcagaagtcccgagccttcagaacggcaggcttctccccctcaggactccagtccccgcggccaaggctgtcgctgcgggggccccgcgcgggactggccaggctcttccattaaccctgtctggtccggccgatcccgccgcgacccgagcgcctctcggccccgcagcacagggcgcccaggacccgccaccctcgccgcccgttcccctctccggagagcccggcggggccgtcaggctgccgagacaaagggtaccgcggcgccagaggccgaggcccagccgcgcctgccttcctctttctcccgcccactgccaacctccagtcgcccgcagaacctccgctgcctcggcgcgaccccatcgccaccccggggctgccgctcgggaccggcaagccgggtagccgcgaggcggccgcggcatgctagggccgaggagggggcggcggccgccaccatgtctgcccgcccctcccagaagcagtgtgcccagcggacaaagcgcagcggcggcgcgggcgcccaggccgaccccgccgacccccgcggaataagcggggccaggagccccggaaacccggcgccttaatgcaataaacaggaaatcgcggggatgatctgggttccgggggaagtggaattattttttaccagcgaagagatcaacttccacatccggtggtaacagggccctacacagacccgcactgacctggaaaagcttcgggagcggcgacgggaaggcagcaggaggtggtgcggggacccgaggcgcctcgtacccggccgggctgacgcggccccgctacacacaaagcgcttcagctgcacagggcgctattttccgaaaatgccgcgtctggtcggcgcccaaaatccccaccgaaaagtcccccgtgctgcgcgcggagggacacatggtgtgcgagtgagtcaagctcccagcatccctcccggacccggccctcttcagctcatcgcccgaggattttccgcctctgccctcgtcggcagatcctgctcctacccactccctagctgtgttcccgcggggagagaggggaaagagggtctgattttttaacgaagggaaagaaaatatgccatttctagcgcttcagccacacaaagaaagcggcggaatgatccgctctcggcgaccgcaagtcccggctcgcccggcgcctgcgcggcagcgggggtgggagctgcggacggccatgtgcgcggcggagaggccgggtggccaccgaaccttcccgcctgttctgcggtgggtaggagtttggaaactaatgttcctgtgctaaccttcgtgtctctgtgacatgactgttgaaagacggagagtgcggaatctttggagttttaagcttgccaactgtgcggcctagcagaatcctgggagacggaaggacagccaagaggctaggatttacctttaagtgtccctagattcaactaggcagactgggacgggagacgctgtgaaggtaccagggaaggaacgagtgaggttccttttccactttttcataaactcaacagtcaggttcatgacgaagatatagatatttctgtagattttttccccaacattctaattatgcctcatgtttcgtagatcctagtaactgcttggattactgccacctcagaggtagagatctgtttttccgtggctggaatgccaaaaattttgttgtattttattaagaaagtagcaaaagtttggagatttgcaaagttaaaaaaaaaaaaagcattatgaacttaatctagatgtgatttgctaaggaacttaatatattgatatgtttttcacaggggcgtctgggcatggctttcccaacctagtaactgcaacttttagcatcctacatgtaggacttgggaatatgtgagacagcgccaagaatttaatccaggagaattgacaagcttaaatgaaatccatattgcccactgattttgtgcagcttcagataagtaatctttctccacttagccttttgtaacaattgatgtaataaaggtttgtagtctttgtgtaatttattaaagcattgtgcctaaaatagaaaaaaagcataggaaccataggctgtgttttcttttgatttaatattttcatttcttcagttaatagaaatttgccaaattctgatgtttttctgtagcattatttgaatgagcattgtttatttgagtgaacattcagctaattgttacagaatcgttgcccccattaatcttaggctgtagaatgtagacaagtaaataggcatcatcagtatgatgagagtgaagctacttaatactgtggaatcaaataaaggaggaaccccttactaaaccaagagggaggaataaaatggaatgggactagagaagcaattagctttaataagggtattatggaagactttctagatgagaagcagtaagtacagatgtttggaggcaaacactagagagattgttgggtaaagaagacaatgctggaggtctacttgtgaaggccttgaatgctatgtgcagaagtcagcttctgagaaccaggaagaagatattgaaagattttaagtagaagaatcataggattgaa

SEQ ID NO: 1885909 - DNA, 4001 bp, Homo sapiens; identical to SEQ ID NO: 1242042

SEQ ID NO: 1885910 - DNA, 4001 bp, Homo sapiens
gtggctggggcaaagctacaaattaacaacatctcagcaaagcaattgtttaaagtacaggtctttttcaaaatggagtctcttatgtctttcctttctacatagacacagtaacagtctgatctctcttttcccttcacttggcctgacagcattgacttcattacacaagaacttgcagctgacagaactgacacacagatttcccccaagaggaagaacccttttcatttgcagagatgaattgaaatgtcatgtctgagtgcaattcctgctccccactcccaccccacaaaatcctataagtgataataaatcaataaaatccccatgatttactaaaagtcatccctgcaaacctttctaactagcagctgcagtggataaccaagaagggaagcagctggccatcacatagcattcctgtgagtgtgagaatgaagggacagcagcatgggagcgagaatcctgaatgagtgagaggtatagataatctacctcacttcatacctgccccttccctacataagacatctctgtcctgatacatggaaaatactagaggagatggtagaagtggttttagtctgcaattggaaatgcctgaagcttattaaattccaaggtaggggtgagatgaggagcaccagagagaaagagcaggttagacagagatgctcaactcactctgtcaattccagtttaatgctatttaacaacaaaattatcttcttaatcataaccaccctcatgcctaacccctattttccaaagataagagatccctgtctaaatttctgggttggtgtctactgccgcccctggggtggtactgtgatgtttgtgagtgagattgcaactgggatgggagaaaagaagtgtgggatacggaagatcgggggccacgatgcatcaattacagtgggtctcttttcgtccccaggtatggcccactaccacaagtcccctttccctacctgtcttgtgcaactgtcaaaaacagaatctctgcccaaagagaagggagcacagggagttgctgctggactgccatcatctctgaccccaacttgtccacctcctgaccgacctttctatgaaactgcacaaaaattaaatctcaggaatgccataaaattacatcatccccattcctctatcaaagccaatccaacagctctgtcctgacatgctttctccctgggccaaggaagcaacaaaaaatatcagttgagcatgtgaaaatgcgttgacggtgtgtgcggtgtaaagtttctatatgtcttcaccttctgtctcctcacggtgggagccgccctctctttccccaagtcacacacacacccctcccctacccctaagtccaggtgcttccatctgctgggcttccaaccactcatttcccatagacactctcattactgtaggccacatacagaaaatcatcttcctcatgactgtcctcatatagttggcccatggtagcactagtgggagggatagtgttgttgacaaagaagaataaggcgtcctcaggtctcaggtggattctcttccggattaaaaggtagaactggccatcggtaaggtcggagggcactaggtacttcctcctgtccagatcaggcacccttgcttttggagccttctctacaatcaaggggaccctgtccggatatttcttccggatcttttctccttcctttttccgatactcaaagggatggacctccttgtactggaacttcatggtgaatcacagggcttccgtgatccccgcgcagggcctgcctccttcgccgctgaccgctggccacgtcccgctccctccgccgacgtgtgcttagaatagctgcagaaatgtccgcttccgggtcaacagcactggtccaagtgtgcgggagggcagaaggtggggtgggagggggacctcgggtgcgcctgcctggaggtagaggagagccaggtggagaaataccggcggcttttccaaacagctgggagcacaaaaaccaaatatttggttttttaaaccaataaattttggggtaatttgttacacagcaatagataatgatagactctctctttaaaaaaatcagttctggcagggtgcgatggctcacgcctgtagttccagcactatgggaggccaaggcgggtggatcacctgaggtcaggagttcgagaccagcctggccaacatggtgacacccccgtctctactaaagatacaaaaaattagccgggcgtggtggtgcacgcctgtaatcctagctacttgggaggctgaggcaggagaatcgcttgaagccaggaggcagaggttgcagtgagctgtgatggtgccattgcactccagcctgggcgacagggcaagactctgtctcaaaataaataaataaataaataaataaataaattcagttatagcaagtgctgaagtctttctgtcttttcatgctccttgaagtcctttcacagtttttcctggctcttctacgcctcctctcggccacgccctttagcacccaacccctcaacaggtaatgatcctctcttcacgtggccattgcgggtacatgattggtttcctgtactgactgctcttctcgtgagaccaagcttcctttcccctactccccacacacctgatcattgtgaacaaaccgccgagagaacaaggtaaggcagaaggaacagaagctgcagagagcggcaggggatagccaccagccagattctgtgactcttcattcatctccccactccagtcccagattgaagaataatcttcatgatctccttaatggcaaaatgctagaaagacttaccgaggggtctgaagatgccttcggttctccaggtcctgaactctgttccagttacaggaggactggcaatccctaggtttcctgggtgttactttgttactgacctcctctgagatttccattttcctcaatttcgtctaactaaatctaactacgtctaactacctctgctaaccagacatttgttcatagtcgacagagtttccgaaaatgcaatgtagttaccttgcagatgactataattgtgtagcaaaataactaagatgccactggctatatggaaaaaaaaattacttaggattttgataccttttatggtttatttccccttttggcctgtgaacttcatgaaggtaatggttatgtatgattcccgagtaatcacagttcccagaacgatcttttttttttttctttctttttttcttttttgagacggagtcttgctctgtcgctcaggatggagtccagtggcgcgatctcggctcactgcaagctccacctcccgggttcacatcattctcctgcctcagcctcccgagtagctgggactacaggcgcccgccaccacgcccggctaattttttctatatttagtagagacggggtttcaccatgttagccaggatggtctcgatctcctgacctcgtgatcctcccgcctcggcctcccaaagtgctgggattacaggcgtgagccaccacgccctgcccccagaacgatcttgagaacagaatgttcccaataaatatccactggaaaatgcaccttatttttgttgaaggaatggtggaattagcatcaaagggatcttcaacattaactcgggccgggcacggtggctcacgcctgtaatcccagcactttaggaagccgaggcgggcggatcacgaggtcaggagatggagatcatcctggctaacatggtgaaaccccgtctctactaaaaatacaaaaaattagccgggtgtggtggcgggcgcctgtagtcccagctactcgggaggctaaggcaggagaatggtgtgaacctgggaggcagaactcgcagtgagccgagatcgtgccactgcactctagcctgggcgacagagcgagactccgtctaaaaaaaaaaaaaaaaaaaaactctatggctggtaattctaagcgttttataatacatc

SEQ ID NO: 1885911 - DNA, 4001 bp, Homo sapiens
acatattcccaagtcctacatgtaggatgctaaaagttgcagttactaggttgggaaagccatgcccagacgcccctgtgaaaaacatatcaatatattaagttccttagcaaatcacatctagattaagttcataatgctttttttttttttaactttgcaaatctccaaacttttgctactttcttaataaaatacaacaaaatttttggcattccagccacggaaaaacagatctctacctctgaggtggcagtaatccaagcagttactaggatctacgaaacatgaggcataattagaatgttggggaaaaaatctacagaaatatctatatcttcgtcatgaacctgactgttgagtttatgaaaaagtggaaaaggaacctcactcgttccttccctggtaccttcacagcgtctcccgtcccagtctgcctagttgaatctagggacacttaaaggtaaatcctagcctcttggctgtccttccgtctcccaggattctgctaggccgcacagttggcaagcttaaaactccaaagattccgcactctccgtctttcaacagtcatgtcacagagacacgaaggttagcacaggaacattagtttccaaactcctacccaccgcagaacaggcgggaaggttcggtggccacccggcctctccgccgcgcacatggccgtccgcagctcccacccccgctgccgcgcaggcgccgggcgagccgggacttgcggtcgccgagagcggatcattccgccgctttctttgtgtggctgaagcgctagaaatggcatattttctttcccttcgttaaaaaatcagaccctctttcccctctctccccgcgggaacacagctagggagtgggtaggagcaggatctgccgacgagggcagaggcggaaaatcctcgggcgatgagctgaagagggccgggtccgggagggatgctgggagcttgactcactcgcacaccatgtgtccctccgcgcgcagcacgggggacttttcggtggggattttgggcgccgaccagacgcggcattttcggaaaatagcgccctgtgcagctgaagcgctttgtgtgtagcggggccgcgtcagcccggccgggtacgaggcgcctcgggtccccgcaccacctcctgctgccttcccgtcgccgctcccgaagcttttccaggtcagtgcgggtctgtgtagggccctgttaccaccggatgtggaagttgatctcttcgctggtaaaaaataattccacttcccccggaacccagatcatccccgcgatttcctgtttattgcattaaggcgccgggtttccggggctcctggccccgcttattccgcgggggtcggcggggtcggcctgggcgcccgcgccgccgctgcgctttgtccgctgggcacactgcttctgggaggggcgggcagacatggtggcggccgccgccccctcctcggccctagcatgccgcggccgcctcgcggctacccggcttgccggtcccgagcggcagccccggggtggcgatggggtcgcgccgaggcagcggaggttctgcgggcgactggaggttggcagtgggcgggagaaagaggaaggcaggcgcggctgggcctcggcctctggcgccgcggtaccctttgtctcggcagcctgacggccccgccgggctctccggagaggggaacgggcggcgagggtggcgggtcctgggcgccctgtgctgcggggccgagaggcgctcgggtcgcggcgggatcggccggaccagacagggttaatggaagagcctggccagtcccgcgcggggcccccgcagcgacagccttggccgcggggactggagtcctgagggggagaagcctgccgttctgaaggctcgggacttctgccccaaagacttcgccgccgagaactgcgggtgcactgcctcagggaagaagttgagaattttgccaggtcatctctgccagggcacagttcatcactgtgtgtttagtgtgtttcggtgaagctctccaagtgtgttgaatcagcgtgcctagcctcaagggtgcatcgtgaaaactgaaaccaaaggaatgatacaggcctgctttgtgtgtgtcttcccactttaagcttgttttcagtacaaatactcttgctttaaacctgattggactgtggcgagcggacatctgttcaaaggaggggccgagaccacagtacttctgaagggggcttgataatgtggaaacattttaagttttctctccggactgttttgctctctcaattcaggcaagttactgaagtacgttttttatctagaaaaaggtttgatgtagtctgtaaatggtccttgtaaagtacattgccatctcagaattaaaagatccactctcatttattatgcagaagttagtggtcattctttcctgtagatagtttatctcatgtaaagacccacccagcttggtttaaatttttttctcactgacgtataaccatcagctttgatacttccattttcaggctcagactttgaatttaaggaaactaaagatgactttattttcttttctcttggttttttttttccaaaaacaaaaaataaatccattacatgttaacatagatgataagagtgacatcttgcatttttgcaaatctttttaatgcctggtttaatagaagattctcagatctacgtcagactgttgtggttagcacaccatgtaacctctggaacactccactgtacactcatacttttttaaaaaaaaaaccaaaaaacagaaatgtgtcattcttaccgtgctttcaccatacaagtcaaatcaagctgttatgcaagacacattttaacaagactgaataagattgattcccatactttttttactgggctctaacttttttaaaagttggaatttaggtgactaaacaaaatcacagatgaagactgcataatctgcctatgatctcggagactcaggaacattcgaagatattcttaagtgattaaaacatttaattctattacatatttataatgatttacacaagtaacacgtgaattccacatatgctatcaacacttgtgtaaatgttatctttaaagatagaacatgttgaaaattataggaggtacagattttacagaaaattaattctgcagtgaatcctttggtgaaacgaacagtttgcagagacatatccttagagttctttgtctctctgaatcattctgggttttctaggttgggagacaattatacttattgggagacaattatacttaattgattaatgcataaaaatttaaggccgtattttaatggctttgaaaggaagctaagtttgtttccagttgtttctgtgaactgtagtctgaatctgtcagtctatagttctctactgttccatcaacaggaagcatctggtcattcttcgtgtaattgttagaaaataccaggtgtacttttaatgtttgctgttcaaacgaaaatagattggatcttggttaagttcacttggtttggccaggcacagtggctcacgcctgcagtcccagcacttggggaggtggaggcgggccgatcacctgaggtcaagagtttgagaccagcctggctaacgcggtgaaaccccatttctactaaaaatacaaaaaattagctgggcgtggtggtgcgcgcttgtaatcccagctactcgggaggctgaggcaggagaatcgcttgagccagagaggcaaaggttgcaataagccaagatagcgccattgcattccagcttgggcaacaggagcgaaactctgtctcaaaaaaaaaaaaaaaagtatgcttggttttagtgtgttttttcccataacattgtgtcattgtaatggaccacatctcctgtaccatgaatttttttttacttttttcttttgcccctcagtaccagaaatattaacaggtaacaggtaaagtgcacgtcatgaggaattcagaaatt

SEQ ID NO: 1885912 - DNA, 4001 bp, Homo sapiens; identical to SEQ ID NO: 1242053

SEQ ID NO: 1885913 - DNA, 4001 bp, Homo sapiens
aaaattacaaaatttggccaagtgtgctggtgcgcacctgtaatcccagctactggggagactgaggcatgagaatcgcttgaacctgggaggtggagattgcagtgatccgagattgcgccactgcacttcagcctgggcaatagagtgagactccatcttaaaaaaaaaaaagtgcagctccctccatcctgcctgaacctgggttcattttccattctttaagggatttcttctcttattttccatcatgttcctagtaatatccttatatgaacatttgattattcgttctcagctacattgatgcctcctggaaacgctagactttccctgtcttacactctacccattttccccttttgttcccccgctcaccttccaaaacaatcatgaaccaagatttggtcagatacacattccctgcttacaatgttacagtcatgtaattactgaactttgcagaatgtcctagtgtgacctgcttaccttatggggaggaggtcgcatagattatgtttgtccagaaggcgattaagtccctttaaaagaaaataatgtctgacatccaagcactgtagtgttttgttggcagctgtgatggaagcacacagccctctccatgggttggaaggctttagccaacctccatggccacagactcagattaccctccctcccattcccacagggctgcctgccacagtggcccacctgaacccctcactgtcatactgcaagaccctcctgctctttcctgggtggactccctggttccccaccagatcttcccagtcttggtcattctgcttccttactttggtggagaatattctccaggaatcttctgaggaatgttgcatggaaggtaactttgtgaatgggtagaaaataatttcccctgagagttgtgcaaacatagatccactgcttgtgggtgagttctgggccatctttccttaggtcagtctgattgtgagctgcttcttgccccaaccccctttatcctcagccacaaccagaaaggtcttcccccttttattctggaatttcaaatggtagtatttctgattttcttttcatatgccatggactaggcaagtcttaactatatgtaaagtcatttgattattgagattgtttggtattatttctttgataattcttttattacttttctcttttataagacttctctgtttggttttatgctagtttttgggaaatcccttcaaatttaccttccaactactgatttttttttaatttctgaaggatctttctaatacttaggatgtttcttttttacagcatcctcctgttatttcaatgaaccagtaactttttttttttcttttggaggatcttaaccatagtttctggaagttttcttctggtctcacattgcttctgtttgttttggagtacatcattcatgatagagcatttccctactggcctctcatgaataagtagatatgaagcactcctggctggttggaagttctctatgggcctcatattaggatgaaaactgggaatttcagagaagtactgcttgttagtatttccaggtctttttactttggcttgttaatttcctcagatggaagatttttttttttctattgttgcctgggaagttgcaaacctacagacaaaatgctgggagcctgtcaaggaaaggggctggtgcacccacctgttgtctctgtatgtcactgaatccagggtttctctgagtcagcctccaatcaacagctctgtggctcgggaatcttgagttctctttcttctgttttggacccatcgtatgttactacttagagatacgtggaacctccaactcctgtggtccttcagagtttcccctgtcaaaacctatgatggtctgagatgttaccttacttgaaagctagtaagttggcctgccatagtgtcatggtttctggaagaagacaagagatgcctgggtcagagacaaaggacattgttacactgtaggcattgatgtcacagcaggcattgtgagcttcatgtttgcctctgttctccttgccccccaagttccatgggggcagtgtgaaacagccaaccagtttgtgccacagcagaggaaccctgaacttaggaaacctccatcttttacaatgtctgcatacgtttttaatgatgctttttgatgaagaaaagctcttaaagaagttaaatttgcttgccaatgttttttcttttatgtttagtgtttttgatgtcctatttacaagttatttgcttatttaaaagtcatatacatttgtatttgcttttttcttaaaatttgaatactttagcattttgaatatattagcattcacattttggtctgtaattcacctcaaattaatttttacttgtggtatgaggtaggagttcaaggttcatgtttttctcttcatactgatatctagttgctacaggaacacgtattagaaaaattagtttaaagcatgtgcagaatcttaaagaccaggaaggtgatactgtagttaatacatcacagcttctataaactaaaggatgtgaaacctaatgcagctgccattattgtgtgctaccaaatgacaggctcttcaaaggaaacaaagataaaagatatcctccctgtctttaaggaacttaaaaatatatgcatagaaataaacttacacatacactataattttatttataaaagtgaagggaaaatttatgcaataaaactgataatgattctctaagactgtttacagcttactagtactgaagttgtcccatctgacccaaaatatctggggatgcttaggaaaaaattaaggatataggaagaattgtatattatgacatattgaggaatttcctgggagagagcccaacccaaggacggtgaacttgattcattagcaaagctttggtccacagagttagggatcacgctgagtgtagcatttggtactctgttcactccttgggtacctgagaaggaggtggtaaggggaaagctaaaactgtttcactgaaatcatggtaaggtattgacatggtaaagcagccatacttttggccttcttagatatgggtctgtacaaaaggataaagtgaatatctcctccctgtgccactggccactgtgcagctttggtcctcttgggctagatggaatggtagtggcacttttttgacttggtaggtaggggccagatcgggtgcagtacctggcagtaatggatatcaatggtatccaatggagaaacacgccaaatggaaaagggagtacctagggtttgctagaattggaatagggaaagaaaatgggcatcacaggatgactggccagagactggactgggcctgctccttagcatgtgtgaagcatcttctgatgcccctagatatagctgatgagctgaagaaacattggcaggaggtatgagggttctgcattcacagttgggataagggaccagcagaaaattagcttgcacacataagggtaaggcaacatcattgttttcagaattcaaaacattgaaatcctcttacttatttgatcttagtagcaacccaagggactgcagctgtttttctaaaatgaagagctccacgtgatcacgtggaggttacgagattcacctacaatcttagtaggtgacccagctctggagcctgggctggtggccatcactttcactctacctcttcttgccctcgccagtctcagtgtcccatgtggctgctccctacattacctctcagctcccccgacccacctgcctaccaagcctggtcccagatgaactctgctgaaatacacctctcaccatgtctcatctctactcagtatcctcagagactcctactgccctctaaattaaatctaggctgggcaccgtggctcatgcctgtagttccaacactttggaaaaccaaggagggaggatttcttgagggcaggacttgtgttcagcctgggcaacttagcc

SEQ ID NO: 1885914 - DNA, 4001 bp, Homo sapiens; identical to SEQ ID NO: 1242063

SEQ ID NO: 1885915 - DNA, 4001 bp, Homo sapiens
cctgacaatcccttccaacctctgtcagcctccttccccacaatcacacacacacacaaaaccacactgccaggaagggaagccattgagtgagtattgtgaatcctacaagtggctctgtagtttaaaagggcaatgcctgtgcctgaagaaaatttgtctttagcttcatcaggtgaagaaaattggttttataacacaaggcccaccaaaccagaaaagcccaggaacgcttctccacaggactcacttagcacgagaaatcactcagagcaaaatgacgcacacagtatttgtcaaatttttctttttcatttagcagaaggtaaggtaaaagactacaactgaagttaataaatgacactctagccattttgatcatttgtcactataaatgatagacatttaagctagttccatctggggaagtgaaacagaatcatgttcatataataagccagacgaaccaaattcagtggaatacgtgcacccaaaactggaccagacttgtacttaatgcagcctgcaaatccccaagagtccacgacagaatacaagaacagtaacactggtttatctcaactcatcttagctccctcacaaacttgccaataatgacctttcaagaactgcaccgttggtcctcatctgggcaatcccgtggcttagaaaaactgaataaagtgcttcttcgaaaaataaaacaatgcggggaggggggagtagtaacaaaaaaaaaggcacactggtttttactgtactgaagcaataaattctccaacgaacttcattaatgagtatcagcaaagaatgaacaccaaaataccgctcaatccaactttcatcgtgaattcttgaattcacagtaggatcattaaatgtgacggtatcactctgctataaaaactatttccaaaacaaaacaaacctatctaccccctttcttgatttaaaaaaaaaaaaaagaaaaaagaaggaaaatttgagggtttttgcttttttcaacttcacacaccggtttgcctttgcaaaaaaaaaaaaaaaaaaatgtttagtctcaaagtatagctgcaaggtggaccggctgcacgggtcccagagggccgctcgcctccgacggtcgcagtttcagccgggccgcgcccgcgagaaacagcggagaggccccagcaggcgggcgccgccggacaggtttaccgtccgcgtcggccccggggaaccgctccctcgcgcccgcagcacttgttcgcggcgcggactccacaccgcggccgcccgccccaggggaggagtgagtccgccccagcggcgccaacccggggacccggggcaagggttcggggccatccgccgccgggcgcgccccccatccggaaagcggcgacggcccccaagttgggctgcggagtgggaggcgcgccgagccccaagcagacaatgcgggagaagggtgatgcgcagggaggaggggtccgcaaagctgaggtccccgcgccgcccggctacccatccgtgccgcccgcccctgaagccccgcgcagcccccgaccctcctctggggcccgccccaccgagcggccgcaggggacgggccgcgctccgcaccccgacccctcctcaaatcacaaaacttcccccaactccgccaactaagttgcgctctcaccgtgcggctcccggggctcccccgcgggccgagccgagacagctcctcaccttcgccgcggagaaagacaataggctgcctctcccccggcggcggcagcagcggctgcggctaaagcggcggcaaccgaggcgagcagtgggcacggcggtctcggccgagccgaggggcttcaccgctgctgttccggctccgcgacagctctgcacgtagccccagccaccccgcgcaccggctacaagccgcccgggggtggccggggcacgcaagagggcagtaacgtctgcgagtcctcccgtgagtacacgcggagcaagggctgcgagctgggattgcacggcagagctgcccatcccgctccacgagaccaatagtaaggcacctgggcggggcgctcaggttgctaagggaggctgaggttgaccgccggggctgctctgtggcaaagtgatcacagcagggtggctggcagagactgctctgggaaatgcccactcacggtctcctctccgccctgtttctagaaactgccctttctctgtgtgctcgtggttacctgagctgtagcatttaaccacacatcgtgaaatgatttactcctctatttcccccacttcaactcaggaagtggggtttagtcttctgtgtccacagcctaggacagtctaaggtattaggtattaaatataggtattaaacaagtgttggatggatgcacggcgctatggcggaatcacaattgtgacagtgcattccgtgaacttttggctactcgatcaccacagtcgttccgtgttcaagctgcaaaggacctcagaaatcatcggattgctttgagaaacaaaatgtggtccgtgtaccaacggcggccgaggagaatatattagctggtacacggagaaacttcttttttcaaatagttaagtgttttagtgctcattaggagggaaatgcctatcacgtcaaatcattgtttcattaatgttacttcttaggtcaaataaaaagtggcaaaaaacaagtgtatttcaagaaaagtgttaagtgaaacttgagacactttatatgcagttcaagaatgtaaaatagtagttgacagtgattgaagtaagaacagttggttaggtaggaggagaagattattggctgggaaggaggaggagggaaccctctgtggtgctgattctgtattttgacctgggtgatggataacaaaagtatgtacatcaataaaaaatacatccagtgcactttagattagtgcactttacacattttatacatgtatttttaatgtcaatttttaaaaaatctggtatggtatatacccccacaaccccccccccccaaaaaaaatgcaaagatgcaaatgactgccatttgggaaacactgatccaggcaggctcactagcagtgaccaaacacctgagaaagggtattgtgaatacctgatgtatgtgccaggaacttccatggttgaatagctccaaatctcagaaatgctcctaacctagtgttgagctctggtgcatagatatattttcttttctttctttctttttttttttttttttttgaggcagagtttcactcttgttgcccaggctggagtgcaatggcacgatatcagctcactgcaacctccgcctcccaggttcaagcgattctcctgcctcagctgcccgagtagctggaattacaggcacatgccaccaattccagctaattttttgtatttttagtagagacagggtttcaccatgttggccaggctggtctcaaactcctgacttcaggtgatccacccacctcggcctcccaaagtgctgggattacaggcttacaggtgtgagcctcagcatccaacccagaatagcttaaaaaaaaaaaaaagccaggcatgcccagttcttcatgtgaaattatttctgtatcacctcatcatgctgctcaccctcttccactgttctctaatttgtccttgttgatatttaaaagctggcacaaggccgggcgcagtggctcacacctgtaatcccagcactttgggaggctgaggagggtagatcactagagcccaggagttcgagaccagcctgggctacaggtgaaaccccatctgtactaaaagatacaaaaattagccaaacgtggtagcccaaatcccagctacttgggagaccgatgtagaaggatcgcttgagcccaggaggagaggttgcatgagccaaatcagcagggcagctgcagagtggggtgcaaggtcctcaacccagaggttccctaggccccacttgccccagctcatgagagcctggttctgagctctgccag

SEQ ID NO: 1885916 - DNA, 4001 bp, Homo sapiens
cttacatgatgtccctccctgacaatcccttccaacctctgtcagcctccttccccacaatcacacacacacacaaaaccacactgccaggaagggaagccattgagtgagtattgtgaatcctacaagtggctctgtagtttaaaagggcaatgcctgtgcctgaagaaaatttgtctttagcttcatcaggtgaagaaaattggttttataacacaaggcccaccaaaccagaaaagcccaggaacgcttctccaaaggactcacttagcacgagaaatcactcagagcaaactgacgcacacagtatttgtcaaatttttctttttcatttagcagaaggtaaggtaaaggactacaactgaagttaataaatgacactctagccattttgatcatttgtcactataaatgatagacatttaagctagttccatctggggaagtgaaacagaatcatgttcatataataagccagacgaaccaaattcagtggaatacgtgcacccaaaactggaccagacttgtacttaatgcagcctgcaaatccccaagagtccacgacagaatacaagaacagtaacactggtttatctcaactcatcttagctccctcacaaacttgccaataatgacctttcaagaactgcaccgttggtcctcatctgggcaatcccgtggcttagaaaaactgaataaagtgcttcttcgaaaaataaaacaatgcggggaggggggagtagtaacaaaaaaaaaggcacactggtttttactgtactgaagcaataaattctccaactaacttcattaatgagtatcagcaaagaatgaacaccaaaataccgctcaatccaactttcatcgtgaattcttgaattcacagtaggatcattaaatgtgacggtatcactctgctataaaaactatttccaaaacaaaacaaacctatctaccccctttcttgatttaaaaaaaaaaaaaaagaagaaagaaggaaaatttgagggtttttgcttttttcaacttcacataccggtttgcctttgcaaaaaaaaaaaaaaaaaatgtttagtctcaaagtatagctgcaaggtggaccggctgcacgggtcccagagggccgctcgcctccgacggtcgcagtttcagccgggccgcgcccgcgagaaacagcggagaggccccagcaggcgggcgccgccggacaggtttaccgtccgcgtcggccccggggaaccgctccctcgcgcccgcagcacttgttcgcggcgcggactccacaccgcggccgcccgccccaggggaggagtgagtccgccccagcggcgccaacccggggacccggggcaagggttcggggccatccgccgccgggcgcgccccccatccggaaagcggcgacggcccccaagttgggctgcggagtgggaggcgcgccgagccccaagcagacaatgcgggagaagggtgatgcgcagggaggaggggtccgcaaagctgaggtccccgcgccgcccggctacccatccgtgccgcccgcccctgaagccccgcgcagcccccgaccctcctctggggcccgccccaccgagcggccgcaggggacgggccgcgctccgcaccccgacccctcctcaaatcacaaaacttcccccaactccgccaactaagttgcgctctcaccgtgcggctcccggggctcccccgcgggccgagccgagacagctcctcaccttcgccgcggagaaagacaataggctgcctctcccccggcggcggcagcagcggctgcggctaaagcggcggcaaccgaggcgagcaatgggcacggcggtctcggccgagccgaggggcttcaccgctgctgttccggctccgcgacagctctgcacgtagccccagccaccccgcgcaccggctacaagccgcccgggggtggccggggcacgcaagagggcagtaacgtctgcgagtcctcccgtgagtacacgcggagcaagggctgcgagctgggattgcacggcagagctgcccatcccgctccacgagaccaatagtaaggcacctgggcggggcgctcaggttgctaagggaggctgaggttgaccgccggggctgctctgtggcaaagtgatcacagcagggtggctggcagagactgctctgggaaatgcccactcacggtctcctctccgccctgtttctagaaactgccctttctctgtgtgctcgtggttacctgagctgtagcatttaaccacacatcgtgaaatgatttactcctctatttcccccacttcaactcaggaagtggggtttagtcttctgtgtccacagcctaggacagtctaaggtattaggtattaaatataggtattaaacaagtgttggatggatgcacggcgctatggcggaatcacaattgtgacagtgcattccgtgaacttttggctactcgatcaccacagtcgttccgtgttcaagctgcaaaggacctcagaaatcatcggattgctttgagaaacaaaatgtggtccgtgtaccaacggcggccgaggagaatatattagctggtacacggagaaacttcttttttcaaatagttaagtgttttagtgctcattaggagggaaatgcctatcacgtcaaatcattgtttcattaatgttacttcttaggtcaaataaaaagtggcaaaaaacaagtgtatttcaagaaaagtgttaagtgaaacttgagacactttatatgcagttcaagaatgtaaaatactagttgacagtgattgaagtaagaacagttggttaggtaggaggagaagattattggctgggaaggaggaggagggaaccctctgtggtgctgattctgtattttgacctgggtgatggataacaaaagtatgtacatcaataaaaaatacatccagtgcactttagattagtgcactttacacattttatacatgtatttttaatgtcaatttttaaaaaatctggtatggtatatacccccacaaccccccccccaaaaaaatgcaaagatgcaaatgactgccatttgggaaacactgatccaggcaggctcactagcagtgaccaaacacctgagaaagggtattgtgaatacctgatgtatgtgccaggaacttccatggttgaatagctccaaatctcagaaatgctcctaacctagtgttgagctctggtgcatagatatattttcttttctttctttcttttttttttttttttttttgaggcagagtttcactcttgttgcccaggctggagtgcaatggcacgatatcagctcactgcaacctccgcctcccaggttcaagcgattctcctgcctcagctgcccgagtagctggaattacaggcacatgccaccaattccagctaattttttgtatttttagtagagacagggtttcaccatgttggccaggctggtctcaaactcctgacttcaggtgatccacccacctcggcctcccaaagtgctgggattacaggcttacaggtgtgagcctcagcatccaacccagaatagcttaaaaaaaaaaaaaagccaggcatgcccagttcttcatgtgaaattatttctgtatcacctcatcatgctgctcaccctcttccactgttctctaatttgtccttgttgatatttaaaagctggcacaaggccgggcgcagtggctcacacctgtaatcccagcactttgggaggctgaggagggtagatcactagagcccaggagttcgagaccagcctgggctacaggtgaaaccccatctgtataaaagatacaaaaattagccaaacgtggtagcccaaatcccagctacttgggagaccgatgtagaaggatcacttgagcccaggaggagaggttgcatgagccaaatcagcagggcagctgcagagtggggtgcaaggtcctcaacccagaggttccctaggccccacttgccccagctcatgagagcctggtt

SEQ ID NO: 1885917 - DNA, 4001 bp, Homo sapiens
cttaacaattaccctctactgccccttgggccccctgtcgccaggaccctggcccgccgagactcacatccccaggtgagtggtaaccaccagaagtggctgtgtcagggctactgccattgattttctttttcctgttagctcctgctggaatgccagggctcttcctctgccaatatgcttttaactgtgggaaagaagagcggtaacactcatgagaatgatcagcccctacagccacatcctcctttacagttttgacaaaatacccttatataccatctgatgtaatgccaccaacaactgtacaaggtgttgtcacaatcacttagtgactgagagggattgatatcatggatagaaaaaaaaaaaagaaagatcaaaaaaggcaatactggaacttaaactcagtcctctgactccaagctctggggttttgccatgaatcagcagcttccagggaccaaaaccaggggcagaggtagaaaagtaaacattaagcaggcaggaactgtaggccgtgtggtttagagtcatacatcctcacaggtctgctagcgtgaagaagcgtaccagtacctctcacactttcatatcaatgtgtcctcatggcagaaggcagcttttctattaaatctgggaatttatcagaaagaggacaacccaagcctcatttcagagcgaagtctggtgtacgcttggaaacctatgtgtctgtcatccctaagtacattaatgcattttctcaagagaatcaagggaaaatgatgcttcagaaagatgtcccacatttatcctgtggcactcaaagtaccccaggttgagacgatatgaggaagattcaagctgtcaagttcagtttcccaagatctattccacagaagatgagcaaatctcacttcagaggccactgactgaagggcagtctggtcccagaaccgtggagaactcagaaaaaaatgttaaagtctctctggaaagtagaagcctgggaaaaaaccaaaccaaacccattctcccattgccacccagagatactgtgaacattttgagctcacaggggaagtgtaggatttttcccactgtcaatgtctatgttgagggagtaaggcagcctgaaacctcttgctcctaggtcccatagtctccactccccttccagctggaaatttgtgctgcaaccagaggaaccagaaatggggtgagaaaacttaggggactgggttgtaagatcaaaggccggtcttgcagcagtaatgacagttcctaggggcactgtgacatcattgcattccactcctcccaggggaggggaccacatcagcgcgatgtccgagtcgctgctccacgatgggggagggaaacacacggtttcgacccaggtcctcagagacgccagcccaagaagcctagggaggtcgagcttggggcagcaggaggggagggcagagtctgcagtagggagccccgggagtcaccagcccaaagccacccagggatgactggtgagggcagggcctggggctgggggacccaggtcctgggagacgcaagcccaaagagcccagggaggttgggcttggggtggcaggaggtgagggctgattatggagcagggagccccaggagtcacctgcccaaagtcaccctggggtgattggcaagggcagggactgggctgcttgctgaaggggtggggctgactgactaggctttggttgggggagcccagaggggctggggttggggggccccatctggtatgcctcaggagtggtatggactctggcaccggtcttgtcatcggaggggatctgtggctgggttgggggccatgacctggtgtgttttacctttttcttggctgcggccaatttcccctgttgtgttttttctgacatcgcggggtggggagggaggcggggttggggccacatcagcgaaataccagtgagcacactgctcaatgcctccagtcacctaccaggcagctgtgcaactgagccacaggtggcgtaaccagggcaccaatggaacgcagaataggggcgtggccttaatgctccaagcccattggtcagtgagaaagatgaaagggaaaggaggcgtggccaggcagcagcatgtccagagggacctgtggcatcataaggaaagctgcccatgcaaccgctgtccccgcccactcagagaaaggggaggggccgcccactctgggagaggggaagggctgggttttgctttaaaacttttaaaactgtaaaaaataaactttaaaaaatatatgtgtatatactttatatatatgtgtgtctgtgtgtgtgtatctatgtgttcctccagagctgtcttcattatgcagcttctgtgcaaagtctgtgattttggcctatatttttcatcttcaaatggagtacaagaattaccagtattaccttaactgagatatagatcctataaaaatggaaaatccatagcatgcttgatgattaatgaagccgactatagtatccaacattccaataagacaaaataatcacaacaatttctcttttttggaaaaatgtttgtcttattctcctacattattgttaagatttcttttaaaaacaagaaacatgtctaatatctttaaaaacacaaagcttttgggccgggtgcggtggctcacgcctgtaatgccatcactttgggaggccgaggtgggtggattgcctgaggtcaggagttcgagaccagcctggccaacatgaagaaaccctgtctctactaaaaatacaaaaactagccaggcgtggttgcgggtgcctgtaatcccagctatttgggaggctgaggcaggagaatcactggaacccaggagatggaggttgcagtgagccaagctcacgccactgcactccagcctgggcgacagagcaagactccatctcaaaagaaataaaataaaatacaaaataagtaagaacacaaagctttcaatttaataaccacttaaagctctttactggtttaagagaaatacaaggcccatttttctagaatcacctggcctctctaagccttgcaaatgaagctgaatttctcacttgatacttggctatcacttgcagtcatgaaaaccaagaatttgttatgtcactgtgtattgcttgttacctgaaatccacactaggctgggatcaagggttgaatctttcatgattttctccataacctgtgtgcttcttatcccacaccaaactaagctttttttctagagctctgcaacttacagttagtatatgagagcagttctcaaaaatgtagtctctggactagcagctccagcagcacctgggaacttcttataaatacacatcctccggccccaccctggacctgatgaatcagaaactctggagtagggctcagcaatctgtgctgcagtaatccctccaggtgttcaagaacctctggcatacagcaggtagaaaaatgtgtttccttctgtaggtccaaaaccagggatactatatgttttctctatatgaaacaatgacgtgcaattaaaagacataaatctccttcctgctcccaccttccagccaatgtgttttatttttatgagttaaataagaaaacaatcagagatttcgtctaaatcgcatatttacaggtatcagttctcatccagcctgatcttatccaatatcatttatattctcttacatgtgaagttttagagaaggatcttcacaatgtaagactcaggcacactagcagttctgtaataaaacaccaagtagatcagaatgtccaaacttactggagaagaaaagtggaatcattggctatattttcaaattgcaataaacaggatattaaagttttgaatttttttcaccttcatccttccacgttaatagaattaagccaaaatacttgtcttccaaagcctctagccaggcaaaattttactatattacttcttgcttttcaatggctataaagcagactcc

SEQ ID NO: 1885918 - DNA, 4001 bp, Homo sapiens; identical to SEQ ID NO: 1242078

SEQ ID NO: 1885919 - DNA, 4001 bp, Homo sapiens
atctttaaatctcagactctcagagcaaacagaacctctgatactctaactctacctcctcaggaaacggaagcccaaagaggaggggagcttacagcaggccctggactagggattaacacaaaaacaacagcaacaaatctgatttaagcttcacacatgtaagtaaaacattaccatccccattttacagatgtgaaaagagaggcccaaagagctcgagcaattttccctaaaccgtgtccctcgcagttggagagagaagtaggactcaaacccagaattcttagccagtacccagcagttcttccttccacaatcttaacagttaccctcgacctcccccttgtgccccttgtcctcaggagaccggccagccaagactcacatcctcaggcgagtggcagccccccgaagtggttgtctcagggttagcgccatgatttattttcttctttttggtgtcggttgctccggtaccaacaccagcactgttccactgatgatagtctgtaaactgtggaaaagaggagcagtgatactcatgagaactacaagctcctacagtcactttacagtttatacaaaatactctcatagacgatctgacttaatgccaccaacgactgtacgaggtgttgtcgcaatcacttagtgactgagagggattgataccatggctaaaagaaaggcaataatggaactgaaactcagtcttctgactctgagctctggggtgttgccacaaatcagcagctgccagagaccaaaaccagaggcagaggtagaaaagtaaaaagtaggcaggaaggtgtacactgtgtggtttacagtcgtacatcctcttagagtcatgtatcctcagggcagaaggcagcctttctgttaaatgtgggaattaaacagaaagaggacaacccaagctgcatttcagagagaagtcttgtatactctttgaaatctatgtgactatcatccctaagaacattaatgttttgtgtctcccacgagaatcaaggaaaactgatgcttcagaaagatgccccatatgtatcctgtggcactcaaagtaccccaggttgagatgagatgaggaagattcaagttgtcaagtccagtttcccaagatctcttgcacagaagatgagcaaatctcacttcaaagatcactgactgatgggcactctggtcccagaaccatggagaattcaaatatgaagtggagaacttagaaaaaactgttaaagtctctctggagagtagaagcctgggagaaaaccaaaccaaacccattatcccatcagtgctgtgcccaagttgcctctttgagattggcatggggtcacagggttgggacccaggtacttggagacgtgagcccaaagagcccagggaagtcaggcttggggcagcggtaggtgagggccgagtatggagtggggagccccaggagtcacctgcccaaagtcaccctggggtgactggtgagggcaggtgctggggcatccggttccttgggaacgtgagcccgaagggcccagggagatccatttttggacaataggaggtgagggcagagtacaaagcagggagccccacgagtcaccggctgaaagtcaccctggggtgaccggtgagggcaggggcaggactgctgaggggttggggctgacacaagattttggttgggggagcccagaggcactggggggggcccggccctgcgtgcctctggagtgacacggattctggcagctgttctgccatcagaggggacctggggctgggttggggttggggtgctgcaatccgatgcgttttacctttttcttggtcccagccaattttctttgttgggttttttcggacatcatggggtggggagggtggtggggttggggtcacattggcgtgatccaggcgaggacagtgatatgcctccagtcacgtaccacacagctatgtgactgagccacaggaggcgtcaccggggctgcactagaatgcggaaaaggggcgtggccttaatgctccaagcccattggtcaatgagaaagatgaaagggaaaggaggcggggccaggcagctgcgggtcatgaaggtcctgtgatgtcacaaggaaagcctcccatggaactgctgtccccgcccactctgggagaggggcggggctggctttcacttacttttttttttttttacatatataactttttattataatttaaggtatagtcgataatataatgtttttttttgttttgttttgttttgttttttttaattgatcattgggtgtttctcgcagagggggatttggcagggtcataggacaatagtggagggaaggtcagcagataaacaagtgaacaaaggtctctggttttcctaggcagaggaccctacggccttctgcagtgtttgtgtcccggggtacttgagattagagagtggtgatgacttttaacgagcatgctgccttcaaacatctgtttaacaaagcacatcttgcaccgcccttaatccatttaaccctgagtggacacagcacatgtttcagagagcacagggttgggggtaaggtcacagatcaacaggatcccaaggcagaataatttttcttagtacagaacaaaatgagaagtctcccatgtctacctccctctacacagacacggcaaccatccaacctctcaatcttttccccacctttcccccctttctattctacaaaaccgccattgtcatcatggcccattctcaatgagctgctgggcacacctcccagacggggtggcggccaggcagaggggctcctcacttcccagtaggggcagccgggcagaggcgcccctcacctcccggacggggcgactggctgggcggggggctgacccccccacctccctcccggacggggtggctggccgggcagaggggctcctcacttcccagtaggggcggccgggcagaggcgcccctcacctcccggacggggcggctggccaggcggggggctgacccccccacctccctcccggacggggcggctggccgggcgggggttgacccccacctccctcccggacggggtggctgccgggcggagacgctcctcacttcccagacggggtggctgccgggcggaggggctcctcacttctctgacggggcggctgccgggtggaggggctcctcacttctcagatggggcggttgccaggcggagggtctcctcacttctcagacggggcggccgggcagagacgctcctcaccttccaggcggggtcgcggccgggtagaggcgctcctcacatcccagacggggtggcggggcagaggcgctccccacatctcagacgatgggcggccgggcagaggcgctcctcacttcctagatgggatggcggccgggaagaggcgctcctcattttccagactgggcagccaggcagaggggctcctcacatcccagacgatgggcagccaggcagagacgctcctcacttcccagacgatgggcggccaggcagagacgctcctcacttcccagacggggtggcagccgggcagaggctgcaatctcggcactttggggggccaaggcaggcggctgggaggtggaggttgtagcgagccgagatcacgccactgcactccagcctgggcaccattgagcgctgagtgaaccagactccgtctgcaatcccggcacctcgggaggccgaggctggcagatcactcgcggttaggagctggagaccagcccggccaacacagcgaaaccccgtctccaccaaaaaaatacgaaaaccagtcaggcgtggcggcgcgcgcctgcaatcgcaggcactcggcaggctgaggcaggagaatcaggcagggaggttgcagtgagccgagatggcagcagtacagtccagcttcggcacagcatcagagggagaccgtggaaagagagggagagggagaccgtggggagagggagagggagaggg

SEQ ID NO: 1885920 - DNA, 4001 bp, Homo sapiens
tattcctgtaaaacatttttttttttaaagtttagagttacttaagaaggttatgtaaacaagttaaccagcaagccacaacttgggtctgcggtgtcagagaaaacatgcaaggtgcaagagaatgaggagctgatggtcaccagctttacctccttccagcacccactcctgctcacacacactcacaccccgtgggactcagcctgcagcttctcccagcccaagagccagacagtggggaggagcacagaccacacttcctaacaaatgagagggaagacttcgtgccccattgctactgccatcacccagtcccagcccagagagggagcccactccaagggcccccctgccagtactgctagagcccaccgagggctgccagcacacagctacgagctccagctttatctactcacgccctggacactgcccggagccccagcaggttccacgtgtccttgtcaccccagccctcctgccccgcggatcctaagctcaggagaccctctccagcccaggctgtgggggaaggcagcccccacggtcacccaggaatcagcgcagagtgcagggcatcctggactccccggactgggaaacccagttcctgtccccctgcgtagtggccacacctctgggaggggagaaacccctgcctcacctcactggagggaccctgacccagaggcctgagaaaaagccaccggcaggctcctggcacctgccaacctgcaccttaggaaaacttgtcccacttcaacctgcaaagctctcaggtcattacttctaaaaccactgtcctttctgaaacaggaaggaaaatagaaaaacaaacaaaaacaaagaggcacagaaggctgaagacgccagaggcagtttagcccaaaaacaaagtgccagacacaagatgccaagtttggggcgcttcctccaccgcatgcctgtttaggagctgactgcactcaaccacagatttacgtctggtgcctgccaggtcgttatctgaagagatctgaaaaagtaagcctttcttctgccagtaaatactaagttaagactagcaggcccctctaaggctctgctctccactggggtgctgcaggacaggcccctccgcgggcgttccccgcaccctccctccgcgtcggcccggagaaaaggaagttcgcccctagcctgggcttaccaaggcccgccgcccgacccatggagccctgcttggggaccgggggcctcgatgttctccttcaccatctgcggccagatctccctccagcagccttgccaggcagtgcctggcgtggagaaggggccctgcagaggcgcaggtccgcaccgtgcccccaacccggcgcctgcagcccaggggcaacaaggtgtggggtttttgagtttttccctctgggccttattatacagggaaagggaaggggcgaagatccgggctcgagttctcccagggaagtgaacccagaggcgatcccaaactcagtagttgccgcccggcacggggacttgatgccggcgccaagccgggcagcggaacgcaccagcggcccgaccagcccggcgagacgcgagcgggcggccccgccagacagcgccacttgccggcgccgagagtggcccctcgccgcggtgagcccctcccgggatgcgaaagccatcgcctagtccccgccgcacccgcccgcccatcgtgggaggaggatgggccggtccgagaggcgtaaggccgccgggctgcacccctagatcccagcggcggcctccccgcagccccgccgagtccggggggcagcgctcgggagctcttggcccgcagcttacgcgccgccccccacgcgtccgggtccccgcggcgccgcgggcggcccaaggctgccgccgccagcgagtcaggcagccgaggttccccagcttacctggccagggcgcggggctgccccggtccgccgccgtcctcgccgcgccgccgtcctcgccgcgccgccgtcctcgccgcgccgccgtcctcgccgcgccgccgtcctcgccgcgccgccgtcctcgccgcgccgccgtcctcgccgcgccgccgtcctcgccgcgccgccgtcctcgccgcgccgccgtcctcgccgcgccgccgtcctcgccgcgccgccgtcctcgccgcgccgccgtcctcgccgcgccgccgtcctcgccgcgccgccgtcctcgccgcgccgccgtcctcgccgcgccgccgtcctcgccgcgccgctgccgggtctctcccgggggctgagctcccgcagagctcgcgcctagccgcacacctcgactgctgattagcccgacagctgaatagcggcgggagcctaccgcgagcggagtacggaaagcccgcagggccgcgccacatggcgcacgcgcactgagctgcatacctaggtgacaaacgtgcacgttttgcacgtgtatcccagaacttaaagcatgacaaaatttttttttaaaaaaccctgatgccattattaggaacaatttgaatagatcagtcacaacctatatgctggcttctggtgtctcaatttgtcctgggaaaactgttgtaaagcaatagtatgtcagtccttatatacttatccatctccaatctggaaagacaaggcttatatgtttcctttttagtcccctaatttctctttatgacacaaatccagttggcagtattaaagatggggctgattctcctttacttatctggaatatgctaccattccagataagtaatagtaaaatggccatttcctcttgctaatcaaatgtcgtttttgaacacaaaagccactgggtttggagtatgaaacataaacataaaacatatcatacactatctgtgacgttttcataaactcacatgatccttttatatttttctcttatataaaacgaaatactttccattaaaaattgagatatttaaatgagaaaatgcttgccaatgttattaaaatataaaattttattatttattcaaagaaaatggtcacttttggtttgtgctaaaaaataacagtaacagtagaagcctgctttaaaatattttaagtgtgcgatatcatattacttctcatttactctttgcgtttctagagagccaagtttatttttttctcaattcagtttaaaatcagagggaacaaaatttgaaacgtgacataatatcaaggttaacatgctagctatgtaataactgtaaaatttggccacaaatgcatttgctttgagaaaaatgatcatgtgaaattcctaaatatttgggccatatggaagatgatatcagaagaataatatattctctgtatgtcaaaggaggaggataataaaaaccgtagttattaggttagtacaaaaacaattacagtattcgccattgccaaaaattgcaattgcttttgcaccaaggtagtaataaaagtatggttgagtttctgtagaattccggcaaaggatgagcatccttaatctgaaatccaaaactctcccaaattcgaaattttttgggtgcccatatgatgcctcaagtacaaaattctacacctgacctcatgcaatgtatcatagccaaagcacaggtacacaacacatagtttattcagtgctttcaagagaaaattaaaattaacatgaggctacatgtaaataaattttgtgtttagacttgggtcccatcccaagatctctcattatgtatatgcaaatactccaaaattcaaaaaaattcacaattttggatttttcaggtcccaagcattttgattaagagatactcaacctgtccctgtttggaagcagttccctctagatagattaaactggcctaacaaaaggtagtatctgttgctggagttgagaaagaataaatatttacatacaaaagtgagggcaaaagaagactacaaaaacattcttattgaaattaaataaaattatgcccttttctctgtgtagctctttggccagtt

SEQ ID NO: 1885921 - DNA, 4001 bp, Homo sapiens
ttgatttttttttttttaaaggttagagctacttaagaaggttatgtaaacaagttaaccagcaggccacaacttgggtctggggtgtcagagaaaacatgcaaggtggaagagaatgaggagctgacggtcaccagctttacctccttccagcacccactcctgctcacacacactcacactccgtgggactcagcctgcagcttctcccagcccaagagccagacagtggggacgggcacagaccgcacttcctaacaaatgagagggaagacttggtgccccattgctactgccatcacccagtcccagcccagccagggagcccactccaagggccccccaacagtactgctagagcccaccgagggctgccggcacacagctgcaaggtccagctttatctgctcacgccctggacactgcccggagccccagcaagttccacgtgtccttaacaccccagccctcctgccccgcagttcctaagctcaggagaccctctccagcccaggctgaagggggaggcagcccccacggtcacccaggaatcagcgcagagtgcagggcatcctggactccccggactgggaaacccagttcctgtccccctgcgtagtggccacacctctgggaggggagaaacccctgcctcacctcactggagggaccctgacccagaggcctgagaaaaagccacctgcaggctcctggcaactgccaacctgaaccttaggaaaacttgtcccacttcaacctgcaaagctctcagatcattatttctaaaaccactgtcctttctcaacgaggaagaaaatagaaacaaacaaacaaaagcagaaagaggcacaggaggttgaagaggccagaggcagtttagcccaaaaacaaagtgccagacgcaagatgcgaagtttggggcgcttcatccaccgcatgcccgtttaagagctgactgcactcaaccacagatttacgtctggtgcctgccaggtcgtatctcaagagatctgaaaaaataagcctttcttctgccaataaatactaagactagcaggcccctctaaggctctgctctccactggggtaccgcaggacaggcccctcggcgggcgttccccgcaccctccctccgcgtcggccccggggaaaggaagttcacccctcgcctgggcttaccaatgcccgccgcccgacccatggagccctgcttggggactgggggcctcgatgttctccttcaccatctgcggccagatctccctccagcagccttgccaggcagtgcctggcctggagaaggggccctgccccttccggggcaggtctccgggaggggcaggtccgcggcgtgcctccaacccggcgcctgcagccccggggcaacaaggtgtggggtttttaattgagaagtttttctctctgggccttattatacaggaaaagggaaggggcgaagatccgggctcgggttctcccggggaagcgaacccagaggcgaccccaaactcagtagttgccgcccagctcggggacttgatgccggcgtcaagcggggcagcggaacgcaccagcggcccggccagcccagcgagatccgagcgggcggccccgccagacagcgccacttgcccgcgccgagagtggcccctcaccgcggtgagcccctcccgggatgcgagagtattgcctggtccccgccgcacccgcccgcctgtcgtgggaggaggatgggccggtccgagaggcgtaggccagccgggctgcacccctagatcccagcggcggcctccccgcagccccgccgagtccggggggcagcgctcgggagctcttggcctgcagcttccgcgccgccccccacgcgtcggggtccccgcggcgccgcgggcggccccaggttgccgccgccagggagtcaggcagccaaggttccccagcttacctggccagggcgcggggctgccccggtccgccgccgtcctcgccccgcagccgccggctccgtccgggaggctgagctccttgagagcccgcacgtagcggcacaccgcgactgctaattagcccggaagctgaatagcggcgggtacataccgcaagcggagtacggaaagcacgcagggctgccgctacctggcgcacgcgcactgagctgcggctgccgagcccgcgccccggtccctgccgctttacctcacccgctcttggatcactggggccgggaaacgcttcccggcgacaccgcgcgcggggaagagagggaagaaaaagatgcgtccgtgccgggcgttcacgaggccctgcggcccctggccccggcactgggacatcggcagggcgggcgggtgcacccaggacccgggtccagccgggaggatctacgggaccggggctggaacccagacgttggacggctcagcgccccgaacgtcccgggccctggggagcacacagatgcccgaagcacgtcccggccttgctggctggggagttgcaggggtctggtctcgcgggtaaagccggtgaacgcgaggctccgcatcctgccccggccgcggcgctgcgccctgctcgctctgcccggtgcagctgtaagcggggaccttagagctaggaaccctcggggatcgcggcctccgaaagccccatcgggcaggggaggccccctgctgcctccccaccgcagcacccctaggcgcatgctggactccaagtcttccctgctggtccccagtaaccaccctagcaccccatttctgatactctgctgctttagcccccagccccagggcctcactccaggcctttctctccttgctgtcctgaatggagaggaccctgacctccgcggggccctggggagcacacactcccagacactcacacacatccccaggagagccggtcttccgcccccacagcgcgagaaatcgaaatcccctggaggccctgggcgaaggtcgtgctggagactccggtgtcaccttcggccctctggccctttcattgagtcccaggcagatgtggtaagccgtgggagaggcacaaggtgcctagtctgtgcagagtgggacctcagctgcctcgctcccccaaatcctggtgatttgccctcgttttcttttctccttgtggctggactaggcgaagctgtggcatgggaagttctgaagacgggggggggggcgggggggagggggagcacagaaggacagggggcctgggggttgaggagagcccatcttcctgctgccctgagggcctgacctgagaccctgaggagaacgggctggggaaaaccaaatcctgagctgcactagggttagatacagtgtggacttggcctctgcacaccctgagcctgagttaggacagcagctgtgaaatgaatgggattcaagatggggtctgataaatcacatttatatcctcttcttccattcaactaatggatcagtgtttttaaaagtctaagccacataacaaagagggcagaaggaagtcgttagcagatgaatgatttcatctggaagatgaagaggatttagagatctatgggatagattcgagggcacaaggccagaacatacgaagagggtctggagcccgggggcgggggtggctgacccgtccgtctgtgagaacctcagggagcctccaggctccagtgcagtgcaggtatcacagagggcagagtggaaatgggactggaacaggtagaataaatgaagatccagcatggacaattaatgcccctccccccaaatcatggatgcagccagtcacttaccccaaagaaaaaaatcagagattctctccaaagagagttgtgtacactgcctggtgagagtgggtgctgctagtgtagttgtcggtcctctggaggaagcctccctaccgtggcatttaaaggtccaccagtgtaatgactagctcccactctaagctctccccacatgcacataaccaccatcagcctgtccataaaactcctttag

SEQ ID NO: 1885922 - DNA, 4001 bp, Homo sapiens
caagactcacatctccaggtgagtggcaaccaccagaagtggctgtctcatggatgctgccatttgttttcctgttcctcttggctcctgctggaacaccagggctgtttctctgccaatattcttttaactgtcagaaacaagagcagtaatactcatgagaactatcagcccctgcagccacatcctcctttacagtttttataaaatactcttatacaccatctgatttaatgacaccaacaactgtacaaggtgttgtcacaatcatttagtgactcaaagagattgatatcatggctagaaaaaaaaagaagaaaagaaaaaggcgacagacgaactttgaaactcagtcttctgactccaaactctggggtattaccaagaatcagcagctgccagggaccaaaaccagaggcagaggtagaaaagtaaacattaagtaggcaggaactgtatgccatgtggtttagagtcatacatcctcacacgtctgttagtgtgaagaagtgcaccagtacctctcaaactcttatatcaatgtatcctcatggcagaaggcagcctttctgttaaatctgggaatttatcagaaagaggacaacccaagcctcatttcagagagaggtctggtatactcttagaaacctatgtgactgtcatccctaagtacattaatgttttttctcttgatctcaagagaatcaatggaaactgatgcttcagaaagatgtcccatatgtatcctgtggcactcaaagtaccccaggtttacataatatgaggaagattcaagctgtcaagttcagtttcccaagatctattccacagaagatgagcaaatctcacttcacagaccactgactgaagggcagtctggtcccagaaccatggagaattagaatgtgaggtggagaactcacaaaaaatttgttaaaatctctctggaaagtagaagcctgggagaaaaccaaaccaagtcaaacccattctccagttgccatccagaggtactgtcaatgttttgagctcacaggggaagtgtaggcttttcccgctgtcagtgtttatgttaagggagtgaggcagcctgaaacctcttgctcctaggtcccaatctccattccccttccagctggaaatttgtgctgtgacaagaggaaccagaaatggggtggcaatgcttaggggactgggtcataagatcaaaggccagtcttgcagtaatgacagttactggatggaccgtgacatcactacattccactcttcctggtgagggggagggaccacatcagcatgatgtccgagtcatcgctccatgataggggagggaaaaacagagctgggacccaggtccttggagacaccagtgcacacagcctagggaggtccaccttgaggcagcaggagggaagggaagagtcagcagcagggagccccaggattcaccagcctaaagtcacccagggatgactggtgagggtggggtctggggctgtgggacccaggtccttggagatgtgagcccaaaaagccctgggaggtcaagcttggggtggcaggagatgagggcccagtaaaggagcggggatccccaggattcacctgcccaaagtcaccctggggtgattggtgagggcagagactgggctgcttgctgaaggggtggggctgactggcaaaactttggtgggggtagcccagaggcaccggtgtgggggtcccagtccggtgaacctcgggagtggtatggactctggcagcagtcttgtcgttggagaggatctatggctgggttgggggtccgtgacctggtgtgtttttacctttctcttggctgctgccaatttactttgtcgagtttcttctgccatcgcagggtggggagggaggcgggcttggggccacatcagcaaaatcccaccaagcactgatcaacacctccagtcacctaccaggtagctgtgcgactgagccagaggaggcgtaaccagggatgcagtagaaggcagaataggggcgtggccttaatgctccaagaccattggttaatgagaaagatgaaagggaaagggggcgtggccaggcatcatgtgtccagagggacctttggctcacgaggaaagctgcccatgcaaccactgtccccacccactctaagagaggggagaggccgccaactctgggagaggggcagggccggcttttgctttaaaagcttttaaaaaatatatatgtgtatactttatatatatgtgtgtctgtgtgtgtgtacctgtgtgttcctccagagctgtcttcatgatccagcttctatgcaaggtctatgattttggcctatatttttcatagagtacaaaaattaccagtattaccttaaccgagatacagatcctatgaaaatggaaaatccatagcatgcttgatgattactgaagcagactatattatccaacattccaataagataaaataatcacaatgacttctcttttttggaaaaatgtttctcttattctcctacgttattgtgaagactttttttcttaaacaagaaacgtgtgtaatatttgtaaaaacacaaagcttttgggccgggtgcagtggcttatgcgtataattccagcactttaggagcctgaggctggtggatcatgaggtcaggagattgagaccatcctgactaaaaaggtgaaaccacatctctactaaaaatacaaaaaattagccaggcgtggtggtgggtgcctgtagtcccagctacttgggaagctgaggcaggagaatggcgtgaacccaggaggtggagcttgcagtgagctcagatcgtgccactgcactcgagcctgggctacagagcgagactccttctcaaaataaataaataaataaataaataaaacttctatttctttcactttctaatataattttaatatctcctcctgggatttcactaagacacattttggacctcattctgatcttcctctcccctccaagcccaccaacttctgccctatcatctatcctcatgtctctctgtgtgacatgctgacttactttttggagagaatcgtctaaacaattaattctttcttctcgtgtctaatccatccactagtttcttatttcaacaattacatttttatttccttatttcattttattctgagactgagtctcattctgtcacacaggctgaattgcagtggtacgaacctgcagactcggcctcctgggctcaagtgatcctcccacctcagcctcttgagtagctgggactataggcaggtgccccatacccagttaataccatacccacacagcagagacataaaagatttccatcctcaaagaaggttccattgaacagcactgctctaattcaataaaaaataccactgagcacaacatagtaatagaaaagattgaagaggcagtgctgatacttaaaaacctggtattttcagccaggcatggtggctcatgcctgtaatcctggcactttgggaggctgaggtgggaagatcgcttaagcccaggagttctagaccagcctgggcaacatggtgaaaccctgtctctacaaaaaatacaaaaaattagctgggcatggtggcatgtgcctgtagtcccagctacttgggaggctgaggtgggagatcacccgagcctgggaggtcaaggctgcaatgaggtgagatggcaccaccacactccagcctgggtgacagagtgagaccctgtctcaaaaacaaaaaacaaaaaacaaaacaaaaacacctgatatttatttttaagtacactattttcaaacattcagaagttatttcatcctaccttcatggtttccattctatgcctggtttagaattgggatctgataaaataaacgtgttcaacagaaccacttctcatggctgtataacagatgatcaatatgtatttgctgaggaaatcatacaattttcttaaatttttttaacaaaaattgt

SEQ ID NO: 1885923 - DNA, 4001 bp, Homo sapiens
aagactcacatctccaggtgagtggcaaccaccagaagtggctgtctcatggatgctgccatttgttttcctgttcctcttggctcctgctggaacaccagggctgtttctctgccaatattcttttaactgtcagaaacaagagcagtaatactcatgagaactatcagcccctgcagccacatcctcctttacagtttttataaaatactcttatacgccatctgatttaatgataccaacaactgtacaaggtgttgtcacaatcatttagtgactcaaagagattgatatcatggctagaaaaaaaaagaagaaaagaaaaaggcgacagacgaactttgaaactcagtcttctgactccaaactctggggtattaccaagaatcatcagctgccagggaccaaaaccagaggcagagctagaaaagtaaacattaagttggcaggaactgtatgccatgtggtttagagtcatacatcctcacacgtctgttagtgtgaagaagtgcaccagtacctctcaaactcttatatcaatgtatcctcatggcagaaggcagcctttctgttaaatctgggaatttatcagaaagaggacaacccaagcctcatttcagagagaggtctggtatactcttagaaacctatgtgactgtcatccctaagtacattaatgttttttctcttgatctcaagagaatcaatggaaactgatgcttcagaaagatgtcccatatgtatcctgtggcactcaaagtaccccaggtttacataatatgaggaagattcaagctgtcaagttcagtttcccaagatctattccacagaagatgagcaaatctcacttcacagaccactgactgaagggcagtctggtcccagaaccatggagaattagaatgtgaggtggagaactcacaaaaaatttgttaaaatctctctggaaagtagaagcctgggagaaaaccaaaccaagtcaaacccattctccagttgccatccagaggtactgtcaatgttttgagctcacaggggaagtgtaggcttttcccgctgtcaatgtttatgttaagggagtgaggcagcctgaaacctcttgctcctaggtcccaatctccattccccttccagctggaaatttgtgctgtgacaagaggaaccagaaatggggtggcaatgcttaggggactgggtcataagatcaaaggccagtcttgcagtaatgacagttactggatggaccgtgacatcactacattccactcttcctggtgagggggagggaccacatcagcatgatgtccgagtcaccgctccatgataggggagggaaaaacagagctgggacccaggtccttggagacgccagtgcacacagcctagggaggtccaccttgaggcagcaggagggaagggaagagtcagcagcagggagccccaggattcaccagcctaaagtcacccagggatgactggtgagggtggggtctggggctgtgggacccaggtccttggagatgtgagcccaaaaagccctgggaggtcaagcttggggtggcaggagatgagggcccagtaaaggagcggggagccccaggattcacctgcccaaagtcaccctggggtgattggtgagggcagagactgggctgcttgctgaaggggtggggctgactggcaaaactttggtgggggtagcccagaggcaccggtgtgggggtcccagtccggtgaacctcgggattggtatggactctggcagcagtcttgtcgttggagaggatctatggctgggttgggggtccgtgacctggtgtgtttttacctttctcttggctgctgccaatttactttgtcgagtttcttctgccatcgcagggtggggagggaggcgggcttggggccacatcagcaaaatcccaccaagcactgatcaacacctccagtcacctaccaggtagctgtgcgactgagccagaggaggcgtaaccagggatgcagtagaaggcagaataggggcgtggccttaatgctccaagcccattggttaatgagaaagatgaaagggaaagggggcgtggccaggcatcatgtgtccagagggacctttggctcacaaggaaagctgcccatgcaaccactgtccccacccaccctaagagaggggagaggccgccaactctgggagaggggcagggccggcttttgctttaaaagcttttaaaaaatatatatgtgtatactttatatatatgtgtgtctgtgtgtgtgtacctgtgtgttcctccagagctgtcttcatgatccagcttctatgcaaggtctatgattttggcctatatttttcatagagtacaaaaattaccagtattaccttaaccgagatacagatcctatgaaaatggaaaatccatagcatgcttgatgattactgaagcagactatattatccaacattccaataagataaaataatcacaatgacttctcttttttggaaaaatgtttctcttattctcctacgttattgtgaagactttttttcttaaacaagaaacgtgtaatatttgtaaaaacacaaagcttttgggccgggtgcagtggcttatgcgtataattccagcactttaggagcctgaggctggtggatcatgaggtcaggagattgagaccatcctgactaaaaaggtgaaaccacatctctactaaaaatacaaaaaattagccaggcgtggtggtgggtgcctgtagtcccagctacttgggaagctgaggcaggagaatggcgtgaacccaggaggtggagcttgcagtgagctcagatcgtgccactgcactcgagcctgggctacagagcgagactccttctcaaaataaataaataaataaataaataaaacttctatttctttcactttctaatataattttaatatctcctcctgggatttcactaagacacattttggacctcattctgatcttcctctcccctccaagcccaccaacttctgccctatcatctatcctcatgtctctctgtgtgacatgctgacttactttttggagagaatcgtctaaacaattaattctttcttctcgtgtctaatccatccactagtttcttatttcaacaattacatttttatttccttatttcattttattctgagactgagtctcattctgtcacacaggctgaattgcagtggtacgaacctgcagactcggcctcctgggctcaagtgatcctcccacctcagcctcttgagtagctgggactataggcaggtgccccatacccagctaataccatacccacacagcagagacataaaagatttccatcctcaaagaaggttccattgaacagcactgctctaattcaataaaaaataccactgagcacaacatagtaatagaaaagattgaagaggcagtgctgatacttaaaaacctggtattttcagccaggcatggtggctcatgcctgtaatcctggcactttgggaggctgaggtgggaagatcgcttaagcccaggagttctagaccagcctgggcaacatggtgaaaccctgtctctacaaaaaatacaaaaaattagctgggcatggtggcatgtgcctgtagtcccagctacttgggaggctgaggtgggagatcacccgagcctgggaggtcaaggctgcaatgaggtgagatggcaccaccacactccagcctgggtgacagagtgagaccctgtctcaaaaacaaaaaacaaaaaacaaaacaaaaacacctgatatttatttttaagtacactattttcaaacattcagaagttatttcatcctaccttcatggtttccattctatgcctggtttagaattgggatctgataaaataaacgtgttcaacagaaccacttctcatggctgtataacagatgatcaatatgtatttgctgaggaaatcatacaattttcttaattttttttaacaaaaattgtgct

SEQ ID NO: 1885924 - DNA, 4001 bp, Homo sapiens
caagactcacatctccaggtgagtggcaaccaccagaagtggctgtctcatggatgctgccatttgttttcctgttcctcttggctcctgctggaacaccagggctgtttctctgccaatattcttttaactgtcagaaacaagagcagtaatactcatgagaactatcagcccctgcagccacatcctcctttacagtttttataaaatactcttatacaccatctgatttaatgacaccaacaactgtacaaggtgttgtcacaatcatttagtgactcaaagagattgatatcatggctagaaaaaaaaagaagaaaagaaaaaggcgacagacgaactttgaaactcagtcttctgactccaaactctggggtattaccaagaatcagcagctgccagggaccaaaaccagaggcagaggtagaaaagtaaacattaagtaggcaggaactgtatgccatgtggtttagagtcatacatcctcacacgtctgttagtgtgaagaagtgcaccagtacctctcaaactcttatatcaatgtatcctcatggcagaaggcagcctttctgttaaatctgggaatttatcagaaagaggacaacccaagcctcatttcagagagaggtctggtatactcttagaaacctatgtgactgtcatccctaagtacattaatgttttttctcttgatctcaagagaatcaatggaaactgatgcttcagaaagatgtcccatatgtatcctgtggcactcaaagtaccccaggtttacataatatgaggaagattcaagctgtcaagttcagtttcccaagatctattccacagaagatgagcaaatctcacttcacagaccactgactgaagggcagtctggtcccagaaccatggagaattagaatgtgaggtggagaactcacaaaaaatttgttaaaatctctctggaaagtagaagcctgggagaaaaccaaaccaagtcaaacccattctccagttgccatccagaggtactgtcaatgttttgagctcacaggggaagtgtaggcttttcccgctgtcaatgtttgtgttaagggagtgaggcagcctgaaacctcttgctcctaggtcccaatctccattccccttccagctggaaatttgtgctgtgacaagaggaaccagaaatggggtggcaatgcttaggggactgggtcataagatcaaaggccagtctcgcagtaatgacagttactggatggaccatgacatcactacattccactcttcctggtgagggggagggaccacatcagcatgatgtccgagtcaccgctccatgataggggagggaaaaacagagctgggacccaggtccttggagacgccagtgcacacagcctagggaggtccaccttgaggcagcaggagggaagggaagagtcagcagcagggagccccaggattcaccagcctaaagtcacccagggatgactggtgagggtggggtctggggctgtgggacccaggtccttggagatgtgagcccaaaaagccctgggaggtcaagcttggggtggcaggagatgagggcccagtaaaggagcggggagccccaggattcacctgcccaaagtcaccctggggtgattggtgagggcagagactgggctgcttgctgaaggggtggggctgactggcaaaactttggtgggggtagcccagaggcaccggtgtgggggtcccagtccggtgaacctcgggattggtatggactctggcagcagtcttgtcgttggagaggatctatggctgggttgggggtccgtgacctggtgtgtttttacctttctcttggctgctgccaatttactttgtcgagtttcttctgccattgcagggtggggagggaggcgggcttggggccacatcagcaaaatcccaccaagcactgatcaacacctccagtcacctaccaggtagctgtgcgactgagccagaggaggcgtaaccagggatgcagtagaaggcagaataggggcgtggccttaatgctccaagcccattggttaatgagaaagatgaaagggaaagggggcgtggccaggcatcatgtgtccagagggacctttggctcacaaggaaagctgcccatgcaaccactgtccccacccactctaagagaggggagaggccgccaactctgggagaggggcagggccggcttttgctttaaaagcttttaaaaaatatatatgtgtatactttatatatatgtgtgtctgtgtgtgtgtacctgtgtgttcctccagagctgtcttcatgatccagcttctatgcaaggtctatgattttggcctatatttttcatagagtacaaaaattaccagtattaccttaaccgagatacagatcctatgaaaatggaaaatccatagcatgcttgatgattactgaagcagactgtattatccaacattccaataagataaaataatcacaatgacttctcttttttggaaaaatgtttctcttattctcctacgttattgtgaagactttttttcttaaacaagaaacatgtgtaatatttgtaaaaacacaaagcttttgggccgggtgcagtggcttatgcgtataattccagcactttaggagcctgaggctggtggatcatgaggtcaggagattgagaccatcctgactaaaaaggtgaaaccacatctctactaaaaatacaaaaaattagccaggcgtggtggtgggtgcctgtagtcccagctacttgggaagctgaggcaggagaatggcgtgaacccaggaggtggagcttgcagtgagctcagatcgtgccactgcactcgagcctgggctacagagcgagactccttctcaaaataaataaataaataaataaataaaacttctatttctttcactttctaatataattttaatatctcctcctgggatttcactaagacacattttggacctcattctgatcttcctctcccctccaagcccaccaacttctgccctatcatctatcctcatgtctctctgtgtgacatgctgacttactttttggagagaatcgcctaaacaattaattctttcttctcgtgtctaatccatccactagtttcttatttcaacaattacatttttatttccttatttcattttattctgcgactgagtctcattctgtcacacaggctgaattgcagtggtacgaacctgcagactcggcctcctgggctcaagtgatcctcccacctcagcctcttgagtagctgggactataggcaggtgccccatacccagctaataccatacccacacagcagagacataaaagatttccatcctcaaagaaggttccattgaacagcactgctctaattcaataaaaaataccactgagcacaacatagtaatagaaaagattgaagaggcagtgctgatacttaaaaacctggtattttcagccaggcatggtggctcatgcctgtaatcctggcactttgggaggctgaggtgggaagatcgcttaagcccaggagttctagaccagcctgggcaacatggtgaaaccctgtctctacaaaaaatacaaaaaattagctgggcatggtggcatgtgcctgtagtcccagctacttgggaggctgaggtgggagatcacccgagcctgggaggtcaaggctgcaatgaggtgagatggcaccatcacactccagcctgggtgacagagtgagaccctgtctcaaaaacaaaaaacaaaaaacaaaacaaaaacacctgatatttatttttaagtacactattttcaaacattcagaagttatttcatcctaccttcatggtttccattctatgcctggtttagaattgggatctgataaaataaacgtgttcaacagaaccacttctcatggctgtataacagatgatcaatatgtatttgctgaggaaatcatacaattttcttaaatttttttaacaaaaattgt

SEQ ID NO: 1885925 - DNA, 4001 bp, Homo sapiens; identical to SEQ ID NO: 1885923

SEQ ID NO: 1885926 - DNA, 4001 bp, Homo sapiens
gccaagactcacatctccaggtgagtggcaaccaccagaagtggctgtctcatggatgctgccatttgttttcctgttcctcttggctcctgctggaacaccagggctgtttctctgccaatattcttttaactgtcagaaacaagagcagtaatactcatgagaactatcagcccctgcagccacatcctcctttacagtttttataaaatactcttatacaccatctgatttaatgataccaacaactgtacaaggtgttgtcacaatcatttagtgactcaaagagattgatatcatggctagaaaaaaaaagaagaaaagaaaaaggcgacagacgaactttgaaactcagtcttctgactccaaactctggggttttaccaagaatcagcagctgccagggaccaaaaccagaggcagaggtagaaaagtaaacattaagtaggcaggaactgtatgccatgtggtttagtcatacatcctcacacgtctgttagtgtgaagaagtgcaccagtacctctcaaactcttatatcaatgtgtcctcatggcagaaggcagcctttctgttaaatctgggaatttatcagaaagaggacaacccaagcctcatttcagagagaagtctggtatactcttagaaacctatgtgactgtcatccctaagtacattaatgttttttctcttgatctcaagagaatcaatggaaactgatgcttcagaaagatgtcccatatgtatcctgtggcactcaaagtaccccaggtttacataatatgaggaagattcaagctgtcaagttcagtttcccaagatctattccagagaagatgagcaaatctcacttcacagaccactggctgaagggcagtctggtcccagaaccatggagaattagaatgtgaggtggagaactcacaaaaaatttgttaaaatctctctggaaagtagaagcctgggagaaaaccaaaccaagtcaaacccattctccagttgccatccagaggtactgtcaatgttttgagctcacaggggaagtgtaggcttttcccgctgtcaatgtttatgctaagggagtgaggcagcctgaaacctcttgctcctaggtcccaatctccattccccttccagctggaaatttgtgctgtgacaagaggaaccagaaatggggtggcaatgcttaggggactgggtcataagatcaaaggccagtcttgcagtaatgacagttactggatggaccgtgacatcactacattccactcttcctggtgagggggagggaccacatcagcatgatgtccgagtcaccgctccatgataggggagggaaaaacagagctgggacccaggtccttggagacaccagtgcacacagcctagggaggtccaccttgaggcagcaggagggaagggaagagtcagcagcagggagccccaggattcaccagcctaaagtcacccagggatgactggtgagggtggggtctggggctgtgggacccaggtccttggagatgtgagcccaaaaagccctgggaggtcaagcttggggtggcaggagatgagggcccagtaaaggagcggggagccccaggattcacctgcccaaagtcaccctggggtgattggtgagggcagagactgggctgcttgctgaaggggtggggctgactgacaaaactttggtgggggtagcccagaggcaccggtgtgggggtcccagtccggtgaacctcgggagtggtatggactctggcagcagtcttgtcgttggagaggatctatggctgggttgggggtccgtgacctggtgtgtttttacctttctcttggctgctgccaatttactttgtcgagtttcttctgccatcgcagggtggggagggaggcgggcttggggccacatcagcaaaatcccaccaagcactgatcaacacctccagtcacctaccaggtagctgtgcgactgagccagaggaggcgtaaccagggatgcagtagaaggcagaataggggcgtggccttaatgctccaagcccattggttaatgagaaagatgaaagggaaagggggcgtggccaggcatcatgtgtccagagggacctttggctcacaaggaaagctgcccatgcaaccactgtccccacccactctaagagaggggagaggccgccaactctgggagaggggcagggccggcttttgctttaaaagcttttaaaaaatatatatgtgtatactttatatatatgtgtgtctgtgtgtgtgtacctgtgtgttcctccagagctgtcttcatgatccagcttctatgcaaggtctatgattttggcctatatttttcatagagtacaaaaattaccagtattaccttaaccgagatacagatcctatgaagatggaaaatccatagcatgcttgatgattactgaagcagactatattatccaacattccaataagataaaataatcacaatgacttctcttttttggaaaaatgtttctcttattctcctacgttattgtgaagactttttttcttaaacaagaaacatgtgtaatatttgtaaaaacacaaagcttttgggccgggtgcagtggcttatgcgtataattccagcactttaggagcctgaggctggcggatcatgaggtcaggagattgagaccatcctgactaaaaaggtgaaaccacatctctactaaaaatacaaaaaattagccaggcgtggtggtgggtgcctgtagtcccagctacttgggaagctgaggcaggagaatggcgtgaacccaggaggtggagcttgcagtgagctcagatcgtgccactgcactcgagcctgggctacagagcgagactccttctcaaaataaataaataaataaataaataaaacttctatttctttcactttctaatataattttaatatctcctcctgggatttcactaagacacattttggacctcattctgatcttcctctcccctccaagcccaccaacttctgccctatcatccatcctcatgtctctctgtgtgacatgctgacttactttttggagagaatcgcctaaacaattaattctttcttctcgtgtctaatccatccactagtttcttatttcaacaattacatttttatttccttatttcattttattctgagactgagtctcattctgtcacacaggctgaattgcagtggtacgaacctgcagactcggcctcctgggctcaagtgatcctcccacctcagcctcttgagtagctgggactataggcaggtgccccatacccagctaataccatacccacacagcagagacataaaagatttccatcctcaaagaaggttccattgaacagcactgctctaattcaataaaaaataccactgagcacaacatagtaatagaaaagattgaagaggcagtgctgatacttaaaaacctggtattttcagccaggcatggtggctcatgcctgtaatcctggcactttgggaggctgaggtgggaagatcgcttaagcccaggagttctagaccagcttgggcaacatggtgaaaccctgtctctacaaaaaatacaaaaaattagctgggcatggtggcatgtgcctgtagtcccagctacttgggaggctgaggtgggagatcacccgagcctgggaggtcaaggctgcaatgaggtgagatggcaccaccacactccagcctgggtgacagagtgagaccctgtctcaaaaacaaaaaacaaaaaacaaaacaaaaacacctgatatttatttttaagtacactattttcaaacattcagaagttatttcatcctaccttcatggtttccattctatgcctggtttagaattgggatctgataaaataaacgtgttcaacagaaccacttctcatggctgtataacagatgatcaatatgtatttgctgaggaaattatacaattttcttaatttttttttaacaaaaattg

SEQ ID NO: 1885927 - DNA, 4001 bp, Homo sapiens
ccaagactcacatctccaggtgagtggcaaccaccagaagtggctgtctcatggatgctgccatttgttttcctgttcctcttggctcctgctggaacaccagggctgtttctctgccaatattcttttaactgtcagaaataagagcagtaatactcatgagaactatcagcccctgcagccacatcctcctttacagtttttataaaatactcttatacaccatctgatttaatgataccaacaactgtacaaggtgttgtcacaatcatttagtgactcaaagagattgatatcatggctagaaaaaaaaagaagaaaagaaaaaggcgacagacgaactttgaaactcagtcttctgactccaaactctggggttttaccaagaatcatcagctgccagggaccaaaaccagaggcagaggtagaaaagtaaacattaagtaggcaggaactgtatgccatgtggtttagtcatacatcctcacacgtctgttagtgtgaagaagtgcaccagtacctctcaaactcttatatcaatgtgtcctcatggcagaaggcagcctttctgttaaatctgggaatttatcagaaagaggacaacccaagcctcatttcagagagaagtctggtatactgttagaaacctatgtgactgtcatccctaagtacattaatgttttttctcttgatctcaagagaatcaatggaaactgatgcttcagaaagatgtcccatatgtatcctgtggcactcaaagtaccccaggtttacataatatgaggaagattcaagctgtcaagttcagtttcccaagatctattccacagaagatgagcaaatctcacttcacagaccactggctgaagggcagtctggtcccagaaccatggagaattagaatgtgaggtggagaactcacaaaaaatttgttaaaatctctctggaaagtagaagcctgggagaaaaccaaaccaagtcaaacccattctccagttgccatccagaggtactgtcaatgttttgagctcacaggggaagtgtaggcttttcccgctgtcaatgtttatgctaagggagtgaggcagcctgaaacctcttgctcctaggtcccaatctccattccccttccagctggaaatttgtgctgtgacaagaggaaccagaaatggggtggcaatgcttaggggactgggtcataagatcaaaggccagtcttgcagtaatgacagttactggatggaccgtgacatcactacattccactcttcctggtgagggggagggaccacatcagcatgatgtccgagtcaccgctccatgataggggagggaaaaacagagctgggacccaggtccttggagacaccagtgcacacagcctagggaggtccaccttgaggcagcaggagggaagggaagagtcagcagcagggagccccaggattcaccagcctaaagtcacccagggatgactggtgagggtggggtctggggctgtgggacccaggtccttggagatgtgagcccaaaaagccctgggaggtcaagcttggggtggcaggagatgagggcccagtaaaggagcggggagccccaggattcacctgcccaaagtcaccctggggtgattggtgagggcagagactgggctgcttgctgaaggggtggggctgactgacaaaactttggtgggggtagcccagaggcaccggtgtgggggtcccagtccggtgaacctcgggagtggtatggactctggcagcagtcttgtcgttggagaggatctatggctgggttgggggtccgtgacctggtgtgtttttacctttctcttggctgctgccaatttactttgtcgagtttcttctgccatcgcagggtggggagggaggcgggcttggggccacatcagcaaaatcccaccaagcactgatcaacacctccagtcacctaccaggtagctgtgcgactgagccagaggaggcgtaaccagggatgcagtagaaggcagaataggggcgtggccttaatgctccaagcccattggttaatgagaaagatgaaagggaaagggggcgtggccaggcatcatgtgtccagagggacctttggctcacaaggaaagctgcccaggcaaccactgtccccacccaccctaagagaggggagaggccgccaactctgggagaggggcagggccggcttttgctttaaaagcttttaaaaatatatatatgtgtatactttatatatatgtgtgtctgtgtgtgtgtacctgtgtgttcctccagagctgtcttcatgatccagcttctatgcaaggtctatgattttggcctatatttttcatagagtacaaaaattaccagtattaccttaaccgagatacagatcctatgaacatggaaaatccatagcatgcttgatgattactgaagcagactatattatccaacattccaataagataaaataatcacaatgacttctcttttttggaaaaatgtttctcttattctcctacgttattgtgaagactttttttcttaaacaagaaacatgtgtaatatttgtaaaaacacaaagcttttgggccgggtgcagtggcttatgcgtataattccagcactttaggagcctgaggctggcggatcatgaggtcaggagattgagaccatcctgactaaaaaggtgaaaccacatctctactaaaaatacaaaaaattagccaggcgtggtggtgggtgcctgtagtcccagctacttgggaagctgaggcaggagaatggcgtgaacccaggaggtggagcttgcagtgagctcagatcgtgccactgcactcgagcctgggctacagagcgagactccttctcaaaataaataaataaataaataaaacttctatttctttcactttctaatataattttaatatctcctcctgggatttcactaagacacattttggacctcattctgatcttcctctcccctccaagcccaccaacttctgccctatcatccatcctcatgtctctctgtgtgacatgctgacttactttttggagagaatcgcctaaacaattaattctttcttctcgtgtctaatccatccactagtttcttatttcaacaattacatttttatttccttatttcattttattctgagactgagtctcattctgtcacacaggctgaattgcagtggtacgaacctgcagactcggcctcctgggctcaagtgatcctcccacctcagcctcttgagtagctgggactataggcaggtgccccatacccagctaataccatacccacacagcagagacataaaagatttccatcctcaaagaaggttccattgaacagcactgctctaattcagtaaaaaataccactgagcacaacatagtaatagaaaagattgaagaggcagtgctgatacttaaaaacctggtattttcagccaggcatggtggctcatgcctgtaatcctggcactttgggaggctgaggtgggaagatcgcttaagcccaggagttctagaccagcttgggcaacatggtgaaaccctgtctctacaaaaaatacaaaaaattagctgggcatggtggcatgtgcctgtagtcccagctacttgggaggccgaggtgggagatcacccgagcctgggaggtcaaggctgcaatgaggtgagatggcaccaccacactccagcctgggtgacagagtgagaccctgtctcaaaaacaaaaaacaaaaaacaaaacaaaaacacctgatatttatttttaagtacactattttcaaacattcagaagttatttcatcctaccttcatggtttccattctatgcctggtttagaattgggatctgataaaataaacgtgttcaacagaaccacttctcatggctgtataacagatgatcaatatgtatttgctgaggaaattatacaattttcttaattttttttaacaaaaattgtggtt

SEQ ID NO: 1885928 - DNA, 4001 bp, Homo sapiens; identical to SEQ ID NO: 1885926

SEQ ID NO: 1885929 - DNA, 4001 bp, Homo sapiens; identical to SEQ ID NO: 1885927

SEQ ID NO: 1885930 - DNA, 4001 bp, Homo sapiens; identical to SEQ ID NO: 1242086

SEQ ID NO: 1885931 - DNA, 4001 bp, Homo sapiens; identical to SEQ ID NO: 1242084

SEQ ID NO: 1885932 - DNA, 4001 bp, Homo sapiens
gtcccctgtccccaggaacctagtcagccaagactcacatctccaggtgagtggcaaccaccagaagtggctgtctcatggatgctgccatttgttttcctgttcctcttggctcctgctggaacaccagggctgtttctctgccaatattcttttaactgtcagaaacaagagcagtaatactcatgagaactatcagcccctgcagccacatcctcctttacagtttttataaaatactcttatacaccatctgatttaatgataccaacaactgtacaaggtgttgtcacaatcatttagtgactcaaagagattgatatcatggctagaaaaaaaaagaagaaaagaaaaaggcgacagatgaactttgaaactcagtcttctgactccaaactctggggttttaccaagaatcatcagctgccagggaccaaaaccagaggcagagctagaaaagtaaacattaagtaggcaggaactgtatgccatgtggtttagtcatacatcctcacacgtctgttagtgtgaagaagtgcacctgtacctctcaaactcttatatcaatgtgtcctcatggcagaaggcagcctttctgttaaatctgggaatttatcagaaagaggacaacccaagcctcatttcagagagaagtctggtatactgttagaaacctatgtgactgtcatccctaagtacattaatgttttttctcttgatctcaagagaatcaatggaaactgatgcttcagaaagatgtcccatatgtatcctgtggcactcaaagtaccccaggtttacataatatgaggaagattcaagctgtcaagttcagtttcccaagatctattccacagaagatgagcaaatctcacttcacagaccactgactgaagggcagtctggtcccagaaccatggagaattagaatgtgaggtggagaactcacaaaaaatttgttaaaatctctctggaaagtagaagcctgggagaaaaccaaaccaagtcaaacccattctccagttgccatccagaggtactgtcaatgttttgagctcacaggggaagtgtaggcttttcccgctgtcaatgtttgtgttaagggagtgaggcagcctgaaacctcttgctcctaggtcccaatctccattccccttccagctggaaatttgtgctgtgacaagaggaaccagaaatggggtggcaatgcttaggggactgggtcataagatcaaaggccagtctcgcagtaatgacagttactggatggaccgtgacatcactacattccactcttcctggtgagggggagggaccacatcagcatgatgtccgagtcaccgctccatgataggggagggaaaaacagagctgggacccaggtccttggagacgccagtgcacacagcctagggaggtccaccttgaggcagcaggagggaagggaagagtcagcagcagggagccccaggattcaccagcctaaagtcacccagggatgactggtgagggtggggtctggggctgtgggacccaggtccttggagatgtgagcccaaaaagccctgggaggtcaagcttggggtggcaggagatgagggcccagtaaaggagcggggagccccaggattcacctgcccaaagtcaccctggggtgattggtgagggcagagactgggctgcttgctgaaggggtggggctgactggcaaaactttggtgggggtagcccagaggcactggtgtgggggccccagtccggtgaacctcgggagtggtatggactctggcagcagtcttgtcgttggagaggatctatggctgggttgggggtccgtgacctggtgtgtttttacctttctcttggctgctgccaatttactttgtcgagtttcttctgccatcgcagggtggggagggaggcgggcttggggccacatcagcaaaatcccaccaagcactgatcaacacctccagtcacctaccaggtagctgtgcgactgagccagaggaggcgtaaccagggatgcagtagaaggcagaataggggcgtggccttaatgctccaagcccattggttaatgagaaagatgaaagggaaagggggcgtggccaggcatcatgtgtccagagggacctttggctcacaaggaaagctgcccatgcaaccactgtccccacccactctaagagaggggagaggccgccaactctgggagaggggcagggccggcttttgctttaaaagcttttaaaaaatatatatgtgtatactttatatatatgtgtgtctgtgtgtgtgtacctgtgtgttcctccagagctgtcttcatgatccagcttctatgcaaggtctatgattttggcctatatttttcatagagtacaaaaattaccagtattaccttaaccgagatacagatcctatgaaaatggaaaatccatagcatgcttgatgattactgaagcagactgtattatccaacattccaataagataaaataatcacaatgacttctcttttttggaaaaatgtttctcttattctcctacgttattgtgaagactttttttcttaaacaagaaacatgtgtaatatttgtaaaaacacaaagcttttgggccgggtgcagtggcttatgcgtataattccagcactttaggagcctgaggctggtggatcatgaggtcaggagattgagaccatcctgactaaaaaggtgaaaccacatctctactaaaaatacaaaaaactagccaggcgtggtggtgggtgcctgtagtcccagctacttgggaagctgaggcaggagaatggcgtgaacccaggaggtggagcttgcagtgagctcagatcgtgccactgcactcgagcctgggctacagagcgagactccttctcaaaataaataaataaataaataaataaaacttctatttctttcactttctaatataattttaatatctcctcctgggatttcactaagacacattttggacctcattctgatcttcctctcccctccaagcccaccaacttctgccctatcatctatcctcatgtctctctgtgtgacatgctgacttactttttggagagaatcgcctaaacaattaattctttcttctcgtgtctaatccatccactagtttcttatttcaacaattacatttttatttccttatttcattttattctgcgactgagtctcattctgtcacacaggctgaattgcagtggtacgaacctgcagactcggcctcctgggctcaagtgatcctcccacctcagcctcttgagtagctgggactataggcaggtgccccatacccagctaataccatacccacacagcagagacataaaagatttccatcctcaaagaaggttccattgaacagcactgctctaattcaataaaaaataccactgagcacaacatagtaatagaaaagattgaagaggcagtgctgatacttaaaaacctggtattttcagccaggcatggtggctcatgcctgtaatcctggcactttgggaggctgaggtgggaagatcgcttaagcccaggagttctagaccagcctgggcaacatggtgaaaccctgtctctacaaaaaatacaaaaaattagctgggcatggtggcatgtgcctgtagtcccagctacttgggaggctgaggtgggagatcacccgagcctgggaggtcaaggctgcaatgaggtgagatggcaccatcacactccagcctgggtgacagagtgagaccctgtctcaaaaacaaaaaacaaaaaacaaaacaaaaacacctgatatttatttttaagtacactattttcaaacattcagaagttatttcatcctaccttcatggtttccattctatgcctggtttagaattgggatctgataaaataaacgtgttcaacagaaccacttctcatggctgtataacagatgatcaatatgtatttgctgaggaaatcatacaattt

SEQ ID NO: 1885933 - DNA, 4001 bp, Homo sapiens
tcttttctgcctatcttggaccttttgtcccataactcctttgtgccaacttctctcatggttcttatctccccaccatcccatcctggggccccttcagtgactcctgatggcaagtggctgttctcattgtcctggtttccccctgagactggggatgaggaaaatcaaaccatatcctgggtgttctgagtgtttacagcaggccatgtactagggattaacataaaaacaacaataacaaatctcatttaaacttcacaaatggaagtgaaacaataacacctctattatacagatgtgaaaagagaggcccgatgaggtctagcaacttgccctaaatcatatccctagcagagcagatggagaggcaggattcaaacccagaattcctttttttttttttttctttgagacagagtcttgctctgtcaccaggctggagtgcagtggcataatcttggctactgcaagctccacctcccaggttcacaccattctcttgcctcagccttctgagtagctgggactacaggcacacgccaccacgcttggctaatgtttttgtatttttagtagagacagggtttcaccgtgttaaccaggatggtctcgatctcctgacctcatgatccgcctgccttggcctcccaaagtgctaggattacaggcgtgggccaccacacccggctaaagccagaattcttaaccagtacccagcagtccatccacaatcttaagaattaccctctattgccccttgggccccctgtccccagaagcctggtcagccaagactcacatccctaggtggctggcaaccaccagaagtggctttctcagggatactgccatttgttttcctgttcctgttcgctcctgctggaactctagggctgtttttctgccaatattcttttaactgttggaaagaagagcagtaatactcatgagaaccgtcagcccctacagccacatcctcctttacagtttttacaaaatacacttacacaccatctgatttaatgacaccaacaactgtacaaggtgttgtcacactcatttagtgactgagaaggattgatatcatggctagaaaaaaaaaagaaaaaggcaatactggaactttgaaactcagtcttctgactccaagctctgaggttttgccaagaatcagcagctgccagggaccaaaaccagaggcagaggtagaaaagtaaacattaagtaggcaggaactgtatgccatgtggtttagagtcacacatcctcacacgtctgttagtgtgaagaagtgcaccagtacctctcaaactcttatatcaatgtgtcctcatggcagaaggcagcctttctcttaaatcagaatttatcagaaagaggacaacccaagcctcatttcagagagaggtctggtatactcttagaaacctatgtgactgtcatccctaagtacattcatgttttttctcttgatctcaagagaatcaagggaaactgatgcttcagaaagatgtcccatatttatcctgtggcactcaaagtacccaaggttgagataatatgaggaagattcaaggtgtcaagttcagtttcccaagatctattccacagaagatgagcaaatgtcacttcagagaccactgactgaaggagagtctggtcccagaaccatggagaattagaatatgaggtggagaactcagaaaaaaatgttaaaatctctctggaaagtagaagcctgggagaaaaccaaaccaaacccattctctcattgccacccagagatactgtcaacgttttgagttcatgggggaagtgtaggcttttcccaccgtcaacatctgtaagggagtgaggcagcctggaacctcttgctcctaggtcccatagtctccattccccttccagctggaaatttgtgctgtgaccagaggaaccagaaacggggtgagaacgcttaggggactgggtcgtaagatcaaaggccagtcttgcagtaacagcagttactaggtggactgtgacatcacaacattccactcctcctggtcggggggagggaccatgtcagcaccatgtccaagtcgctgctccacgatgggggagggaagcacagggttgggacccagctccttggagacgccagcacaaagaacccagggaggtcgaccttgaggcagcaggaggggagggcacagtctgcagcagggagtcccaggagtcaccagtccaaagtcacccagggatgactggcgagggtggggcctggctccttggagatgagagcccaaagagcccagggagatcaagcttggggcggcaggagatgagggcccagtaatggagcgggaagccccaggactcacccacccaaagtcaccctggggtgattggcgagggcaaggactgggctgcttgctgaaggggtggggctgactgacaaaactttggtgggggtagcccagaggcaccggggtaggggggaccagtccagtgtgcctcaggagtcgtatagactctggcaggggtcttgtcatcagaggggatctgtggctgggttgaggggctatgacctagtgcgtttttacctttttcttggctgcagccaatttgttgtgttgagtttcttctgccatcgcagggtggggagggaggcagggttggggtcacagcagcaaaatctcaatgagaaccgatcaaggcctccagtcacctaccaggcagctgtgtgactgagccagaggaggcgtaaccagggccccagtagaatgcggaataggggcgtggccttaatgctccaagcccattggtcaatgagaaagatgaaaaggaaagggggcgtggccagaaagcagtgtgtccagagggacctgtggctcacaaggaaagctgcccatggcaactgctctccccacccactctaagagaggggagaggcctcccactctggaagagaagaggggccggcttttgctttaaaagctttaaaactttaaaaaatatatgtgtgtatactttatatatatgtgtgtccgtgtgtgtgtatctatgtttttctccatagctgtcttcattatccagcttctatgcaaggtctatgattttggcctatattcttcatctttgattacagtacaaaaattaccagtattaccttaactgagatacagatcctataaaaatggaaaatgcatagcatgcttgatgattaatgaagcagactatattatccaacattctaataagataaaataatcacaatgatttctcttttttggaaaaatgtttcttttattctcctacgttttcattaagatttttttttcttaaacaagaaacatgtctaatatctgtaaaaacacaaagcttttgggccgggtgcagtggctcatgcctgtaattccaggactttgagagcccaaggtgggtggatcatgaggtcaggagatcgagaccatcctggctaacacggtgaaatcccatctctactaaaaatacaaaaaaggccggatgtggtggcaggcaactgtagtctcagctacttgggaggctgaggcaggagaatgacatgaacccccgaggtggagcttgcagtgagccaagatcatgccgctgcactccagcctggctacagagcaagactccatctcaataaataaataaattaattaattaattaataaaaataaaaaattaatagtaagagcaatgtgaacaaaagttgtaataaaataatttagaaaatacaaactattaaaaaatagattttaaaacttgtgcaacaaagtcaaacagcacccaacgaaaatgtatacccttacatgtttgtttaaaaagcaatttaaattacattgatccactaaactgggaaaagcaaaacaaacaaaaagggggaaataattaagacataaggaaaaaggaaaaagaaaaaccactagatttaaaaaataaaactgaaggaggattctttcaaaagactgagataataaaacagtcaa

SEQ ID NO: 1885934 - DNA, 4001 bp, Homo sapiens
ttttctgcctatcttggaccttttgtcccataactcctttgtgccaacttctctcatggttcttatctccccaccatcccatcctggggccccttcagtgactcctgatggcaagtggctgttctcattgtcctggtttccccctgagactggggatgaggaaaatcaaaccatatcctgggtgtcctgagtgtttacagcaggccatgtactagggattaacataaaaacaacaataacaaatctcatttaaacttcacaaatggaagtgaaacaataacacctctattatacagatgtgaaaagagaggcccgatgaggtctagcaacttgccctaaatcatatccctagcagagcagatggagaggcaggattcaaacccagaattcctttttttttttttttctttgagacagagtcttgctctgtcaccaggctggagtgcagtggcataatcttggctactgcaagctccacctcccaggttcacaccattctcttgcctcagccttctgagtagctgggactacaggcacacgccaccacgcttggctaatgttttgtatttttagtagagacagggtttcaccgtgttaaccaggatggtctcgatctcctgacctcatgatccgcctgccttggcctcccaaagtgctaggattacaggcgtgggccaccacacccggctaaagccagaattcttaaccagtacccagcagtccatccacaatcttaagaattaccctctattgccccttgggccccctgtccccagaagcctggtcagccaagactcacatccctaggtggctggcaaccaccagaagtggctttctcagggatactgccatttgttttcctgttcctgttcgctcctgctggaactctagggctgtttttctgccaatattcttttaactgttggaaagaagagcagtaatactcatgagaaccatcagcccctacagccacatcctcctttacagtttttacaaaatacacttacacaccatctgatttaatgacaccaacaactgtacaaggtgttgtcacactcatttagtgactgagaaggattgatatcatggctagaaaaaaaaaaaagaaaaaggcaatactggaactttgaaactcagtcttctgactccaagctctgaggttttgccaagaatcagcagctgccagggaccaaaaccagaggcagaggtagaaaagtaaacattaagtaggcaggaactgtatgccatgtggtttagagtcatacatcctcacacgtctgttagtgtgaagaagtgcaccagtacctctcaaactcttatatcaatgtgtcctcatggcagaaggcagcctttctcttaaatcagaatttatcagaaagaggataacccaagcctcatttcagagagaggtctggtatactcttagaaacctatgtgactgtcatccctaagtacattcatgttttttctcttgatctcaagagaatcaagggaaactgatgcttcagaaagatgtcccacatttatcctgtggcactcaaagtacccaaggttgagataatatgaggaagattcaaggtgtcaagttcagtttcccaagatctattccacagaagatgagcaaatgtcacttcagagaccactgactgaaggagagtctggtcccagaaccatggagaattagaatatgaggtggagaactcagaaaaaaatgttaaaatctctctggaaagtagaagcctgggagaaaaccaaaccaaacccattctctcattgccacccagagatactgtcaacgttttgagttcatgggggaagtgtaggcttttcccaccgtcaacatctgtaagggagtgaggcagcctggaacctcttcctcctaggtcccatagtctccattccccttccagctggaaatttgtgctgtgaccagaggaaccagaaacggggtgagaacgcttaggggactgggtcgtaagatcaaaggccagtcttgcagtaacggcagttactaggtggactgtgacatcacaacattccactcctcctggtcggggggagggaccatgtcagcaccatgtccaagtcgctgctccacgatgggggagggaagcacagggttgggacccagctccttggagacgccagcacaaagaacccagggaggtcgaccttgaggcagcaggaggggagggcacagtctgcagcagggagtcccaggagtcaccagtccaaagtcacccagggatgactggcgagggtggggcctggctccttggagatgagagcccaaagagcccagggagatcaagcttggggcggcaggagatgagggcccagtaatggagcgggaagccccaggactcacccacccaaagtcaccctggggtgattggcgagggcaaggactgggctgcttgctgaaggggtggggctgactgacaaaactttggtgggggtagcccagaggcaccggggtaggggggacgagtccagtgtgcctcaggagtcgtatagactctggcaggggtcttgtcatcagaggggatctgtggctgggttgaggggctatgacctagtgcgtttttacctttttcttggctgcagccaatttgttgtgttgagtttcttctgccatcgcagggtggggagggaggcagggttggggtcacagcagcaaaatctcaatgagaaccgatcaaggcctccagtcacctaccaggcagctgtgtgactgagccagaggaggcgtaaccagggccccagtagaatgcggaataggggcgtggccttaatgctccaagcccattggtcaatgagaaagatgaaaaggaaagggggcgtggccagaaagcagtgtgtccagagggacctgtggctcacaaggaaagctgcccatggcaaccgctctccccacccactctaagagaggggagaggcctcccactctggaagagaagaggggccggcttttgctttaaaagctttaaaactttaaaaaatatatgtgtgtatactttatatatatgtgtgtccgtgtgtgtgtatctatgtttttctccatagctgtcttcattatccagcttctatgcaaggtctatgattttggcctatattcttcatctttgattacagtacaaaaattaccagtattaccttaactgagatacagatcctataaaaatggaaaatgcatagcatgcttgatgattaatgaagcagactatattatccaacattctaataagataaaataatcacaatgatttctcttttttggaaaaatgtttcttttattctcctacgttttcattaagatttttttttcttaaacaagaaacatgtctaatatctgtaaaaacacaaagcttttgggccgggtgcagtggctcatgcctgtaattccaggactttgagagcccaaggtgggtggatcatgaggtcaggagatcgagaccatcctggctaacacggtgaaatcccatctctactaaaaatacaaaaaaggccggatgtggtggcaggcaactgtagtctcagctacttgggaggctgaggcaggagaatgacatgaacccccgaggtggagcttgcagtgagccaagatcatgccgctgcactccagcctggctacagagcaagactccatctcaataaataaataaattaattaattaattaataaaaataaaaaattaatagtaagagcaatgtgaacaaaagttgtaataaaataatttagaaaatacaaactattaaaaaatagattttaaaacttgtgcaacaaagtcaaacagcacccaacgaaaatgtatacccttacatgtttgtttaaaaagcaatttaaattacattgatccactaaactgggaaaagcaaaacaaacaaaaagggggaaataattaagacataaggaaaaaggaaaaagaaaaaccactagatttaaaaaataaaactgaaggaggattctttcaaaagactgagataataaaacagtcaag

SEQ ID NO: 1885935 - DNA, 4001 bp, Homo sapiens; identical to SEQ ID NO: 1242103

SEQ ID NO: 1885936 - DNA, 4001 bp, Homo sapiens
tgatttctgacaaaggcaaaaggcaattcattaggaaaagcatagtttttcaacaaatacaactgaaacaactggacaatcatgcccaaaaaagcctttcaatctgaacctcccaccatatataaaatttaatcaactggtcatagatacacatatctaaaactataaaacttctataacagaacatagaaggagaatctttataatcttgaggcaaaggttttgtagacacaacatcaaaagtacactctacaaaagaataaaatgaataaactaggcttcatcaaaattaaaaacttctaatctttaagattcacctgtgaagagaataaaatgacaagccacattgccagaaaatattagcaaattctatattaggcaaaggacttgtaacccagaatatataaggaattctcaaactcagtaagaaaacaatcaacctatttaaatataggaaaagacttgaacagacattcaccaaaaaaggtatctgatttgtaaataagcaagatgcttgagatcattagttattagggaaatgcagattaaaaccacaacgagataccactatacatctgtcaatataactaaaattaaagactgaacgtatcaagggttgacaaaaatgtggaggatctggacctctggaacatccactttgcaaaacagtatgtagtgatcttaagaagctagacatacacctaccatatgatccaaccactcctctcttagaagtttacccaagagaatttcaagtggatgtccatacacaaacttgtacggaaatgtccattagcaatttcacttgtatagtcaaaaactggaaacagcccaaacattcatcaacagaaaaatggataaacaaattgcatttgtttatcttaagatactattcaacaatttaaaagaataaactattgatacatgcaacataagtgaatcccaaaattattatgctgagtggaaaaagtaagatttttaaaaagagtatatgctgtatgagtccatttatagtaagctgtaaaacatgcaaactggcctgccacagtggctcctgcctatgatcccagcactttgggaggccgaggtgggaggatcacttgagctcaggagttccagaccaacctgagcaacatggcaaaaccatgtctccaccaaacaaacaaaaattagccaggcatggtgacatgtgcctgtagtcccagctatttgggaggctaaggtgggaggatcacttgagcccaggaggtggaagctgcagtgagccgagatcatgccactgcactccagcctgggcgacagagtgagacccggtctacaaaaaaaaagaaaacaaacaaataaacaaaacacccaacaaaacaacaacaacaacaaaaaagaaaacatgcaaactgatctctagtgacagaaattaaattggtgcatacggcaggaaggagggagttaaaagcaaaagggaggggtacagagggccagagaggaacgctggggtagtgtatgagttcattatctttgattgtgctgatgctttcatggatcatacatattccaaagtcgatcaaaatgcatactttaaataggtgcagtttattatatgtcaattataactgaataaagctgttaaaaaatacaaaagagcccagtacagtgcctgtatctctcaggcagttattaggagtcctgttcacacacaagtacagcgctgtgagtttacctgatcataaacacaagaatcagcaacatactttcttctaaaactttcattccagcatgtataaatcgcatgagagcacaccataattcttctgtgtctttagattcataatgtagttaacacggcactacaacctctaatgtgttggcacaattaaataaatataaggttgctgtaacctactggaaaatctcagagaagatgcaaatctgtgttacctaaataggaagcacctaaagggtcccttgcagtctggaagaggacgggctcgtggacagagggcgtggccacatccatagttgtccacgccacactgtgggacgacccgcaagccacacacatgatcttctggccttctaagccttgcacgagcatgggcttcctgttaaccgtggtcgtgccattgccctgctggccgtggtcattgtcaccccaagcatacacctgtttatgaggggaaaaatgcttataatttttcaacatttcaggacattttctttaatgtaatttttacttcaaaatgcttaacgtgtatgccatggtagttgaaagaattgagttctgaaaagtaaaaacaaaccatttcacaatcttacaaaatggcatcagtgtactacaattctgaagaaaatctaaccatgaaaatgcttgccaataaccataaaaagagtattttcttaatattaatccaattaattctgttttgttgcaagacacacagaaggtcttctcttcaaaaaagtgcaataattttttcccttttactttgcaaagaaaaatgaccaaaaataatatgctcatttttcaagtaagttgctccttggccttatagaattataaagtataattcattttgactaaaaaaacagtaatggtaattttgttttcataaataaaattttaaattgaatatccacaggccggtcatagcgtatgcttctccaagcagaagagagtgtaacacttgtcaggcaccagctctgtctctaaaatgaggcatggatccctcctgccagttagcaattctctaaagcaaagtcttgctaataccttgcagtaggagcatcttcaagaataacaatcttttggccgggcacggtggctcactcctgtaatcccagcactttgggaggccgaggcgggtggatcacgaggtcaggagatcgagaccacggtgaaaccctgtctctactaaaaatacaaaaaattagctggtagcgatggcaggcacctgtagtcccagctactcgggaggctgaagcaggagaatggcgtgaacccaggaggcggagcttgcagtgagccgagatcgcgccactgcactccagcctgggcgacaaagcgagactctgtctcaaaaaaaaaataataataaaaagaataacaatctttccacacacttttcacgtggacttcagagtgggaacgcctcttttctgaggaccccgcccccaacccctgctgctgagtaggcagatgcaccagcgggcaaaagggacgggtcccgcccccatggttcttcaagcagtaagactcggctgatttcatcaacagctgcgatttcaacaggacgagggccgtgtcgtgacccccaagtcccccaagtcaggatggcacgccacccccaggccacctgcagccttacctgccctgagtccatgaccgccaggcaatgctgggccccgacagccacatgcacgatcttcttccctctcagcccttccaccacctgcggcttccgaacgtgcacgtcagagcggtggcccaacctgaagtaatccccctttcccctgagaggaggcccgtggtggagtgttacaatacggttatggtcttaccatgcgatacaagaagacactcattgtctcacatctttcacagccagctcaatgacatcacacacagcacccaaggtcttcgaacttgtattcaaaatcatacaccattaattcaaattaacttattaagtcagctgggaaaaaccttaataccttaatacatgttctacaatatttaagttactgttgtaggttttcatatagactgaaaataagacacactactgcaaacacctatccaaagtcctatctagtatacatctttcttaaagtgccaatgttggccagtcgcggtggttcacgcctgtaatcccagcactttgggaggctgaggtgggtggatcacgaggtcaggagattgagaccatcctggctaacacggtgaaaccccatctctactaaaaatacaaaaaaattagccgggcatggtggcagacacctgtagt

SEQ ID NO: 1885937 - DNA, 4001 bp, Homo sapiens
tcaaaaaaaagactttctaatcatattggaaatgtgtaacaaggaccaagtactgtgtattaaacttaataaatcaaaacaacaggccctctaagatataaatggtgcttcactgtatgtttatctgcccaacccatcataggaactcaattcagcattaaactggttttagatcaagacactagaactcatgtttagcagttattaaattacaattattaagaaaaaaacttcattacgtaaagtcctttactccaaaaagtttctcaaaatacataaacactaatataaaaacaactattaaaactttgcctgaatctcaggatttcagaaatatgaaagtactcatctctcacgtctcccatccacttaaaatgacaaaacagatcattatagctaaatcaaaggaaatgtttaaagagaaacaaacccaaagagtaactacaccaattcttgacccaattctctgtactctgtcttatgtaacattacactatgaataacaatcccatcatccacaacagctttttttttttttttgaaaaaaaagctctcattgtccaggctggagtgcaacggcacaatcttgacccactgcaacctccacctcccgggttcaagcgattctcctgcctcagcctcccgagtggctgggattacaggcatacaccaccacgcctggctaattttgtatttttagtagagacggggtttcaccatgttggtcaggctggtctccaactcctgacctcagggaatgagtgagtttctataggccataattactgcaacttacttctccaattttcccctccacagttaactcaacagctcaaaaacgatcagtaacaaacaacagtcaccatgatatggttaggagtgtggcagatttcttaaccagtaataataaataggaaaaaaattttctctattaatagatctcaagtttcgtgcacttgcaagaaactaattaaaaggcagccgcgcacgatctacaaaaacagccataagactgttacattttaagttacaggaaataaacctgctcctctaattcagcaagatacaactgacttccccttacataccctaaaaaaaagccttacacgagaaatttaaacatggaagcagaaacacaccaagaaaaagacatgtcaaaccccacctgtatatctgttttcaaccatttggagtcgaggcgagcctgggcagccaaacacaaagattcagagggcatcttttctccagcttcctcccaggtctcaggcctgcaagtaaacacatacgctgaagacctaatgctttttaatagtttacaaagacactcccgaaaggttcaatgcagaaaagaaaaaagagagagagaacagaaaggggggagagaagagctggtggaggggagagaaggggagagagggaaagagggaagagatggagagagagggaggtggggaagggaaagcctgcttccaaggtaggcagggtgtgccgagtttctgcaccacgctgacgagaccttgagaatggacggtcacaggaagccaagttacaatgtcatccccctgccctcaaatccaagaagtacacacacataacagggagcccatcgttttaacgacaaatgacagcagcatgaatctgccgctttaccccacagcagggcgcgtgcgtgaaacaaattactcaaaaggatcgcctgcagaaaaacccacagccaccaccacttaagagatggagagaggcccgaggctgccccgcgggtggtccgcgcaggccccggtgcggccgccgcgcccacgcccgcctcccgggctcggccgcccgccagccccgcgcccgtaccgcccccgccaccggccgcccaggtgccccaggccaggacctgacgcgcagggcccggccgcctcgccccgccggcgcgcggacgcagcctcccaagagccgctggctcagccggcgcccgcgatcccggcgcctctcgcggcccgaggggcgggccgacgcgggactgccgccccccgcgtacggccaatcgcaacgaggctgctccgtgggcgcagccaatggggaagaggagcccttcgccgctcctcccgactctcccgcttccagcaatcccgcttatcttcctacttggagcgccgtggctgcggccaaggccaacagcgggcgccggaaggctggatttccgccgcacgcacgcgctcccgcactcccacgggagactgcttggcccggagcgctcttgatcacgccgcggcgggaggtggcgctcacactaactatagctatccagggcgcgggtcgagtggcgagaccagctcccctgggtatgagaacgcatctttgtgcggtcggctggctggggcctgaagagcttcctcctgtgtgttcaactgaacgcagcaaaagtcttgggcagattccatggagcagctgtggaagcactgtgcagggaatcgaagaaggaaacacctccagcgaccacaaaacaaaattgaagaactataaaacaatataggccgggcgtggtggctcacgtatgtaattttcagcgctttgggaggccgaagcgggaggatccctcgaagccaggagttggaggatcccatgttgccagactgggcaacatagcaagaccccatctctaaaaaataaaaataaaaaaatttaacaattagccaggtgtggtggcacacacctgtgatcccagctgctcgggaggctgagacaggagaatcgcctgagcctgggagatcaatgctacagtgagcttagatcgtgccactgcactccagcctgggcgacagagtgagatcctgcctctaagaaagaaaaataacggccgggcgtggtggctcaggcctgtaatcccagcactttgggaggccagagcaggtggatcatttgaggtcaggagttcaaaaccagcctggccaacatgatgagaccccttctctactgaaaatacaaagattagccaggtgtggtggcacgtgactgtaatcccagctactcgggaggccgaggcaggagaatcgcttgaacccgggaggcggaggttgcagtgagccgacattgcaccactgcactccagcctgggggacagaggctgcaccactgcagccttgacttaccgggttcaggtggttctccacctcagccttgccactagctgggactgcaggcacatggaaccacacctggctaatttttgtagtttttgtagacgggattttgccatgttgcccaggctggtctcgaactcctgggctcaagtgatccgcccgcctcagtctcccaaagtgctaggattacaggtgtgagtcactgcactcggctaatagtaatgaactttgaacagaaggaaagttgttattattttcttggttatgttctatctatattttctaatttttctaaacatgtaaagataaaattctaaaaactcagacctcagaacaaaaaaattagagtataaatatttattttagttaacttgtacaaatttggtttctggaaaaagaatggaatagattttctgagaaaaaaaatccaccactttggccgggcgcagtggtttacgcgtgtaatgcctgcactttgggaggctgaggcggtggatcacctgaggtgaggagttcaagaccagcctgaccgacatgaagaaacccctgtctctactaaaaatacaaaaattagtcaggcctggtggcacgcacctgtaatcccagctactcaggaggctgaggctggagaatcgcttgaacccaggaggcagaggttgcagtgagctgagatcgcaccatagcgctccagcctgggtgacaaaaggaaaactctgtctcaaaaagaaagaaagaaaagcagactggctgaaaggattgaagaacaaaatatgatccaccaatgtgctatctacaagataaacattttaaatacagaaacagattgaaagtaaagggatacaaagatacaattaaaatagtaaccaaaaaaga

SEQ ID NO: 1885938 - DNA, 4001 bp, Homo sapiens
tgtccaggctggagtgcaacggcacaatcttgacccactgcaacctccacctcccgggttcaagcgattctcctgcctcagcctcccgagtggctgggattacaggcatacaccaccacgcctggctcattttgtatttttagtagagacggggtttcaccatgttggtcaggctggtctccaactcctgacctcagggcatccacccgcctcggcctcccaaactgccgggattacaggcgtgagccactgcgcccagccacacaacacagctctaaacactggactctcatatctaccaacactcaatacctgtttaaaaagaaaaaaaaaattaggaaggggcaataacacttcagtgtaagtatccatgatcaactactgcttaacagcctacacgacttttgatgaacagtcaaggcacattacttaatacttaaaatggttaaccttagggagtaggaaaatacagacacacacaaaatatttcaaacacttctttttgctgctgataaggagttccaaaagtagtttttccaagccatttccaaataaaagtagattgggtgtaaagaactgtctatcgaaatattaccgttattatttatttaataatgtcctgacaagcttgcaattatctcattaaatcaaaaaattaggatctaaggccaacattgtttcctcatattcttgatgtgaaaatctgagcactcctcttaataaggagttacaaagacaaaacaaacagctcaactgaactaactcttgtctctccagaaacacaaacacaagacctcataaaatgagtgagtttctataggccataattactgcaacttacttctccaattttcccctccacagttaactcaacagctcaaaaacgatcagtaacaaacaacagtcaccatgatatggttaggagtgtggcagatttcttaaccagtaataataaataggaaaaaaattttctctattaatagatctcaagtttcgtgcacttgcaagaaactaattaaaaggcagccgcgcacgatctacaaaaacagccataagactgttacattttaagttacaggaaataaacctgctcctctaattcagcaagatacaactgacttccccttacataccctaaaaaaaagccttacacgggaaatttaaacatggaagcagaaacacaccaagaaaaagacatgtcaaaccccacctgtatatctgttttcaaccatttggagtcgaggcgagcctgggcagccaaacacaaagattcagagggcatcttttctccagcttcctcccaggtctcaggcctgcaagtaaacacatacgctgaagacctaatgctttttaatagtttacaaagacactcccgaaaggttcaatgcagaaaagaaaaaagagagagagaacagaaaggggggagagaagagctggtggaggggagagaaggggagagagggaaagagggaagagatggagagagagggaggtggggaagggaaagcctccttccaaggtaggcagggtgtgccgagtttctgcaccacgctgacgagaccttgagaatggacggtcacaggaagccaagttacaatgtcatccccctgccctcaaatccaagaagtacacacacataacagggagcccatcgttttaacgacaaatgacagcagcatgaatctgccgctttaccccacagcagggcgcgtgcgtgaaacaaattactcaaaaggatcgcctgcagaaaaacccacagccaccaccacttaagagatggagagaggcccgaggctgccccgcgggtggtccgcgcaggccccggtgcggccgccgcgcccacgcccgcctcccgggctcggccgcccgccagccccgcgcccgtaccgcccccgccaccggccgcccaggtgccccaggccaggacctgacgcgcagggcccggccgccccgccccgccggcgcgcggacgcagcctcccaagagccgctggctcagccggcgcccgcgatcccggcgcctctcgcggcccgaggggcgggccgacgcgggactgccgccccccgcgtacggccaatcgcaacgaggctgctccgtgggcgcagccaatggggaagaggagcccttcgccgctcctcccgactctcccgcttccagcaatcccgcttatcttcctacttggagcgccctggctgcggccaaggccaacagcgggcgccggaaggcgggatttccgccgcacgcacgcactcccgcactcccacgggagactgcttggcccggagcgccgcggcgggtggtggcgctcacactaactatagctatccagggcgcgggtcgagtggcgagaccagctcccctgggtatgagaacgcatctttgtgcggtcggctggctggggcctgaagagcttcctcctgtgtgttcaactgaacgcagcaaaagtcttgggcagattccatggagcagctgtggaagcactgtgcagggaatcgaagaaggaaacacctccagcgaccacaaaacaaaattgaagaactataaaacaatataggccgggcgtggtggctcacgtatgtaattctcagcgctttgggaggccgaagcgggaggatccctcgaagccaggagttggaggatcccatgttgccagactgggcaacatagcaagaccccatctctaaaaaataaaaataaaaaaatttaacaattagtcaggtgtggtggcacacacctgtgatcccagctgctcgggaggctgagacaggagaatcgcctgagcctgggagatcaatgctacagtgagcttagatcgtgccactgcactccagcctgggcgacagagtgagatcctgcctctaagaaagaaaaataacggccgggcgtggtggctcaggcctgtaatcccagcactttgggaggccagagcaggtggatcatttgaggtcaggagttcaaaaccagcctggccaacatgatgagaccccttctctactgaaaatacaaagattagccaggtgtggtggcacgtgactgtaatcccagctactcgggaggccgaggcaggagaatcgcttgaacccgggaggcggaggttgcagtgagccgacattgcaccactgcactccagcctgggggacagaggctgcaccactgcagccttgacttaccgggttcaggtggttctccacctcagccttgccactagctgggactgcaggcacatggaaccacacctggctaatttttgtagtttttgtagacgggattttgccatgttgcccaggctggtctcgaactcctgggctcaagtgatccgcccgcctcagtctcccaaagtgctaggattacaggtgtgagtcactgcactcggctaatagtaatgaactttgaacagaaggaaagttgttattattttcttggttatgttctatctatattttctaatttttctaaacatgtaaagataaaattctaaaaactcagacctcagaacaaaaaaattagagtataaatatttattttagttaacttgtacaaatttggtttctggaaaaagaatggaatagattttctgagaaaaaaaatccaccactttggccgggcgcagtggtttacgcgtgtaatgcctgcactttgggaggctgaggcggtggatcacctgaggtgaggagttcaagaccagcctgaccgacatgaagaaacccctgtctctactaaaaatacaaaaattagtcaggcctggtggcacgcacctgtaatcccagctactcaggaggctgaggctggagaatcgcttgaacccaggaggcagaggttgcagtgagctgagatcgcaccatagcgctccagcctgggtgacaaaaggaaaactctgtctcaaaaagaaagaaagaaaagcagactggctgaaaggattgaagaacaaaatatgatccaccaatgtgctatctacaagataaacattttaaatacagaaacagattgaaagtaaagggata

SEQ ID NO: 1885939 - DNA, 4001 bp, Homo sapiens
tctgtctcaaaaaacaaaaaagtaaataaataaaacacaatacaatacagctaatatgatttacctaagaagctgttgtatgagctgaaccagaggcaaacactgtttgccagaagactcacagatccccgtattaataaggtctttatccaatggagtcctccttctatgaaatgttgaggcatttgcttcctgttcataaatttctttttccttccgtgcttctttttttgtatcctgtaattgacaaacagaaattgtttacaagtgatctcattaccaggtgtgaaggcacacaggctggctgagccctgaccccagtgccaagctatcccagcctctgtggctgccacacccatccacccacaggcccccacctgccctgttggaaaccccaactcatctgtgcagtttcaaacagtgtcttctttttacagatccaaggtctaggctgcctctgctgatgctctccagcctccttctgtgaagtccctaaaatccttaaccctgctaatggctcacacaaaacccaatgtgatcggctccacacacacagcatccagctgctctgtaaggacaagaaggagctagaattctcacacacaaaagtcctggttcaaatgcaaatggcaaagccactttgggaaactatgaacacacactaaccccaggacctaacaaattccactccaagtgtttatccaaagggagaacatatgttcactaaagtacttgttcacagcacaattgtggcagctctacacggccaaaaaccagaaagcctgggcgcggtggctcacgcttgtaatcccaacactttgggaggccaaggtggggggatcactggagcccaggagttgaagaccagccttgcaacacagtgaaaccttgtctctacaaaaaaatcaaaaaactagccgggcatggtgacatgtatgtggtccctgcaacacaggaggctgaggtgggaggatcatttgaacctaggagtacaaggctgcagtgagccaacatcaggtcactgtatacagcctgggtgacagagcaagaccctgtctcaaaaaaaaaaaaaaaaaaaagaaaacaaaaaccaaaaacaattacatgtccttcaataggagaatgaactaacaaacagtactacacctataaaatggaaaacttcccaataataaaaacgaagtcgcaatacacacaacagtgagtgaatctgaaaatcattctccaaggcaaagcaggaaagagtgcatactatacagttatattgctgcgacactcagagcaggaaaaatgaatctaatctcagggcaggggagtatcctggctgcaagtgccaaggagcacagggatctttccgggtgacgggaatggtctacatgaggaacaggttacctgttaacttcactgaaacagacaacatgcagtattttatcacaaatcatctcaataatttttaaaattagcacataaaagaattttaatttaaaaaaatacttggatataagtttagtgttttactgttttcagttattcttcacatgtgtgagtgtggtatttccgatctcagcccaccaccaggtcacgtgtgcctccaaggccatacctggatctctgcagtaatggctgcgtgtaaggctgactccaaccctccatcagccatcaagctgcccaccagaagatcaatcaccaatcgatgacctggacttatgctcacttcattgcctgaaactgaaatagaaagtgtgtgccaatttgagtgaaacgccatcccctcccagcaccctgacccatgccctctcctgttccttccccgagcccacctccgcaggacaggagagcagagtgcccgggcctgcttctcagcggtgggcaacagcatggaccagccgctctgcagcatggcctgggaggccgactgcacggtgctcagcacgtctgcgctgcttgccagggtcaccaccttctgcttcaggctgttcaggaagacgctgcccagacctaaaccaaggaattccaggtcaacctggtgactaatggcagcatgcaactgaaaggagaaaaacaattttcacttagaacccctaaaaatgagtgaatttcaaagtcttattaaacactgaataaaagtcaatttgaagtatcatctaaatagacaaaataacttctcagtttacgtatttttaaaaactggactaaaaaaactcttacccacaatagttgaagtattttctagaggaattttttttaaccccactatgaacacatatatggaaaagctcaagatgagcagaagagctaaacaactagcaacagcaacctccaccccgccccaacaatctgcaccaaacacagaaataatggctacaatgtaaccacaaaagctgccataggcggtggctcatgcctgtaatcccagcactttgggaggccgacgggaaagctcacttgagatcaggagttcaagatcagcctggccaacatgatgaaaccccatctctataaaaaaatcagccgggtgtgatggtacacacctgtagtcccagctacttgggaggctgaggcaggagaatcacttgaacctggcaggccaagaccgtaccactgcattccagcctgggtgacaaagtgacaccctgtctaaaaaaaaaaaagagctgctaaaaattagactgtggagctgagagtacacagggaaactcctcaagtgcaaaaccaaaattcacgtgggcacacacagcaggagtcaagaggttccgggctctgaaagcagagccaagccgccaggcttcagcacaacctcccacacgggaatgcacacaaggacccactgaactcgagcttcctgcagaaggctgggagccactcaggatcacctgcctgccagccaaccgcagccagggggcaacacactgcccgtcccaggctttgggtagcaagaggccccatgagaaatcagagacccggccttgccctgtgagtagaagtgaaatcaaaagcacaccactcatctaggtatagatatcacaggtcaggaaatgaccaccgaaactcacctggagtctgtgaaacctacagaaccctcaggaccctggagaggcaaatgcaaaaccatacgctgggacacctcgacagcctaagacatacacaaggccacgccccacagcactgaccagaacagacacatcaccgcaaaccaggaggggcagcaaacacctggggcgcaaccacgcaaacgccaggatgccacagatatggtgataaatgagtgctacagaggactagaggagaagcatgctccagacctctgctcagttcattactgcaactaaacactacactcagttctgtacattctagaagcagggcaaaaaggggaggggctggaagagggacatgacgggttgttacaagaaaccactgtaataaaagggaaaaattactatgtcgagaaaaccgtggttcttgtcattaagttagagggttttattacaaagacaaaagatgatgatcaaacacttcagctttagttttgctagggaggaaggcttttgtagcttttattttgaccctaaccacagccttcatggtgaggaaaggaaggtattgctttgggagccaagcttactgagtagatcaagcttgttcaacccacggcccgagggcagcatgtggcccagggcagctttgaatgtggcccaaagtaaaatttcttaaaacatcatgagatatttttgggattctttttttaagctcatcagctatcataagtgtattttatgtgtagcccaagacaattcttcttccagtgtggcccagggaaaccaaaagactggaccctcctggagcagggttttcacaggacagaggagagacaggccagcactggtctctcagctgagcgctgtctctctccatcacctgtgatctcacccagtcatttctccacacgcaacaacagtaaaacagtaagaataccaacaaactaatgattatagcaaaaa

SEQ ID NO: 1885940 - DNA, 4001 bp, Homo sapiens
gctgctacattaagtcacgtcactcaaaactactaagcattttctacatgaagaaaggctgtttttttaaaggtgtttaaacatgtttgtttttttaaaacttgagttgttgaataaaaagtaaacttcataaattcacattttaaaataattagaactacctcatagatgcacggtaccttctaggttgctaaagccctcttcgtgtctctgaggctgaaatacacacgaaccactgctttaagtgccctgtgagacaggccctgcttaccacagaagcacaagctcacacagcttcctggaaggcaaacttcaagtaccagaatcaagttctttcaagtgctgatgttggtgctcggttctagtgtaaagtcaatttcccttatcatgcagtaactaagcacaagttcacctactggtttcagctgattcaatgggcaaacgcgacacgtccgcatgtcagagaactgcacggtgattttgcccttcagggtgatgcgagtcatggtgacttctccaaagtcatcgtgcacaacttggccacccaggcgcaggcgaccatcgatgcctccaaccacagccaggaccgccatgaggccccccacttcagggttctcggagtcggggaagtagtcctctaactgggcctagtgcagaccaaacagcgagctcgaccggggacactcacggagctgcccaatccctacaggtttactgttcaactaaattaattctgagaacacaaacccaccccttcggaaggccttcccgcaaagctgtgggtgatggagcggagctgggagttgatgtacttgttgatgagcccattccactgagtcagggagtgcagcgtgtgcagcagtgccaccacctcctccaccagtgtgctgctgtgggtggcagtcagcgaggcctgcgggcacaccctgcgccacctcagcatggactctgaggaggaaaccaggggagaagctgctgcaccgctcttcaccagggcacagggaaaggagacggccactcacctctgagtaacggcacgtcagaggagcacatagtgagcaagctccccaagaagtcaaacagcttctccacgaggcatttcatgtccctcgccctttcggtcttgtcccatgacggaaggactgcttgcaacaaatgcacagctaagatctgataaaagaaaatttacaatgacaagcattaaaaaaaatctgatgaggaaactacagattgttattttctttttttttttttttttgagacagagtctcgcactgtcgcccaggctggagtgcagtggcacggtcttggctcactacaaccaccacctcccaggttcaagcgattctccttgcttcagcttcctgagtagctgggattataggcactcaccaccaagcccggctcattttttttggattttcagtagagacaggatttcactatgttggccaggctggtctcaaactcctgacctcatgatacacctgcctctgcctcccaaagtgctgggattacaggcatgagccactgcgcccagcctctctttattttctgttctcataatgcaagtaatcatgtgaaaattttgagattcattattttacagccaggtaattacactcaagttgattagtgattaggattgtcagggactttagaaaaaagcaacattacagatgcatgtgtttaattaaaaaagaattatttttagtttaattcttaagacaattacactacaaattctgtgaagcagatgagtaagtagttgcaggatttaccacttaagagaaaagcaggtaaactgaaggttagcaacttaccaattatcaaggacctctgccccttgcctccagaaaatctaccctgtcacttctagaccctttctgcactcgttactgaataaaggcccctgactctgagggcagggaacttcagtacatggaggcctctctcagggaactggttttgcctggcagcacattacctgcctctgcagcgaggtggcagtgaagggtgcgtgcccttccacgaccttcatgagcagcgtgatccactgcagggagctgagggcgccgcacacctgcagcgtgagagcgatgctctgcacaaaccccagcgtgcaccagctccggtgttgctccctgtacaccagcctgtttggagaagctgcaggagggaaaatagacatgcttggtaacaagtccctaaagacaaatccctaaagatatatccttatttttttatcaacttattttctacaataagctcctttaaaatatattgcagtttgtaaattaattcaaactaattcaaagtgagaagtggaaggcggcttttaagttagttcaagaaacatttccgaagttttcttttttttttgttttttttagagatgggccctcactgtgtttcccaggctggtctaaaactcctgggctcaagtgattctcctgccttgccctgccgaatagctgggactacaggcatttttaaaaccttctaaatatgtgtcgtaaaagtagttagggaattttagctatgtattgtttctaggcaataggaaaatgatctataattcaaatagtaatttgcaacagtgcatctattatatttttaatttcgtgttttaaatatctccacaatcttgcttatatttaatctgcaccacttaaatactctttttgtaattttagtagagacagtttccaatccaagtttaatgcatctgcattaacaaaatgagtttttcactaggtttacaccactggattctagcaccagtgggcccacctctgctccgcctggctccaggactccactactccctgaatggaggctgaggcttggaggctgggccccctgagggaccccgcccacagccccacaggacctgctctccctcccacctcccccaccctgccctcagctatccaagcttatgaggacacctgccttccttcagcacactcacatgcgctcacacacacacacactcactctcacaccctcatatgcatcctcacactcacactgatactaagttattcagacacactcatgggcactcatacacccaccctcacactttcaggtgcactcacaccactgtcgcaatcactaacacacacacaatcccagtcacacgtatgcacaaacagatgcaagctgacacacactcccatgcactctcacatacacttacccctcccaatgcatacaaaaactcacatatgcactcacactcctcaacactagtaacgaccgattactcacccactcacacctttacccacacactttctcactttacactcacacctatactgttataacctcccattcactgacacaagcaaaatgctcacattcactcacacgcattcacaataacatcactcgtgctcacactgacacaaggcactcatacacatttacacaaatgctcgcactcaatcgcacacttacacttgtgcctgccacccactcatacttcctcacactcaccaaccctcactgacttacacttacactgggtgtctcattcgcacacccagtaatcccctcacactcacactcatgcctccctcgtgctcaccctcacacacacactggctcaatgcactgacgctttcactcccacttcacctgaatgtagtcacctgcccactcacatgctctcatggacacacacccacacaaccacatgctacaaacacaccatcacacttgcaacacaaacgctcagccacttgcccatcgaccactaacacactcactctcatcaatatgtgcggacgctccagcacaccactaatacacgcatgctctcacacacacactggaggacgcccacatacccacccacactcacatgtgctcactcgcagtcacatgcacactcaccccactccctcagctcacatttctcatacttactctccacacacacaaacactttatggattaaactgtgcctgtcctccaacttcacatacatt

SEQ ID NO: 1885941 - DNA, 4001 bp, Homo sapiens
aaaaccccactctagtgtatagtaaggggggatattttggaagatcaacaaatttatcttgtgtaacttacttttatgtatgcataagaatatttggtttaaaaatctggttaagtctaaaagagctctttcagtaataattaaataactgaatccctgtaatccaccatgctcagccccattagtaatttttatagcgtctttatttggatctagctctttcatcttgtgtaactcttttaagtaaatgactcctcccttctggtacaggttgaatatccataaaagggtgccttggcatgtgctcagtcctgaaattctactttgatctactgctctcatctttgaaactgctctaaacactcccccaaattattgatcctgtgggcctgattatgaacttggctcttctgacaatacttctcaaatcctgtacctttggtaacatctctcctgactggcagagtacccagacacttaattaatgctgatgaaaattaagatttaagcaaagaagaaattggtgtaagaatgcaagccttaggatctgaaacttgatgactgtgggatctaatttctgcttcttttgctacaagctctgtttttgaataatcaactttcaaagacaaattgcttgatgaatctctgtattgtcagaatgtttctttgatttcccatcaaagccatgtatgtgtaactagtaattaggtacctacgacctgaatataaattatcattatttcagtagccctttatttgtttttgagaaagggtttcactatactgcccaggctaaacttgaactccttggttcaagtgatcctgccgcctcagcctcctgaatagctgggagtagctgggactacagggatgtgttatcatgcccagtgaaagccctttatttttaaaagttcattttcctgatctttacatgtattttaatactaaaattaaatttaaaaattttaaaaagtacctactaaccaaataatgccacccaataacaatagcattatttgtattatgttctggtaatatagtggtgaacaaggaagacagggtctctgataactgtggaattctccttgatcacttctcaagcctctcttccggatactatttcttggatctacagctgtcttccttccccacttctgtagttcagtctctcattattctctacctccaataaaaaggggcctcctaactggtttcttatgcaactactcaacatggtatttctaaaatgcagatctttcgggatgattttcaattgctcagagaataaattccttgactttctacgtaaggccctgcaggaccaggcccctgtcattatctctgagcactctccatcttgcacccaaagccccagcaatatcttactgctttcagtaaatacacaccgggctatgtggggttttgtctggggaaaggggatgtgagttgtaactaagagatttatagtcaatcttgaagggaagagctcatattggaggcaatggaatgcctcaagctggctctgaaagtacacattttttccagtcataagtagatcacatttgtgtgatcttgtgatcctctctctagcagagccgtgcagactacctacttccggccctttcttgccccacgaaatttcacatcacaacgacttgtggttttaatcctccgtttttctgcttctgaagttacttcagcctggcaagtcctttacctccccgtaggcctggcgagctgcatcacaacattcaagattcaccctagagccatctgggaaactttcttctccaggtcgccctgcgtcctcgcctccccaccccgttcttctcgagtcgggtgagctgtctagttccatcacggccggcacggccgcaggggtggccggttatttactgctctactgggcccgtgaacagtctggcgagccgagcagttgccgacgcccggcacaatccgctgcacgtagcaggagcctcaggtccaggccggaagtgaaagggcagggtgtgggtcctcctggggtcgcaggcgcagagccgcctctggtcacgtgattcgccgataagtcacgggggcgccgctcacctgaccagggtctcacgtggccagccccctccgagaggggagaccagcgggccatgacaagctccaggctttggttttcgctgctgctggcggcagcgttcgcaggacgggcgacggccctctggccctggcctcagaacttccaaacctccgaccagcgctacgtcctttacccgaacaactttcaattccagtacgatgtcagctcggccgcgcagcccggctgctcagtcctcgacgaggccttccagcgctatcgtgacctgcttttcggttccgggtcttggccccgtccttacctcacaggtgagtcggacttgtcccgccctgttcctgggccctgagagtgcctgcctggggacagttcccccagggctccagagacgccctatgggcttttgtccagccctctgatcacaggcactccacttcctcctcgagctgcattaggttttcatccaaagataactactataggactacggttcaatcaggagattaatttatggaaaatactgtgccagcagaaatctaaggtgatccttctgaccgtgttcaagctagccagggtcctagtgagactgtgagcaagggctgagtagagaccagagaaaacactcaaaattggggagacataatacaagaactatgcaaagttacatacaagtttctggcacatagaatgtttggcgggcggatcacgaggtcaggagttcgagaccagcccggccaacatagtgaaaccccgtctctaccaaaaacacaaaaaattagccaggcgtggcggcgcgcgcctgtagtcccagctactcgggatgctgaggcaggagaatcggttgaacccatgaggtggaggttgtggtgagctgagatcgcgccactgcactccagcctgggcaacagagcaagactccctctcagaaaaacaacccccccccccaaacaaaacaaaacaaaacaaaaaaagtgtaaattgtgaaagaaatcatagaacataaggaagtgagtttccagcggccacttggaatgggatggtagatgtaattagccgggactgaaaagagggtattccaggcaggaagaagggcttgagcagaggcacaaagaattatgattgagttcaaagttcaggtctagtggatgtgatgagtgggggctggggattgaggagggatgagggtggggaaaatgtggggttgaagagtcaagagcgctttagacattggtttcacataaaatggaaggggctaacagttttcttttaggcagctatgtaatcagtactgaaaattgtatttgaggataattattccacagcacatttgtaagtcgagccaacaatgtaaaggaatacaattctgctgcatgggttcaaaatttagaagtttcttgataatctggaatctagctctttggttatattgtatagatgttatgggggtgggagccacatttacggttaagtcttgtagtaatattttatatgatgtttcaagtgtgtttaaattactttcacaaaagttatcatttgatatatagaattaaaagcatttaattatacagatgacccttagagagtgacatttgatttggggaaagaaacacaatctcagcatcagggtagtccttaactggtaaaatgcattaagctggagaggataagaggcctgctgttgagtgtggtagatcacattttcctctgaatccttcatgacaaataatagagtgccttacccaagattggcactcagaatatgttgattttggtttagaagagtttgagcctggtttatggaaaaaaaaatccgtctaactggtatatgtcaatcccagtgctgggcactctgaaggttacaagaaaagtcttaagacctaggcctaggctctatagttcaattgcgaaaatatgaaac

SEQ ID NO: 1885942 - DNA, 4001 bp, Homo sapiens
ggacaaggaatttactgaacatgaaagtacactccagtgtgggagcgggcctgagcttagaagttcagtggctccgttacagaattttggggagtttaaataaccccagaggattccatggttacttcgggtatgccttatgtaaatagagaagatgaagtaaagttacaaagacatttatggcctatgccctatggacagaatattacctgttatagctgaagtgtgaattggccttatgttccctacctccagaccctattttcctgcctcaggaggattacttgagcctaggagttcaagtccagtctggacatcaatagtgagacccctgcctctgaaaaaaaatttttttgagacagagttttgctcttgttgcccaggctggagtgcaatgggatgatctcagctcactgtaacttccacctcctggattcaagcaattctcctgcctcagcttccctagtagctgggattacaggagccggccaccacgcccggataattttttgtatttttagtagagacagggttacaccatgttggccaggctggtcttgaactcctgacctcaggtgatctgcccacctcagcctcacaaagtcctgggattacaggcgtgagccaccgagcccagcaaatttttgttttttagacggagtctccctctatcgcccaggctggagcacagaaatgcgatctcggctcactgcaacctctgccgcttgggttcaagtgattctcctgactcagcctcccgagtagctgcgattacaggcgggcaccaccatgcccgactaattttttgtatttttagtagagacggggtttcaccatgctggccaagctggaaaattttatttttaataaatgaaaggcagagtatttatctgaaaaaagtgggagaccaacagtctcatgggattgttataaagattaaaagagagagtgttactgaaatacttagaagagctgttattctattgctgtcctttccccttgtatttggatagattaccgtacttgtttcttctatgtaactctaattgtcagtggggttctccctctcttagaggcctggagaaacttgtcttaaatgctttcccagttaatgaattgggagaggcagattttatgtctaaattacaagggcgagacttaaaagtatgaattggggctaatgtcagtgctcaggtgcagggatcctccgttttgttcatcacacagctcccggcactttaataaatgaggctcaaagaaacgacgggcttaggtcatgcagtagtcaaattcagaactcatgtttgattccaaagcccacacgttttcctagtttagaaacactaaacatttaattcaccgcaccgggggccagacaggtaatggagaacgccttaagtatgttaggaagggaagttatctacagtcgcagccgctattcagatctatttcactgccttgcagaaaacgccgactgtcgtctctttatcccatggccgatttcttgtgaaatctcctaacttttaaatatttccaatcaaaagactgccgttcaaatgcagcccaccaggagcatgtttgcaaactctggagtaaacaagagtgggaagctgataaggtgagtacctcagttcgatagtgacagccaagaaacggggagttttgtacctaaggcgagaaagaaattctccgccgaaatctcccggaagaaggactgaattaaatgcagattagagtcagggcagggtaaggtggcgggagaactaggctgccatcccaggtggctggcctaccagccagcgcggccggaggtacagaccatgtacagaccacggcgaggggtgttaggggcttctcgggataaaggcagcgagtggctgcgcattccctccccgactctttcagaggtaagccttctgtggagcagaccctaatcctccccctgattccttaggtcactcggcgatttacttccttcccccgcttcctcacagtcctccacagccctacgacttccgcttgcctcgtcgtctgggaaaccgccgacttccggccgcgcagcggtgggctgagctaaaatggctgaggagagagtcgcgacggtgagcgccgagattctctttagttgcccggccgcagggcaaggcaagctggcgggtggcttttgtcccatgcagcggttcctggagagaggcggagctgggtgccgagcgtctcagggtgggcggggcgacacggtcccctttttactgtcccgggaactggtcgcctggggcaagtctggatacttagcagcacaggtcctgttctaggactgtagtccctcttggggtgcgctggacggagaagggagacttttcaccagtaatggctcttaccgtagtgccatctttttctgtctcgggggtttggaaggtaatgactagcacttgtgtagacagttcctgttaatcccgtgaattgggaatttaacatgcctggaagcttgcagcgtcactgccttctgccagtggagcgggactgtgttttttctgtggtgattaagtttaggaaagtacggttttggaattcatctgaaggctgagttgggcgttcactccacagaactgctaatatagaggaacccgatgaattcaggatgacctagtcgctattttttgaggcatatatctataattggatctaatttcggtaaagtgccaagtgtgaagctttgtttaccttgctttagtgttgggtttgaaagcctgttctgtccatttgttagaatgattttaggtattcggaatttattgtctttcgaaaaacgccctggaaaacagtacaaatagcagcctttggctgttttacaacttagttttggctaagcagcaaggttagtgttattgttagagggccttttgtttgttttctactctcatttgcagagtagtcatattattctagtctaattagaaaactctgaagacagaaacttttttttttgagacggagtgtcgctgttgtcggcccgggctggagtgcaatggcgcgatctcggctcactgcaacctccgcctcccaggttccagcaattctcctgcctcagcctccggattagctgagaatacaggcgcctgccaccacgcccggccgaaacatttttattaagctaagaaatttaaaatagctaggccggacgcggtgcatcacgcctgtaatcccagcactttgggaggccgagacgggtggatcacttgaggtcatgagtttgagaccatcctggccaacatggtgaaaccccgtctctactaaaaatacaaaaattagcggggcatcgtggcgctcgcctgtaatcccaggtacctggaaggctgaggcaggagaatcgcttgaaccccggaggcggaggttgcagtgagccgagatcatgccattgcactccagcatgagcgacagagacagactccttctcaaaaaaaaagaaagaaaaaacagattttaaaataattaaataggccaggctcagtggctcacgcctgtaatcctagcaccttgggaggctgaggtgggtggatcgcctgaggtcaggagttcgagaccagcctggccaacgtagtgaaaccctgtccctactaaaaaaatacaaaaaattagctggacgtggtggcgggcgctggtaatcccagctactagggaggctgaggcaggagaatcgcttagaacccaggaggcagaggttgcagtgagccgagatcgtgccatttcactgcagcctgggcatccagagcaaaactccgtctcagaaaaaaaaaaaaagtaaatagcatggttaatgttactgggttttaaatattaaaaacataggaaagaaaatacttccactccagcctgggtgacagagcaagactccgtctcaaaaaaaaaaaaaaaaaaaaaaagaaaatacttctaagtaatcttaaagtgtaaaagataatgggtaacataacattgctacaaatatagcttatcctctagtg

SEQ ID NO: 1885943 - DNA, 4001 bp, Homo sapiens
gtagagatggggtttcaccatgttgcccagtctggtctcaaactcctgagctcaggtgatccgcctgcctcagcctcccaaagtgttgggattacaggcgtgagccactgcacctggccccatttttcttttttttttttagtcaatgtctcactcttgtcacccaagttggagtgaactggtgccattatataaagcttactgcagcctcagactcttacactcaagcagttctcccacctcggcctcccaaacagctggtattacaggcataagccactgtgccccaaccttactagccattttttaaatgctgaaaagccacatgtgactagtggctacaccattggacagctcagatacagaacatttctatcatctcaaagttctattggacagaattgctttaaggaattatcctcattataaaatgataagtatgctaaagctcaaaaaaattaactcattcagactttctgagattccaaaacttcatgttgtttaacaccaaccttctcttggtgctttccagctttttcatgccggggaatacataaaaatgctatttgtatagagcactctggggtaaatggatgtgactaaaagatcatcagcccctagtctcctgctcttgtctctacacacccagctcaggaatgaggaggatcaacagctcagcacacttacctgatcatgcagttctgctgtacattataacagtgattctcgaagtgtggttccaagacttgaagcatcagcattacctgggagcatgttagcaatatacattctcaggtcccatccccatcaccatcccagacctaccgaatcagaaattctgggagtagagttaagcagtttgtagtttaacaagccctccaggtgattctgatacacataaaagcttattcagtgaatagtgctaggaaaattggttgtccattatgggacaatacagacacacaatgaaacaatgtataatatatatattaaatgcctggaaaatcgataacaaaaattgtatcctaaatactaccttttgtacccctcttcagagatgttgctaagtgaatcagttaatttttacatattttatatcgaactaatgtacattttgtaggttttctcagtttaattttatgttccaacgcccctcaacaagtgaacacccttcttttcttcagctttgttgtaatatttagatatggttattaattcactaatagtagaattagtaagttaagcaaaagcttcagtaccaagacacaaaatcactatatatttgccttgtggttcttaactttctaaaggtcattgactccttgcagcatgtgttactagaaatggatattctggctggacacattggcttacgcctataatcccaacacttgcaaggccgaggcgagtggatcagttgaggtcaggagtttgagaccagcctggccaacatggtgaaaccctgtctctactaaaaatacaaaaattagccgggcgtggtggcacgtgcctgtagtcccagctactcgggaggctgaggcagaagaatcacttgaacccagaaggcagaggttgcagtgagctgagattgcaccactgcactccagcctgggcaacagagtgagactctgtctcaaaaaaaaaagaaaaaaagaagtggatattctcaccagaaaaatgaacctatatctaatattttgaatgaaatttcagaataccttgatttaattgtaatgggataaagatttagttagaagttcatgttttgtaggatattgcatatttctagtttgattgcttgcttttttaaaaaattaacttgttccttttttctcctacttgtaactctaaggtggatacattgcaaatagcctagcaatcatgacagatgcacttcatatgttaactgacctaagcgccatcatactcaccctgcttgctttgtggctatcatcaaaatcaccaaccaaaagattcacctttggatttcatcgcttaggtaggtagttggtgtttcttttgctttataatattttatagtaaaaccacaatgaactataaccctgattaactgaactcgttccagtgatatcttgtttgaacaaagcaaatgaaaatagataaacaaaatttattcagaaacatcttttccagggtacatttagcctagtcagctaaacagtttacacatataaaattatatgatgatcattaatcttcaaaggttgctccctatgtcctgaagatatcatcagaaaaaagtttactttcagtttattgaacaaagcaaaaccacatgggtttaacccgttaatgagcattagcttctctcttttacttcaggtatttcagccaaagctaccatagcttagattttaagcagagctatcacaggtataatgtatgctgtgtggctgaacttgactgcagccatcgtatcaacataattctgcaaatgcacacatttttatttgcctgttttgaacaaattttaatgtttaattataaagagttaaaatcatacattgctatctacacagctctgcttcttactgtattactgtttttaaattttttgcttattttgaaaatatgtataaaataattacctgaactattatatgaagtaacatttacccagatgtcagactcaaaagtagaacccaaaagttgacatttaagtagcttcagcaaaacttgcctcaaagaactagagttaatatctgataatttcattttgtaggaacactgatgctcctggctaatatatcaatcaattcctcatcatcttttttattttttagcctaaaaaaacttagactgtagattttttgtttgtttctttacctatattttctttgtatttgttttttgttttttgcttttaagacagagtcttgctctgttgcccaggctggagtgcagtaaactttttgtttctttacgtacattttctttgaatttatttctcgtttttgcttttaagacagagtcttattctgttgcccaggctggagtgcagtggtgtgatcttcttgcactgttgcccaggctggagtgcagtggtgtgatcttcttgcgctgttgcccaggctggagtgcagtggtgtgatctcagctcactacaacctccaccttccaggctcaagtgatccttccacctcagcctcccgagtagctgggactataggcgtgcactagcatgctcagctaatttttgtgatttttgtagagacagggcctacctacaagggggtcatcctttgcccaggctgatgtcaaactcctgtgctcaagccatcctcctaccttggcctcccagagtgctgggattacaggtgtgagctgccatgactggcccacagcatccaggacctcttacttagtgactgggtcttctggtgcaaaacttgacactgtacctaaatggtgatattccaagtagctatccaggtcatcaggttggaaaattatctagcatccccacccctccgtactctcagctactgtacaaaagagctaaagccccaagtgaagtttttcttttgttaagctactgcataatgcatgtgaatgtgttcctggccaggcacggtggctcacgtctgtaatcccagcactttgggaggccgaggtgggcggatcacctgagatcaggagttcaagaccagcctagccaacatggtgaaaccccatatctactaaaaatacagaaattagctgggcatggtggtgcacgcctgtaatcccagctactcaggaagctgaggcagaagaactgcttgaacccgggaggcggaggttgtagtgagcctagatcatgctgctgcactccattctgggcggcagagtaagactcttgtctctctcaaaaaaaaaaaaaaaaaagaatgtgttcctaaaggaaactccactgcttctcaacatattatatagtcatttgtttactggttgccttaggatttttaaacagcttcaaaattatttttaaacattaattt

SEQ ID NO: 1885944 - DNA, 4001 bp, Homo sapiens
tctaatttcttgttattctccttgtcttctgccagcccagagaagctaagctcaagccacttcttcttctttttttttttttttttttttttttgagacagagccttcttctgtcgcccaggcttagtgcagtggcatgatcttggctcactgcaacttccgcctcccaggttcaagcaattctcctgcctcagcctcccaagtagctgggattacaggcgttgtgcccagctaatttttgtatttttagtagagacgggctttcaccatgttgaccaggctggtcttgaactcctgacctcaggtgatctgcccgcctcagcctcccaaagtgctaggattacaggcgtgagccaccatgcccagccggcatttcttaacaatgtttttgcaaatgacttccaagattttgctctgctggagcatttcccgggagatgtttggggaaagatccttaagagtcaaccataccacggacaaagccgacatactctggcatcaaatcatcaaagctgtccatgatccacacatgatggacacagagttgttcattttcctcttgttctaaaaaaggtcaaagggagcctgatgagggatgaacagcaatgccctgaattccaaatgaccttctacagggaattgcttgactgccaagtggtcttcccaggcactggtgaggctcttgtagaattctccacactcttcctgggtgatgtcatcagggtttctggtccaaatcggcttggtctggtttagttcttcccgatcagtgtatttctccttgatcttctttgttttcttcttattattcttatcagtgtcatcctcctcatcggaacccacatcttcagtcttgggcttttctttatcatctttatcttcctcttctttctcacctttctcttcctcatcatcactgatttccttctctggttccttctccaaataaacggcgataagacagcctatgaactgagggtgcttcttcactacttctttgacccacctctcttctaagtactctgtctgatcttctttaaggtgaaggatcactttggtatccctgtcaatgggctcaccatggtcaacatgtaaagtgaaggaactcccagcagaagatacccaggaatactgttcttcgtcattgtgctttgtgatggctactttctctgccaccaggtaggcagaataaaagccaacaccaaattgcccaatcatggagatttctgcacaagactgaaaagcctccataaatgcttcagtaccagacttggcaatggctcccaaattatttatgagatcagccttggtcatgccaatgcctgtgttgaccaaagtcaggatgcattcccgagggttggggatgatgtcaattttcagttctttaccaccgtccaacttggaagggtctgtcaggctctcatagcgaatcttgtctaaggcatcagaagcattagagatcaactcctgaaggaaaatctccttgttggaatagaaggtattgattatgagagacatgagttgggcaatttctgcctaaaaggcaaaagtcgccacctccccttctccatggtacacctctgcaggcatcttgaaaggaaaaggcttacaagtactagagagcaaggtgggctgagtgtccaaaatgcacacggcaccaaggctgcacaggggtgactcaagagctaattctttatactaaaatttcattcttcaatttactgtatggattctgcctcgtaaatggaccttgcttagcacatgtaccataaagctacagtaaccaaacagtggcataaaaatatagacagatcaatgaaatgaaagacctaagaatatataaataggtctcaacatatatagatcatggcaattcaaagaattgataggtttttcaaaaagtgatgctaaaaaatttatatccatgtgaaaaatattacccttgacccttacctctatcataaagaaaaattaaattgaattgcaatacagacttacatgtaaaactgtaactggaaacatctagaagaaaactgtcatggccttggtagtcaatgctaccttaagaaacaaaagcaaaaatcataaaagaaaaaaattttttcattaaaagggcttcttaaaaattcaaaacttccgctgagaaatagctttaaaaaaaaaaaaaaaggcaagccacagtctgggagaaaacatttgcaatacatatggtctgacaaagaacttatattcggaatatctttttaaaaacctcttacaaatcaataataagacaaccattgaaagacaaacaacaatgtgaaaaaatacttcacaaagaagatacacaggtggcaaacaagcatatggaaacctacataacatcattagtcaacaaagaaatgtaaatcagaactagaataatatattatcacataccctttgctagaataacatctccaaatattagtagggtgttgagtacctggaactcacacactgctgatgggaatggaaaatgacaacatcactttggaaaactgtttagcactttcttacaaagtcaaacatataaaaaccaggccaggcacagtggctcatgcctataatcccagcactctgggaggccgagacaggcagatcactgaaggtgaggagttcaagaccagcctggccagcatgtttgaaaccccgtctgtactaaacatacaacaattagccaggtgtggtggcaggtgcctgtaatctcagtgatttgggaggctgaggcaagagaattgcttgaacccaggaggaggaggttgcagtgagccgagatcacgacactgcactccagcctgggaaacagaacaacactccctttcaaaacaaaaacaaaaacaaacaaggccaggcgagttggctagtgcctgtaatcccagtactttgggaggctgagggaaaccccatctaaaacaaacaaacaaacaaaaaaagcttatgacccagcaattctactcaagaaaaaagaaaacataaagcatatatccacacaaataactgaacacaaatgttagcagcagctttatttataatagccaaaaactgaacataacctaaatgtctatcaacaagtaaagagaaagatgtattcatataatggcaaactactcagaaattaaaaaaaaaaaaaagccaactattgaaaacacgcacttttgttaagacacaaaagaatgcagagtctaattccattgatatgtaattctggaacagtcaaaatctatctagtagtgacaggaagcaaatcagtagttgcctagggtggagactaagagtaaaaagtaatgagggaattttgtgatacgacagaaacattctttatcttgatttcaatggcagttgcctaagtatatacatttgccaaaatgcacctctaactatatacctaacatgaatatattttatgtaagtaggggtcagtagcatacatttactagcttgaaaactgtgtacatttttaaacattgtctattttctcttttccttcatttcacgtcagtcttggcacccttttagtttgaggctgtactcacattcctcttgccaaataactcccagggcttcccaggtacaagaactccaggctttctacttaaagccttaaggacccaagctactgctgttaagtaatcaacaaagcccaacacatcttctaaatgagaactccacaaacttaaaaatagactctcctgaacaaacaagtatcctgcctcaacttttgctgcctatcatgtattttcataaaattacttttgcaaactgataggaaattctaggccatatatgtgactgtaaatacataaattatgtttataaaggtacacactattttgaaaaatcattatcatatttacacatttacagttactataaaaacactatctcaaaacagcatcgtcattaaaatttattattcagcaaaattgcaccctgaaacccctgttaaatgaaagcactagtattctatatggtaaaaaaaa

SEQ ID NO: 1885945 - DNA, 4001 bp, Homo sapiens
agataccatagccttttcaatcttgtccttaatggctttatctttcacccaattgggcagaggctcaaattctttctcaactgcttcatgactctccttagttttctcactgtcatcaaacttcactccttccttggcaacattctggaacctcttcccatcaaattcgggaagggcctgaatgcagtattcaaccacaggttctgtgaggtaaataacttcatagccccttttcagaagtcgctaaacaaatggagaagattcagcctcttttctgctggacccagccatgaggcagattttgtcttgtttttccttcattctttcaacatcctggtgtaggctagtaatgtcagctggatgatgagaagactggaacctaagaagtttagcaagacatgttcgattcgagtggtcttcaattacaccaagcttaatgttggtaccaaattctttccaaaaagtatcattgtatttctcatcagcaatcttcttgatcatgtccagagttttatgaacaagtttcttcctaatcaccttaagcagtttatgttgctgaagagtctcacaggaaacattcaaagacagaccacctgagtccaccacacccttgacaaaattcaggttcttaggcatcgtatcacggaagtcatctgtgatgaatacacagcgcacatagagcttaatgtaatcgctctttttagatccatattcatcaaataggccacgtggaacaaatgtgggtacaaataaaattgatttgaaggtaacttctccttcagcagtaaagtgaatacaagccacagggtcatcactttcctttgaaaatgatttgcagaaagctttgtattcatcttctacttcttggatggtctctgccatattggtttgatatcattcataagttcccattcacagacagttttttcaacttttttagtctttggtttctgtttttcttcttcttcctctactgcagcttcatcataagattcttctttctcttcttttgctgctgcttcttccttcatggctccttaacagtttcagtcttgctgctccatacataaataggaaagtttatgaactgtgaatatttttgatgagatttttaattgtatccaatgcaaggtaatcaaatgctttttcttttaagacaagggtaatggtcgttccccgtcctagagtgtttcctcttgggtcagcaattacagaatattcattggattcagactcccagatgtactgggtatcgttgttgtgttttgaagtgacaataaccttatctgctacaaggaagatggaatagaaactgacaccaaactggccaatcaattcagaagttgactggccatcttcctgtgcttcagtcattttgtttaaaaactcgtttgttcaagatttggctatggtaccaaggtttttaaccaactcttctctggtcattcctacaccagtgtctgtgacatgcagtaggttcttcaccttatcacacttaattttgactgttagttcctcatttccagaaagagcattttcattagtcagtgatatcagccttatcttaactaaagcgtcagaatcagttctctaaggaaaatctctttattttcatacaatgaattgatgataagtttcatcattctgttaacttcagcttggaaggcaaacttttccaacttctctctaagttctcttatttgtgatgcatttaatttatccaactgaatagcttcttcctctctctgtactacttcatcatccatccttgagccttgtctacttttacccagatcctcttctactgtaccttccacatcaacttcatcaacagctctgaccgacccgaaggtcagcaggacgcagcagaggccccagcacccacagggccttcacagcttgtggctggtgagtctcaagtccctttcgatcgcaagagccacctccaccctctcacccccgggttggatcctcacacctccagccgcgtggtccgcccacaaatttaacttttataagcaaaggtcaattctctgaacaaagtctaccccattgggctatggcagatagttaataagtaatccaatcacaaatttttctttatacataaagaacaaacatgggaaaatctaggctataatccttgtcaaaatatttcttataccacttctcgttaaagggttaaaaagtactaatatggtttcatagcacgggatgatgactttgcaaaaaaggattcctataactgcaaatagattttccaagttggaaaactgaaaaatctaatttcagaaatataagtaggcattcaacatatatgccaatatgccaatcacaaaagaacaagacatacgtatctatttacttccagacagagcaaagataaactaattttataatgctttctacccactataggcattgtacatagattaaataaaacttttccaggaaaacatgccatatacttgaagccaataagatacaatttccagatatttagcaaagtccagtatagggaagggaatgaagaatgggtaaattcacaaagtagtaagatttcataaatcatctaaaatgagtaagcactagaattcaagtacaagattcaaataaggttaagtgataaccagaaaaggccatacaaagtaaatccatttaatacagagaccaaattttacaataaataataggaataaaaagcttgatttggacattctcttgaaaaacttttagtttatcttatatgtaatacaattcagattataatgaaaactacgtgcttattcttagaacataaaaagagcaaattaaatgttgcctttgtggcaaaattttttccaaaaaattgtatgctagcccaattcaaaatcatttgagtttcacagggcaatcataaaggttttgctttcaaaacactgaaaagttacattaagcttcccaagtgcatctcttaatgctttaattttcaaatcattctccctttaatgcctgtacctcaaaagcatttttggtctttctcgtttactttttaactggtctggtgaatgctgtaatattcaagaatcacctgagaagcttaacacacaaacaaattacaagtcaggacagaagcacatgctaaacgaagatgggtttctgaatgggtactaactttataagtcatacatcagtgagtattttgctttcctacacaacttctccggcaacctcataactgcacgaacttggataacaaattcatagccaatgagaaacccctgtgtgtgtatttatattaactgtatatataacaacaggggatataagtcttggtctgaataccttagggtatgtaaatgtatcttgatcaggaccacatgtataaataatttttcagtagtgtaatataatactgtaccaaggatgtcagggagttccttttcatatagagtctctccaagtactgcagtccctcatctttcagtaactccaatggaaaatggtgcagattcctataatttaagaacaaattcttgtgcttttctagccttgccacagagatcgtcttacaaagttcggacgccatgactgaatatatcccatcaggcacgctgcagcactatatcttgtcaaaattggtccatttctataaagagaacgagaaaatttattcattgtaagattttttacaagaattgccatataaaccagttagcacacagagccacttgaagacactgaaaaaaataattaatacattcaatcctacattttactttcaaaactaaaactgtcacacatatttaggaggagattaaaatgaataacaatttaataaaaatactctgattaagcaatatttattacttattagaaatagtcctaatggaaaaaaatagtttttgcacttgagataggaaaccttgtgtaagaaaaacagtgaccagtttcataacatacaaccaaaggagaagcttaaaaatcaaatgcagcaaaccccatttcttttatgaactacc

SEQ ID NO: 1885946 - DNA, 4001 bp, Homo sapiens; identical to SEQ ID NO: 1242124

SEQ ID NO: 1885947 - DNA, 4001 bp, Homo sapiens
acgaaggtatataagaaaagctgcatctcttaacatattatgaaatcttagaatcaattagaatgtaatcaaacatcatcaatattcggaaaattaacagctcaatttctactaagacatggcttctcccagaaagcaaggactattttaactaacatcttacctttagtgggtggtctaggcaatgcataggtgaggaggctttttgtctaaggggtgttgttttgggaatttgctgataacattcactcccagaagagttcccaggaagtcatcttctgaggtttaaaaaaaaaaaaaaaaaagaaagaaaaaaaagaaaaaagagaaacaccacttccaatgaaacaagcaatgcagctggaatctggaaattccttctctgctactctttaatattgatttaatttggaatctaccccttacttacacagttctgaaaccataaccatctagtccacaactacacatttcaatgtcagcacactgcatcagggaccttctctcttgcgcatttccagacccgactagatcacctgaatcccactgaaagttatgtctctttctgttttaaaatcatttgtcttctactgcttagttggtcaggttattcacaaaattactcaagacaatctacttatacatcttttttcaataaaagtttattgagaacctgttctatgacaggcaatccacaaggtgcttgtatcacgaaaaaaagaactgaaaaaatatctggacataagaaattaaaagtccactggatgaatcaatcatataaataaagagctgacacataatggtcttatggaggcagattcagttttgggctcggattgccgaggaagacctgttgtgaccactcgtctttaactccccagaactgtatccaccctcagctggctctcagatgggttttcatgctatttaactggaaacaaatgtcatcaaactcaagaagagcaagatctattaactccttccatcctaggcctgtttcctataaacatgcagttccctgcccacatacctgcaagggtgtccaagagaccacaggtaggcatggagagccactgaccagggagtaggttgtcagctcattctctggagttttctttaattcattcttttgcttcctgacaagtcaataaacaaatttagtaatatttatcacaatgtggtagcttacaattctattttcaaacatactttccccaacataattttagctaatatttctaagacaggtattttataaatgttgtttttatcgtatctgaaagttaaggcaagggcatggacagttttgcttccctaggggctctatcatcacctgacataaaagaaaaagagaaaaaataacattttaagaaaaaaaatgcaactaaaatacatacatctgtatgttaatataaaatacacacacacacacacacacacacacacaatctaatttaacaatgaaacattcaggaagaatgggtatcctgtgctgggaaaacacggaggttgctaagccctttgtgtgtcacgtgcacaggcttcaaatacgcactgccctccctttaccctataaggtccaatggacacagagagtggccagctaatgactacgttagtaagataaaatattcccattctattaagactgagtgttataaaacaaaatttgtaccattatatacagagcaatacgatcatggtctattagcacccagtgaagcccaaggaaagcttctaagaattccactggtgaaggacatgtttctagctcaacaactttcataagaccatcttcacaaaatatacatttcaataatttctaagtatctggaaaggttggattaaactaaggtactcttttttaaaataatagtctaaaatttggcccaaaacaataatctagtgaaaggcaatatttatgtgcaataatcaggactatcctaaccactcttcatttaaaagacatacataaataaaatatcttgatctatgatttggaagaaagcatgtaatacaaaatcattttcaacagcaccaatataactagaaagtctagatatgataaaatgatgtaactctattcagaatagcctcataacagtggcttacatgtgatttactgatctcagccctgttgattacctaagggacaaatgtaaaactgtgcatatctcaaacagatgtgctaataacctctgaagccatctgcaaaacaatccatcataaattttaccaaatgtatttacaggttttcttcaattgtcctgtccctgtcaaccattaagatatcttgaaattacagattcatgtaaaagtgtaatgtcttaactttacaaaaaaagttaagccaagaacatataatagttaaaacgtgcatttgtcttctgaataaaaacatactgatacaaggctactgttttaattcactctgttgtctcctgacaagttaatagacacatttagaaatatttatcacaatgtggtagcttacgattctattttcaaacatacttttcccaaaataattttagctaacttttctaagacagatattttataaatgtttttatcacatctacatcttttatcatagaatagcatacatgtagtagctctagataatctgagtccaatagaactttctgtggcaaaagaagtgtcttataattctattctgtaatatcaattatgttgataatacatggtgtagagtaacttgagaaaaatcactaaatgggtaaagagtgcaatcagcgtgtttcagcctatcactaactgtgttagggacaagttctcattttatttaatatagtatcttcaagatagagagcaccttttcaatgattaggagagatataaaataaaaataaagatagtattacttacaggtcctgaggggtatatggcatgcctggagtccacacgcagaggtcagggagcgagagagagagagggagagagagggagagagagagagagagagagagagagacacccaggggccaatgcccttattgggtcaagggtactattcaaacaggttttctgtggagacttttaagtggtgggtttaaagcaagcaggcaagagttccctggggtcacactgtgactgggaggtggacactggttccatgaggggtgtggggttccagggtcttgtcaagtagattgcatcaagctgtcccatgatgaagtggtccaaaggaggcagttggataaggcagctatctggaccaatcacactgaggaacgagaaggaggtgtagaactggaaactgtgcaaaagtgagtaagccttgcttctggtataacaaagttaaacttatactcaagatggatgccgaggcaacataaaattataagaattcactacatgcttccaatgcccatacccaaaaggacacactgctcaggcctcagggacattctctcaatcacacatctcattctagcccaatttcatcttcattcccaaaaaggagaaactgttcaaacattcttgatatccaatacctttctgctataagctaagcagagaaatgtcaaacatcctagaatctctaggaatgaaaaccatggaggactcaccatgtgattaatgttgatatatgatttgattacaagaggcttcccaaaatagatcaaattattgcctagttaaaataattccccactggctacaaacatacttgccaggcacagtggatcatgcctgtaatccctgcactttgggaggccaaggagggcagatcacctgaggttgggagtttgagaccagcctggcccacatggtgaaaccctgtctctacaaaaacacaaaaattagcggtgtgtggtggcacgtgcctgtaatcccagctacttgggaggctgaggcaggagaatcgcttgaaccctggaggtggaggttgcagtgagccaacatcgtgccactgcactcccgtctgggcgatagagcgagactcagcctcaaaaaatatatatatattttcttac

SEQ ID NO: 1885948 - DNA, 4001 bp, Homo sapiens
agttaatataaaaaatttgaacttacagttggacatggtggcttctgtaatcccaacgactcaagaggctgaagtgagagactggcttgagttctggaccagcttaagcaacatagtgagaacccacgcctaaaaaataagtaaaataaaaagttaaaaaaagtttgaacttatgcttagtaataaagcataagttatttttgttttttttgtttttttttgagacggagtctcgctctgtcgctcaggctggagtgcagtggcacgatctcagctcactgcaacctctgcctcctgggtttaagtgattctcctgcctcagcctcccgagtagctgggactacaggcatgtgccaccacgcccggctaatttttctatttttagcagacacagggtttcgccatgttggccaggctggtctcggactcctgacctcagatgatccactggcctcggcctcccaaagtgctgggattacaggcgtgagccaccgtgcccggcctaaagcataagttttaaccaactttatatgttggggaccttcaacagatttcgtttgaaaaaggactccactctttttcaaaatttaatttggtcaggtgcagaagctcacacctgtaatcccaccactttgggaggccgaggcgggcggatcacttgagcccaagtgttcaagaccagcctgggcaacatggcaaaattccacctctacaaaaaataccaaaaaaagcagccgagtgtaggtggcacacacctgcagtcccagctacttgggaggctgagggtgggaggatctcttgagcccaggaggcagaagttgcagtgagccgagatcgagcagctgcactccagcctagacaacagtgagatcctttctaaaaaaaagaaaagaaaaagaaattctataaagttcaagttctataaggtaaagttcaacttcaaattctgtaaggtaaagttcaagattcggcatatgttggtgggtgctcaatgttcaataaaaactggggaataggcctggtgcagtggctcacgcctgtaatcccagcactttgggaggccgaggcaggtggatcacgaggtcatgagtttgagaccagcctggccaacatggtgaaaccccgtctctattaaaaatacaaaaattagccaggcgtggtggtgcacgcctgtaatcccagccactcgggaggctgaggcaggaaaatcacttgaacctgggaggcagaggttgcagtgagctgagattgcaccactgcactccagcctgggcaacagagtgagactccgtctcaaaaaaacaaaacaaaacaaaacaaaaaactggggaatataaaatttcgccatactatcctacatcccccttgagtttttagcaacgatagtaattgttatatgatgcttaacgcgtaattactgtacctcatttacataaggtggtttcagacacatcatcttgtttatgtatggcctctccaaacaaaatgagtttaggacaaaagaggaaatccttttctaaaagcagttttgtccgtaagttactgcctcaagaggccgcaaagtttgagcaaagcttttccgaaagtaatggattggtaatgggtgactgaggtccacaaagctcgataagaggctcctggtccgtctaccaggttcttagagggaggtgcctttgtgtgttcggacgctgcactgagacacgtgaggtttttaaataaacttttgattttgaaatctctgggactaattttaaacagtgaacccgacagcgaggacctacacacaaaagtgctcccggccttaccaaacaacgcagacccggggtcacgcctcgtcctgtttcaacaacaacacccaagggcttccctggagcccagggcgtgggagggagacttgggtttgagttctgcaccttgcggaggtggttagttatttaattgtcttccacctgaattttcctcaggcccaaattgatgagacctccccgaatccctcccctgcccgagttactaatgacggcgtgaggtcacacctggccactcaaaaccagctccttgacgcaggtgaccctccgcctcgcgcagctcacgcttcccatcccccggactccacccccagcgggaggccacggggccgctgtgcgcacgcgccgccgcacaccgggggctctcgggcacccgcgcggcgccggttggccttcccggcgctcgcccgggggcgcgcttgcgcgccagcggctgcggacaccagcctgcgtccccggcgcggcgggccatggaggccctgaggagggcccacgaggtcgcgctccgcctgctgctgtgtaggccgtgggcctcgcgcgccgccgcccgccccaagcccagcgcctcggaggtgctgacgcggcatctgctgcagcggcgcctgccgcactggacctccttctgcgtgccctacagcgccgtccgcaacgaccagttcggcctctcgcacttcaactggccggtgcagggcgccaactaccacgtcctgcgcaccggctgcttccccttcatcaagtaccactgctccaaggctccctggcaggacctggcccggcagaaccgcttcttcacggcgctcaaggtcgtcaacctcggtgagtggcgactgccgcgcccacgcggtgaagcccgcccggccgggacggcccctcagccaccgagcacgtgacgaacgctcgcaggccggtagagtcccgcgggagtcagctctgcctcccggcgccggcttcgcctggggtcctttgtactcctcgcccagggggtccccagcttgctgagctcctggcacccgaagccgttcgcctgctgcgggcgcgtcctcgggcctagggaggggcgggtcgccctcctgtcctgcccatgttaaccagagtagacccctggcctgggcagtaagccagggggcgtcaggaaacgccccctagaaagtggctctgaagttgacatccgtcctactgcatggcaggactcattcccgtgaacatcactttgcagctgcgtttatgttgcaataactggaactactcttttaagtttcttttgttttctttgtatgaattcccggcaagttcgttttactaaaagcaccaaaggttttcaccagacataacagcttcctgaggtgctaggcctaaaagatttttaaagatctttaatatttgtatattttcatggagacgccctgaggatgtttactgtcactaggtgtttattttcttttggtttaatgacagaagagggaggtacgaacatggacatgggtgtatcttttataggtcaggggaaaacagaaggcctcaagatgttttgaacttactaatagctggcataaaatcaatctagatttcagtgattcaaaatctagccatggagctgaatgaaccatgttacccagccaggtttttaaagccaggattaaaactaaaccctgcgcagccgtactactaatactattacataatctgatcgtccattaaggttaaaaatagtctgtgtatttgtgcttataataacacatatgtcagtcgtgggctttttgagccgttactccactggactgtcctgtaaggagataattgtttagcaacgtgttatcctttaaaaatgcctcttattatttggctgatggactgtatagagcatgcccactactttggaggttggttgaagttgaagggtgaggtgacttaggaaattcaattcgaaattatttggaaagactggagtgttaactagattcgagaagtataagtttattttagcatttttcataagtaagaaatcattcttccctaaagaataataggttaggaaaagcataacgggagagttataggtaaaccatgagccaaatgcctttttttcctttaaagtcacatttttagtgttgacattttgtttaagagcaccttaatgattaggggcctctcttttagatttagagattaagacatccaaaaaaagtggatactcag

SEQ ID NO: 1885949 - DNA, 4001 bp, Homo sapiens
agttctggaccagcttaagcaacatagtgagaacccacgcctaaaaaataagtaaaataaaaagttaaaaaaagtttgaacttatgcttagtaataaagcataagttatttttgttttttttgtttttttttgagacggagtctcgctctgtcgctcaggctggagtgcagtggcacgatctcagctcactgcaacctctgcctcctgggtttaagtgattctcctgcctcagcctcccgagtagctgggactacaggcatgtgccaccacgcccggctaatttttctatttttagcagacacagggtttcgccatgttggccaggctggtctcggactcctgacctcagatgatccactggcctcggcctcccaaagtgctgggattacaggcgtgagccaccgtgcccggcctaaagcataagttttaaccaactttatatgttggggaccttcaacagatttcgtttgaaaaaggactccactctttttcaaaatttaatttggtcaggtgcagaagctcacacctgtaatcccaccactttgggaggccgaggcgggcggatcacttgagcccaagtgttcaagaccagcctgggcaacatggcaaaattccacctctacaaaaaataccaaaaaaagcagccgagtgtaggtggcacacacctgcagtcccagctacttgggaggctgagggtgggaggatctcttgagcccaggaggcagaagttgcagtgagccgagatcgagcagctgcactccagcctagacaacagtgagatcctttctaaaaaaaagaaaagaaaaagaaattctataaagttcaagttctataaggtaaagttcaacttcaaattctgtaaggtaaagttcaagattcggcatatgttggtgggtgctcaatgttcaataaaaactggggaataggcctggtgcagtggctcacgcctgtaatcccagcactttgggaggccgaggcaggtggatcacgaggtcatgagtttgagaccagcctggccaacatggtgaaaccccgtctctattaaaaatacaaaaattagccaggcgtggtggtgcacgcctgtaatcccagccactcgggaggctgaggcaggaaaatcacttgaacctgggaggcagaggttgcagtgagctgagattgcaccactgcactccagcctgggcaacagagtgagactccgtctcaaaaaaacaaaacaaaacaaaacaaaaaactggggaatataaaatttcgccatactatcctacatcccccttgagtttttagcaacgatagtaattgttatatgatgcttaacgcgtaattactgtacctcatttacataaggtggtttcagacacatcatcttgtttatgtatggcctctccaaacaaaatgagtttaggacaaaagaggaaatccttttctaaaagcagttttgtccgtaagttactgcctcaagaggccgcaaagtttgagcaaagcttttccgaaagtaatggattggtaatgggtgactgaggtccacaaagctcgataagaggctcctggtccgtctaccaggttcttagagggaggtgcctttgtgtgttcggacgctgcactgagacacgtgaggtttttaaataaacttttgattttgaaatctctgggactaattttaaacagtgaacccgacagcgaggacctacacacaaaagtgctcccggccttaccaaacaacgcagacccggggtcacgcctcgtcctgtttcaacaacaacacccaagggcttccctggagcccagggcgtgggagggagacttgggtttgagttctgcaccttgcggaggtggttagttatttaattgtcttccacctgaattttcctcaggcccaaattgatgagacctccccgaatccctcccctgcccgagttactaatgacggcgtgaggtcacacctggccactcaaaaccagctccttgacgcaggtgaccctccgcctcgcgcagctcacgcttcccatcccccggactccacccccagcgggaggccacggggccgctgtgcgcacgcgccgccgcacaccgggggctctcgggcacccgcgcggcgccggttggccttcccggcgctcgcccgggggcgcgcttgcgcgccagcggctgcggacaccagcctgcgtccccggcgcggcgggccatggaggccctgaggagggcccacgaggtcgcgctccgcctgctgctgtgtaggccgtgggcctcgcgcgccgccgcccgccccaagcccagcgcctcggaggtgctgacgcggcatctgctgcagcggcgcctgccgcactggacctccttctgcgtgccctacagcgccgtccgcaacgaccagttcggcctctcgcacttcaactggccggtgcagggcgccaactaccacgtcctgcgcaccggctgcttccccttcatcaagtaccactgctccaaggctccctggcaggacctggcccggcagaaccgcttcttcacggcgctcaaggtcgtcaacctcggtgagtggcgactgccgcgcccacgcggtgaagcccgcccggccgggacggcccctcagccaccgagcacgtgacgaacgctcgcaggccggtagagtcccgcgggagtcagctctgcctcccggcgccggcttcgcctggggtcctttgtactcctcgcccagggggtccccagcttgctgagctcctggcacccgaagccgttcgcctgctgcgggcgcgtcctcgggcctagggaggggcgggtcgccctcctgtcctgcccatgttaaccagagtagacccctggcctgggcagtaagccagggggcgtcaggaaacgccccctagaaagtggctctgaagttgacatccgtcctactgcatggcaggactcattcccgtgaacatcactttgcagctgcgtttatgttgcaataactggaactactcttttaagtttcttttgttttctttgtatgaattcccggcaagttcgttttactaaaagcaccaaaggttttcaccagacataacagcttcctgaggtgctaggcctaaaagatttttaaagatctttaatatttgtatattttcatggagacgccctgaggatgtttactgtcactaggtgtttattttcttttggtttaatgacagaagagggaggtacgaacatggacatgggtgtatcttttataggtcaggggaaaacagaaggcctcaagatgttttgaacttactaatagctggcataaaatcaatctagatttcagtgattcaaaatctagccatggagctgaatgaaccatgttacccagccaggtttttaaagccaggattaaaactaaaccctgcgcagccgtactactaatactattacataatctgatcgtccattaaggttaaaaatagtctgtgtatttgtgcttataataacacatatgtcagtcgtgggctttttgagccgttactccactggactgtcctgtaaggagataattgtttagcaacgtgttatcctttaaaaatgcctcttattatttggctgatggactgtatagagcatgcccactactttggaggttggttgaagttgaagggtgaggtgacttaggaaattcaattcgaaattatttggaaagactggagtgttaactagattcgagaagtataagtttattttagcatttttcataagtaagaaatcattcttccctaaagaataataggttaggaaaagcataacgggagagttataggtaaaccatgagccaaatgcctttttttcctttaaagtcacatttttagtgttgacattttgtttaagagcaccttaatgattaggggcctctcttttagatttagagattaagacatccaaaaaaagtggatactcagaacattccacacatagaaaagtaaaaccttttaaagttgaaagaaacaacagttgtagtgttttttgttttgttttgtttattaatgtg

SEQ ID NO: 1885950 - DNA, 4001 bp, Homo sapiens
cctttctaaaaaaaagaaaagaaaaagaaattctataaagttcaagttctataaggtaaagttcaacttcaaattctgtaaggtaaagttcaagattcggcatatgttggtgggtgctcaatgttcaataaaaactggggaataggcctggtgcagtggctcacgcctgtaatcccagcactttgggaggccgaggcaggtggatcacgaggtcatgagtttgagaccagcctggccaacatggtgaaaccccgtctctattaaaaatacaaaaattagccaggcgtggtggtgcacgcctgtaatcccagccactcgggaggctgaggcaggaaaatcacttgaacctgggaggcagaggttgcagtgagctgagattgcaccactgcactccagcctgggcaacagagtgagactccgtctcaaaaaaacaaaacaaaacaaaacaaaaaactggggaatataaaatttcgccatactatcctacatcccccttgagtttttagcaacgatagtaattgttatatgatgcttaacgcgtaattactgtacctcatttacataaggtggtttcagacacatcatcttgtttatgtatggcctctccaaacaaaatgagtttaggacaaaagaggaaatccttttctaaaagcagttttgtccgtaagttactgcctcaagaggccgcaaagtttgagcaaagcttttccgaaagtaatggattggtaatgggtgactgaggtccacaaagctcgataagaggctcctggtccgtctaccaggttcttagagggaggtgcctttgtgtgttcggacgctgcactgagacacgtgaggtttttaaataaacttttgattttgaaatctctgggactaattttaaacagtgaacccgacagcgaggacctacacacaaaagtgctcccggccttaccaaacaacgcagacccggggtcacgcctcgtcctgtttcaacaacaacacccaagggcttccctggagcccagggcgtgggagggagacttgggtttgagttctgcaccttgcggaggtggttagttatttaattgtcttccacctgaattttcctcaggcccaaattgatgagacctccccgaatccctcccctgcccgagttactaatgacggcgtgaggtcacacctggccactcaaaaccagctccttgacgcaggtgaccctccgcctcgcgcagctcacgcttcccatcccccggactccacccccagcgggaggccacggggccgctgtgcgcacgcgccgccgcacaccgggggctctcgggcacccgcgcggcgccggttggccttcccggcgctcgcccgggggcgcgcttgcgcgccagcggctgcggacaccagcctgcgtccccggcgcggcgggccatggaggccctgaggagggcccacgaggtcgcgctccgcctgctgctgtgtaggccgtgggcctcgcgcgccgccgcccgccccaagcccagcgcctcggaggtgctgacgcggcatctgctgcagcggcgcctgccgcactggacctccttctgcgtgccctacagcgccgtccgcaacgaccagttcggcctctcgcacttcaactggccggtgcagggcgccaactaccacgtcctgcgcaccggctgcttccccttcatcaagtaccactgctccaaggctccctggcaggacctggcccggcagaaccgcttcttcacggcgctcaaggtcgtcaacctcggtgagtggcgactgccgcgcccacgcggtgaagcccgcccggccgggacggcccctcagccaccgagcacgtgacgaacgctcgcaggccggtagagtcccgcgggagtcagctctgcctcccggcgccggcttcgcctggggtcctttgtactcctcgcccagggggtccccagcttgctgagctcctggcacccgaagccgttcgcctgctgcgggcgcgtcctcgggcctagggaggggcgggtcgccctcctgtcctgcccatgttaaccagagtagacccctggcctgggcagtaagccagggggcgtcaggaaacgccccctagaaagtggctctgaagttgacatccgtcctactgcatggcaggactcattcccgtgaacatcactttgcagctgcgtttatgttgcaataactggaactactcttttaagtttcttttgttttctttgtatgaattcccggcaagttcgttttactaaaagcaccaaaggttttcaccagacataacagcttcctgaggtgctaggcctaaaagatttttaaagatctttaatatttgtatattttcatggagacgccctgaggatgtttactgtcactaggtgtttattttcttttggtttaatgacagaagagggaggtacgaacatggacatgggtgtatcttttataggtcaggggaaaacagaaggcctcaagatgttttgaacttactaatagctggcataaaatcaatctagatttcagtgattcaaaatctagccatggagctgaatgaaccatgttacccagccaggtttttaaagccaggattaaaactaaaccctgcgcagccgtactactaatactattacataatctgatcgtccattaaggttaaaaatagtctgtgtatttgtgcttataataacacatatgtcagtcgtgggctttttgagccgttactccactggactgtcctgtaaggagataattgtttagcaacgtgttatcctttaaaaatgcctcttattatttggctgatggactgtatagagcatgcccactactttggaggttggttgaagttgaagggtgaggtgacttaggaaattcaattcgaaattatttggaaagactggagtgttaactagattcgagaagtataagtttattttagcatttttcataagtaagaaatcattcttccctaaagaataataggttaggaaaagcataacgggagagttataggtaaaccatgagccaaatgcctttttttcctttaaagtcacatttttagtgttgacattttgtttaagagcaccttaatgattaggggcctctcttttagatttagagattaagacatccaaaaaaagtggatactcagaacattccacacatagaaaagtaaaaccttttaaagttgaaagaaacaacagttgtagtgttttttgttttgttttgtttattaatgtgggagagtgatttaatggtctgtatggtcttttggacattctaaaaatcctgctaaaatgggagtaagagttctaagttaagcaaaaaggacaactttttgctcatgcatgctttaatacaaattgggatatactgataaagggaattaaaaaatattttaaagtggtgaacacatctggtaacgtttatttttaatttttgtctgaaggtagaggggatgtgaattagataataggtcctttcctattctgtgaggtacaatcgtctctctgggtgataaagtacatatcctattaatattatacttaggattttgttcctcttcttcccttccaaattcatttttccattttgtaaataataaagatttctgtttacccatttgctccttttctcctccgtcttcccttcaatggaagctgacattttactgatggtttaccagtctaggtatcctgctgagaagtagattgagatttaagaaaagcaacttaccattggaatgaatgagatttactgaggaattctaattttttaaagtgcttaatttgacagtggtttacctactgttcagctgactcaaagtgaattattatgcaaagaactgatttggaggttcttttgatgttacatgtttcagatataaatttaatttttcagaaaaaattgaatttttcatagaatcttatagacttcaaagcatgtgtgctacaaagattttgtaatatataagttatataggtggcaaaccttcccattttgagtattagtctgactgcatt

SEQ ID NO: 1885951 - DNA, 4001 bp, Homo sapiens
atttgggctttgccccctttctttgcagttttccccccttcctgcctctccgggtttgaaaatggaggccgacgacgccgacagcccgccccggcgcgcctcgggttcccgactccgccgagccctgggccgctgctgccggcgctgaggggccgccccgcgccgcccgccccgtccgcgcacccggagggccccggcggcgccgccttcggagtattgtttccttcgcccttgtttttggagggggagcgaagactgagtttgagacttgtttcctttcatttcctttttttcttttcttttcttttttttttttttttttttttttgagaaaggggaatttcatcccaaataaaaggaatgaagtctggctccggaggagggtccccgacctcgctgtgggggctcctgtttctctccgccgcgctctcgctctggccgacgagtggagaaagtgagtatgtgcccgccgcccgcggccactgcgggaacttttcctccgaggggctgcgccctgtttgcgaaacccgagttgccaccgtcgcagctgtcgggcccccgggctcgggagcggcggggtggggcgcagggcggctctgccgggagggaggctgcagcggacccgggacccgggctcgttcgtctggagccccgcgggccctggctccgcgcatccccgcgcgggaagggcttttctctttctccgtcctgacagcccagccgtgtttcccggctaggcgcgaggactcggtagggaagttggtgccggggcgggctccgcggttcccgggccccgcgacccgcacctcgccccttccatgcgcaagagcctctccgcacacagcgctgatcccctgcggcgcgcaggcagcagcgacagcaccctgggccgcaccgcgtctccgctgctggggctgaccgggcagtggggagcgggcagccgcccggcccgcggggtgcgagttgccctcgaggggggaggtgccctgcggagaggccccgaagccccaggacacgtctccaagcgcccgtcgctgcctcccgtcgcccaacgtgcttttgcccctcgggctcctcgggttcctggccttgcccgtcactttggcccgctcctcgttgggttacctgcccccggcgtcccggggctgggcggtggggtgaggggaagcgctctctgggcagccccccgggaagtgcgaggccgggagtcttcctcagcttgtctcttccggggagcgccactgggtccccagttcagagggctctgggatggtctcccagtttctcccgggccgggggatggaggggtactagggccgcatccgagtgtgcgttggtgggtgtgtggtcggagccgacgtgcattccgacacacgtgctcgcagcgcggggtgtagtcgccgcctcacggggacacctagacgcccgtccctggcgagaggtgtcgtacgctgtggtttcagcgccagggtctgcggcggcgcggggagggtgttgtgttttgcgagcgcggagccctggccttggttttgttgtggtcggcgtcgtgtcgccctctcttctgccgccccgcacttcctttgtacgtagttaataagcagtgtcgctccacattcgctgtcttttgcaatctgatagcttttgttttggtggtgtcgggtgggggttagtagggaagcgcggggatgcggggagcgagaactccccccggtgtctacggccggaggaggtgggggttttattcttctgaaaaagttgaaagtgtggcttactggtacattcaagatggtagggtaatttgaacacgattaaaagtttaaatgtcgcagaactgggactgggaacggtgagggcgtgttggtgagtaatggttgccgagggtatgcaggtggtgccgattaactttgaaaaaatcacgactgagccttcacgagtgaggcggggaaggaggaggcagcggaggttgtatggccccatcaccggggcaattcagaaaggctgtttctataaacaaatccttaaacgtctggtaagaaatgagtccgcgacggaacgagagcagatcgtggttcgcgtgtttactgccgagtgggacgcggactggggccggaccttccacagatctgggctctcctgctctttgttttctaaactttcagcggactcgattgggcgaaagccttccggctccctttactaagtcgtttaggtggtggctggggggacaaaggagggtttttatctttaaaagataagtacggtttagaagacacgggagaaataatccattttgttatgttatgcagttgaactgtatagcttctctagttttgtgtttttaatgttctgaaattcaaaacagcagggatggccttcgccgacgcaggagtcgggcattttaaaataggctgtttttcttttggagcgttcttcttgaaggatattctttgtgcaagacggcgatttttgagaacacaggcaggagggagggggtgttttaatgtatgtttttactccatgataccaaagcttccccccaggatccctttacagtggttagttcctggaaacctgatgggtggtcagaaggcaccccaaatctcgattatggtttgctgaagtcttgactgactcagtacctgcccctccctccatctctgaaatgtggagaattaaaagctatgcctgtgaacgggcgttcagtttttagccgggaaggtgctagaccacttaactctgatagaaataagctgctgagccctatcagggagggcgttctttcagctgttgtctggtggagaaataaagacagggtgttggttcagttgcaggtattttgctggcgtattgagagattagagtttcctctttgagtgtgatggcagtagaaagagtgttgtttatcttagaaaacttagtttctgaagcagaggcagtcatatggatgtgtttgttttgtatcaccataatgtgaacagagcatctaaatgaaggcggttcggaggttctgagtgatagccagataatctgagggctattttgtttttaaaaagtcagcatgcactttaaatttattgtacccatctccttaaaaggattcagtcatctttctaccccaggcatcctgttgtcacagaaatgtaggtatgtgaaatgttggtgtttaaagaagttagtgttttattaccagaaggagaacccagaaaaagaacttctgaaagaacctaaacagcaaattatagtttagatcctctggagagacatagcaagcaaatggtgttttgtggaagggtggggtttgtgtcaggatttgaaatgtaaaaggtcataatgtttgatttgtcgaaaaagattagaaaagttcaactctaagaaatatgctaaggttgaatagatgaagcttaaaaatatcacaaaaagtgaaagaagtcagtcacaaaagaccacatatcgtatgatccggtttatgtgaaatgtctagaataaacaaatccatagaggcagaaggtagatgagtggttgccaggggctgggggcggatggaatggggagtgactgctggtgggcacagggtttctttttggggtgatgaaaattgttctaaaattagtttgtggcgatggctgcatagctctaaatatacttaaaaccattggattatgtactttaaatcggggactttaatggtatgtgaattatatctcaataaacccttttttttttttttaaagaaatgtgatcaggttgaaaataacttgttatgctaccttaaattacgttaaaattattacatacatttgacaggctgatgtctctctctcttttcatttatgagtttttcagatccgtgagttgcagcaatacaacaaactgataattgaagcttagcaacagggattcaatcccgcagtagaaatgggcaagcaggagaaaaagaatcttggttctatgtagcttcagttagggattgaggagctggatttaaaaaacacaaatgctgg

SEQ ID NO: 1885952 - DNA, 4001 bp, Homo sapiens
tgcttctgggtgcctttgagggtatttccaaaggagactggcatgtgagtcagtggactgagtggggcagatctgctctcaatgtgagcgggcaccatccaattaaccaaggacccagaacaaaaaaggtgagaaaaaatatttcttccttctggagctgagacactcttctcagacttctgctcccagacatcagaactccaggccctccaccttgagacttgaagatttcacaacttggactgagccagctaccagcattccagggtctcctgcttgcagatggcctgtcatgggtcttttcagtctccataatttcctgagccaattccctaataaatctcctcatagatctgtatctatatctatctgttatctatcctattggttctgtctctggagaaccctaacacagggactgaataaataaacaggtaaatgactttgataccttacaattattattaaatgtagtggagttttacaaagaaacaaaacttgtacccacaattaataaacattcacagagtattttgactttttcttaaaaaaaaaaaccctggaaaatcatctgctttccaaattaatgatatctacgacaatctaaatggaatgtaaatcaatacacttatgaggttttgttttgtttttgtaaaaaggccttgctctgtcgcccaggctggagtgcagtagtgcaatcagggctcacttcaagcttgaccttccaggcccaagtgatcctcccacctcagcctttcaagtagctgagactacaggcatgtgccaccatgccaggctaatttttttcatttttgtagagatgaggattctccttatgctgcccagactggtccggaactcctgggctcaagtgatcctcttgcctctgattcccaaagtgctggcattacaggcatgagccaccacgcccagtgtgtgtgtgtgtgtgtgtgtgtgtgtttgtgtgtgtgtctccgtgtgcgctcgggtgatcctcccgcctcggcctcccaaagcgctgggattacaggcatgagacactgcgcccggccaatacactcatgattttaattataatatttatgccaatgaaaacactagcaaaaaggtaaaacagctgccaatttaatgtgaccacttagtctaaacaggctagtagaaatgaagaacttttaacctgcaaatgcaacaaaaagccagaaatgaatgggaagacattatgatctccagaaaagtttggctaaattttccccagcccattgtcttagcggggtagggaattgcagacagcccttaaatactgtcatttttggttgagaactcatgtggaaagtcctcaaagccaaattccaactcctgttttactgttttttaccctcgagcttgctgagttgtcttggctctcctggaaaatacatggctcaaaaaataaaatagaagttttagcggtgtgaatctagtagtcgactacagggggtattaaaaataaacactccatcccggttaacacgtgaaaccgcgtcgctactaaaaatacaaaaaaaattagccgggcgtggtggcgggtgcctgtagtcccagctacttgggaggctgaggcaggagaatggcatgaacccgggaggcggagcttgcagtgagccgagatcatgccactgcactcaagcctgggcgacagtgcgagactccgtctcaaaataaataaataaattaattaattaattaaaaaattaaaaccaccaccagagcaaaaacttacagcgcttacaataccttccacgtgctgttttattttacataaaaccatgacgattaaaaagctggcctctcagctttccgggtattggtttgttttccccctaaactgtcgtttttataggcacttgcactgtcttcttagcagaattgccaatggccttcctcgagtcctacgtttagcgattggcaagaatcatgcactgacagagctcgactccggagggcacaaggaagtagacaacaaagcaggaagaagcaggaggcgcacagatgggcgggatctgcactggaggcggtgcgaccttgcggggcggtgcaagctggcggaacccgcgtgagagaggttggtgttgcgaagggaactagtccggtgcaggacgtggggcttttgcagctcagctggttccggctggggaagatggcggtggctggggcggtgtccggggagccgctggtgcactggtgcacccagcagttgcggaagactttcggcctggatgtcagcgaggagatcattcagtgagaacagttcgggtccaagcggggaaggagctctgggatgtgcactgcctgagcgaaccgggaagcggggaggactgaaaagttaagagagaaatgtgataaaggggctgcagtctgtagtctgtaggcgtcgaattttggcctccacctttgtagtttagtttctggaatagggtgtccggctccacagtctgccggtcgggcttttttcctgggaagacgcccaatctgtaataattagaaatgcaaggctgtcccaggagccagtttcctttctagagagaaggggcaggtcaaactgtatttcctaactttgaaccccttactcttttatttatttattattattgttgttattattgagacggagtctctgtcgcccaggctggcgtgcggtggcgcgatcttggctcactgcaacctccgccttccgggttcaggtgattcacctgcctgagcctcccaagtagctgggattacaggcacgcaccaccacacccggctaatttttaaaaatttttagtagagtcagtgtttcaccatgttggccaggctagtctccagctcctgatctcaagtgatccgcccgcctcgacctcccaaagtgctgggattacaggcatgagccaccgcacccagatatactctgaacattttagtcggcccaatctgagttgtgtcagtagagccaacagggtcagctgtgtcaataggacctagaatttaagtggaagcagcgtggtagagtacaaatagcttctgactctggagtctcaggttctatattctgttgtcgtttacctgttttagaacccaggacaacttaatttttctctctgtaccctggtttcttcatttataagattaatcattagtagagcttatcatgctttatgactcctatgaaatggagatggtgtacatgacttaatatctactttcaactgattgaagaacatttgttgcgctgctgttacacgccaggtgctggggtaacaaagacaagacagttgggttccccttcgttgatgagtgctgaggttggggaaatgaaggggcttgttggagcacaaaataaaggattctcattaagatttgaaaaactcggaaggtttattggaaaggataactttcacccgagaactaaggaatagacagaggtggcggtccaaagtgttcaggcaggggagaaaactacaaaaatgggacttgatcgaagaactgaaagtgttccttcatttgattccttggtcactgatgttgaaacctaaattgctgttctagggcttttgtaggaagtaagatgagtttctgagtttcggagaaaatagacttttggcaaggagacagttcaagtaggttattttaatggatttttttgaggccctaggagatggctcaagcccttattcccagcactttgggaggtagaggtgggaggattgcttgagactgggagttggagaccaccctgggcaacatagtgagaccctgtctctacagaaataaaaaaagtaaacaacaagataaaggattttttttaacactagaatagacaacaaaacaaaacagcgaaatcttatggtttggctttacccttgcttgaacgcagtcagattaagtatttagtagttttcaaacattttttaaagcagtggaatgctatcaaatgaaataatgaaactttgcaatatataaaacagaaaagtgttttttacgaa

SEQ ID NO: 1885953 - DNA, 4001 bp, Homo sapiens; identical to SEQ ID NO: 1242154

SEQ ID NO: 1885954 - DNA, 4001 bp, Homo sapiens
tccaaatcactgcctgccattcaaacccgtgtaggcgaactccagttggcatttggttttgaattaatacatattagtgggtggtaatacatttctaccagtgcatatatttacttgaaatacaattttccatctaatgcattttattcacatcactgcatggtaactgcatccagaataatatctttaatgattattcattactggaataatgtatcggtgccaaacagtagcttttaagtggcttcagatttttttctttaaattgaacatgttattattacacagatagaataatcccattatccctactaactgaagatgacagctttccaggaggctctttgacaaagctgaattcaggtgggaaccaggccttcctctgactagggatggggtggaggtgggaggtggttaggtagctggtcttggggaaggtgctgctttgaatgtgaagacacatgtgggatgaacagatggagcagaaagctcgtgtgcatgtgaggtatagttcagagtaaagtgagtgtgctgtttaaaacaaaaagtgaaggtaaggacagacgtgtcttttgaaagctgtgaatgagtgtgtgtgtgtgtgagagagaaacatgggaaggatgagagagagagagagacataaacagacacacacagagagatatggagtaaaagagacacacacagagatatggagtaaaagagacacacagattgagagagagagagagggagggagactgagatttttctgtaatagcaaaaaaatatgcaaaaaatcttctgggattgcagaatgatgtagcaaagcatcacaattcatggagaaacttcaggatgaattgttatgatctgtgggaaggcaggattatgtcttagaacatgaggcaggaggaatcacttattgaatgacatttctattgtgtaactcttttatttattttttttctaaatgacagttattatccccattttctcagattaggaaactgaggctcagagaaatcagatttaattgcccacagtcatctacctagtaagtgctagaaagacaatttgattccaaatccatgtaattataaatcctgtgttactttcactggattcagaatgaggagtggttaagactattagctgctaaaatcctagttttatcacttacgtttgcagactgtagggctttgggccaatttcttgatttgatggttgccattcttctacaggaatgttgtaaggattcagtgagaaagagcacatggaaagtctcagatcataaagaattgttcagttattgcaaatatgttctttatttcccccccaccccatgacctctgaaaccagagaggagcatgccctgcaccacccatgaaactttgtgaaaccttgcctcctctgcctcctccagtccctggatccacagtccttgcctcaggcgggcttagagctgaactagatctgcagcctttctttgtgcctagtgttcatcacccatcagcactttggaggtcatagtctgagggtttctactaaacctcagagaagcaacctagatcatcttcattgtttcatagtcgttttcacgttaggctttcctgggaaaggcttaaaaaatgagggcaccaagggctcattcaaagagatgaaaccgtaaggtactgatatttttaaatatcacctgtcattctaatattctactagggctgatcactattggtctttgatttaggatttagtttatagatgggaagatcagcaaagcaaaccttgaaggctaatggacagtgagggtaaaaagctgtcttcattttctgttgcctaacactctgttacagagtatctaaaactgggcaatatataaagaacaacatttatgtcttaccattctggaggctgagaagtccaaggtcgaaggttcacctcaggtgagaccttcctgctggggactctctgcagagttccaaggtgttgcagggcaatcgcatggtgagagagctgagtggcctgactcaaatctctcttcctcttcctagaaagtcaccaacctcacactcatgatgaaccactaattcattaatctatgaatctattaatgagagcagaaccctcattgacacaattacctcttaaaggctccatttcttgatgctgacacactgaggattaaatttcagaatgagttttagaggggacacatattcaaattataggtgaaactgggtggagcccaatagaaagcctttgtccagatggtctgaagtctctgatccaggtgtctccaatgtgagaagccagaacagaagctagattgccacaaccaggtgccgggccaggtgctgagaactgaggaagagttattaattttccagtgctgccaagaaagaacccaagacattgcacatgcagttttctttcctctttctgacttagctttttctttttctactatttcctatatagattaaaaaatttggtgtgtaaataactatacaggaaaatgggcttttttagtgtatattccaaaaattttaacacatgtatagatttgggtaaccacctccacagtcagaatatagttccatcacctcaaaaaaatttctttgtgctatccccttgtactcgcacactcccccaaacccagccccaggcaaccactggtatgttctccgtcactgtagttgtgtttgttcgaggatgtcatataaatgtgatcacaatgtctataatcttttgagactgaatttttacattcagtctttgagggtcatccaagtatgaatgatttgttcccttttattgctaagtagtattccattgcaggaatgcatagcatttgtttaaccattcattcactgaagggcatttggatggtttccaatttggggtgcttatgaatagagcttctatagatatctggcacaagattcttttgtgtgtatgaatacaagctttttcttttctctagagtcatatggtaattgtgtgttttactttataagaaacagataaactgattttcagactgactatactatttttcattcacagcagcaaggtatgagaattctagttgctccatatcctccccagatcttgatattttatttttatattaacaattctagtaggtatgcaggggcatcttgtaattttaattggcattttccttatggttaaagatgtagaaaatatttttatgtccttatgtcatccttaagtaatctttgaagcagtccgtgtttgtcttttacccattaaaaaatgtgcactgagttttcagagttctttatgtattctagttacaagctctttgtccaatacacaatttgcaaatatttgctgcaagtctgtggtttttcttctaattatcttaacactgtctttcacagagcaggatttgaaaaattttgataataactattttttctttaacagattgtgctttttgtgtcatatctaagaactctttgcctaacctcaggtcatgaaggtttcccttgtgtttcctctgaaagttttatacatttatgttttgttttttgatgaatgatctatttaaggcatgaagtttaggttgaagggcatttaaaaaagacctttttgcatacagtgtgcaactgttgcagttcatttgttgaaaaacaaatcaacaaagaagaaactattatctctctattgaaatccttttgcatctttgccaaaaataaattagttatatttgcatagatatattcctatattctctattccattccattggtctggatgcctatccctttgccgataccatactcgcttgattactgtagctttacattacgtcttaaaattggatgatataatttctccaactttattctttttttcaaaattgttttagctatagtagatttttgccttccatgtaaattttcttctctatatccacaaagatattttgctagaattttgacagagattgcattaaacctatagattaatttgcaaagaattagcatatt

SEQ ID NO: 1885955 - DNA, 4001 bp, Homo sapiens
tttgattgcacccccttaaatgttgtgccctggggcaagtgcttcattcacctcacctgaactagctctgttcctcgacattggccctcaagaccctggctgaggacaatcacgtggcctttctgagcctcagtctccatctctctgtctgtcagatgaggctgacaggccgccctgcagggctgtatgggttggaggggatggtgcaccatgtctagcacagcccctgatgtgaccgagtgtcctgtggcagcagagtggggcacctgaaggccatggccttccctgggcttgctgcctccagcctgggtactgctgagttctgggcccgagtgaggagaggggacaggacaaggctagggaccccagcacccaagctcctgcctttactgtgaggagaacccttcactgagggaactaaggctttcccaagaaccctgcctcgtaggaccttagctgttcctgagtccctgacactggggggcactgtgggcatgaggggcattccccagaggtcctgcccttggaaagcaagagatgaagaaagcggacgtcccccaaccccactcagacacacgtcccatgaagggtgagggatgagagcacctctgagtggcactagagtggggaccacactggaatgctttggaatatgtcatgattcagtggaaacagaaacagaaagggtgtcagtgtccagaaacgtgggcttaagtattgattctttgtctagcagcaggacaagtagctggagagatggtcagagtccgtgcatggagggccccctttgccaagtgcaggggtctgggtcccccactccctgtgggcagaggctgcctccagtagagagaagagacatgttctagagagtgttggaaggatgctgctggccacgggcagtgaggcaggtgcatgggaggggatggggacaagcagcagggagcacgggctgccacatggctactgagagtgacaaaaaaatcaagacagtgtcaccactgctgacctcatgatcatacatcacagaaggaaccttagtaaccagcccaggaacctccttcctctccattacttggagcccctccatgacctcccaaccaatctaagcttggacacatcctgtgatagggcacccaccccactgatgctgcctgaccgtcaggcagcttgggctcctctttactttggattaaaatacttctagttgcaacacttatcaatgctccccggtctctcattctgaaatgcatagaagtgcagcctctggccctcagggctctttagccacctgaagccagctgtcttgagctcctacatcttccctctccaggatctgtgcccgcctcccccagacaggccatcacagacctaatactgcatctgtgcatgctctcactgagcacctactgtgtgccaggcaccaaggctgggcatcttctaccagggtgactgtcatttaatcctcccagcaagcttgagagatcgggctcattgcccccattttacaggtgagaaaactaaagctcatagtcatgagaggtacccaagctttctcaggaggttagtcatcaaaaaggctagaactcaagtgttgatatagtgccccacagtcttttcggaagaaatcccaggtttctgctcggggagttagttctgttgtgagccgtaacatacagcaactcaatcctcacacaagccctgtgaggggagctctgtcatcctgcccattctgcggagaagtcatgcaaatgataaaacgtacagctctccagggtctgcacttctacatctgggcaagaagaaccaggctattctggcccttgccggacaccatccaccattccagagacataaaaaaatgctggctttagtgtatttacagtggagctagcaccccaacgattaatacttcccactccccttaaaaatccccagcccatctttgcacttcaccttcagggagaggctggtgagcccttttaaccgcagccagaaggacttggctggtgttcctcacgcccagggtcagacatgcacacagcacacctcccagccagccatgaatgaggtgattatgagctaagaacctttgattccaggaccccaagtgagcactgaccaggggtaaccccaaaggcagctcttgaggaaggcatggaaactgccttacctcccctttgcagccacaaaagagcagttctcttttgaatggccccacactcctgcttctccccttgcctgctgccttcaaccaggcagctggaatgcagtcctagaccacagagggtcgggctggggccctgcgtgttgcagaaaaggagagaagccaaaaaatgggatggaatgtgctcaaggtctcctgaaggtttggggcaagaaggcccatgtcaaaaacccagtctcagcttctcagcttccccttgtcatttctcagagtctgcagaagggttttgtttaggggtccagccccccgggcaggccaccgaccagcccattacaggctctcccaggcactggagttctgttccctaaataatgttatcatttagacggcagcccaaattgcagaggggtgcaaagccactgcacttcctcctaggccatccaaggcaggtgaggagaaacacaatgtgggcaagtagggaggtggaggacagacccacaaaggagccccacaggcgggtggcagcattaacttattatgtaaataccgtattcaattattcctcttcctccaacaggagtcagctaatcactcatgcctggctggttcatgaatattaaacccatctctctcgccagtgcatttcagtggtctccagggaagagaaaggtaaagtgaggccccaaagccctgctttagtgggctctggaacctcaaggggaagtcttgggcacctcatgttcatatgcacagcgtagggatggaacagtcagtccacagagccactgagcacctgctgctgcggagacactgagctagactcgggctggctgggtgacctgaggcaaatgattcaacttctctgggccccagttttctcttctgtaaatgggatagcgatggttacctgatgggtggttgtgatttgtgaaccattatacatataaaatgcacctatgccatgcatacagttaggaactcctgttgaagcctatctgcacggtgcagaacacacacctgcccccagggaactcaatgctttgtttgtagggtcatctataaagggggaaagagcccaaggcccagagggacggcagggcaggtgaggggtggaggctaggctgggaaaggacccatggcctggggtaggtgtagaggacttccagggagaggtgggcttggcatggactgtaaaaattacattttttcattcattcactcagtcaatatatgtttattgagcacctactctgtgctaggtgcttggaaactagcagtgcataaaacactccaaagaccccgccctggtgaagcgtgtgatggtagctttaagatagccacaaatcctttgacattcctcccattgagaggtggggtctactctgttccccttgaatccaggctggtcttcgtgacttttgtgaccaatagaatgaggaagaagtgatgttctgaagctaggtcacttgtagcttctgcctgtacctctgaaaacactggctctaggagccctgggcctccatggaaaaagtctgactccaggtgtgctggagaggccatgtgtaggtgctgtagtccagctgagccccagccttcctgctgtcctcatcaaagcatcagacagaccggtgaggccatcctgaatgtcccagcccagccactggcccaacgccacagagcaacctccactaacagcatgtggaacagaaaagccactagctgggatgtgcctggattcctcactcacagcactgtgagaaacaataaaatgctggctgttttaagctgctaaatttctaggaagtatgttacctggcaagagataaggagaatattg

SEQ ID NO: 1885956 - DNA, 4001 bp, Homo sapiens
tttgtggggataaaatgcatttgtaagcaagagctgtcttcatcaaaattcaaggttttccacatgatttaactatcatagcaagcaatctggatattaccccacaaaacacatttgtgtgtgtgtcgacagtagtctctaatactgtggctagtggaaaggagttatggattattttgtcaagacaaaaggtcttgtaaaaataacttacttctcttaaatagcaagccaatactcaaactattagactagtgggaagaatggtaatgcatttgaccatagagagaatacttaattaaatctgctaagtgattgatgatactaccactgtcctgttatataaactaaaacatcaaatcactgttggatccctctcttcactgaaaacagtagctctgccagatagttaaaaacaatttctggaaatatctgaccagatgatgagttaattttgaaggaaaccaatagcctcatttgagagatttttttttttttttttttttttacttatttattgcttacatctgttaggtttagaaaacactcatatggaacaacaatgaagactgctgtcaaaatctgtccctttggttatattttaagagaatcctcttttaaacaaattttattcattttcttacttttttggacagggttattctttatctctcataataatttaaaatatctgaatcaaaatcctcaaaatgtttacaaaataagtagtagtttttttttttctactttaagaatctaaccaaaggaaaacaaattcagaccaaaagactgagatattttctggtttctaattagactcttctactttataaccttgtaaactaacattcttaacattccataacaaaaagggctgaaaaaaggttggttcacacagatactatcataatgcaggaaaaggatttgtgttagaattcaatgttcacattaaataaaattttcttaattatctggtttttactaatacactgttcttttgtctgatggtgcctttctttctgtgctttcttttctcttgcactgactgtcaaccttgcttagaagagggctgatttgtctctgacttatcagatggttaaagtctgccttatttgagtaagctctttaaaaatgctgttttagaaaggtcaattagttctaaacaaagatattcagttcagtaagcaactcctatagagacacttcctacagagataagccaatatttcctgttgtgctctagtgtacaaaggggcaaaggaagctgtaagtgaatgcacactgtatcagctggagtccccagaatttataatttctcacagcacttacgggagatttccactgagctcctacaccagcattttctagaattttgctgaattatttcatttgtatggagagaggtgtttcaaaatacatccaatctatcatgaaatctggatgattttttttctctgtggtgatttttggttttgcccatctctttccatttccacagctgcacctttcacgtctagtttgttctggtggtctcctatctaatgtctttgcctctaggtcctcccactccatccatatgcaatcacaaatacaatgttcctcaattaatttcatcatgtgacttgcttgttcaaaaattttaagtagctccctatttttcagcatatcaaacccacatttcttagcttaggtttcaaaatcctccacatttcaaatcaatggttattttgcagagaagaaaacggaggcactttgaagtaacttgcccagggttacatagttagaggaattgagatctcagctcaggcaatctcatttcagagtttaggctttcaagtatcacactacattattcctgttaagagtctggtgtgtaactgttatgttgcaattgcattgtatttgtctccagatatttccccaaccacattattctgagacagtacatttcatttgtatgttcacacaaaacctatatatagcagacaatttatttcattaactggtgctatactagaatagtttttcagataaaccataatgccaagcttgcaactgcttggagtcaaagatcgataaagatataggtggttaaaactgtttccatctatttatatcctcatctgctgcagtttctgcttaaaaatagttgtgacatgaaattttcctataaggtgttctggtccagaagtaagcaatggtgaaatctgagcaagactttctacagatgtgtgtgtgtgtgtgtgtgtgtgtgtgtgtataatttatatatatatatatatatatatatatatatgacaattctagaaagaagtagaaagggtacaccaagcatgaagttatgtaatctctaacactcgtaatgtttacatttgaaatagttaatatactctctgtttttcaatatatgacgaaacacacagtcataaagaaatggccccttcactgagaagatattgtgaatgtgtatttcataagagaatgcagctagccatagtcttgttaaatgctaggcaaagttcatgtaaatgaaatgtttatgctgagcattacgctctaagtatttaatcgatccttaaccaagaaaaaaaaatcaatgctttctttttaattctgtcagtcacagcaactgaaaataaagggatatatatatatatatatatatatatatatatatatatatatattacacacacatacacacatatatatgtgtgtaatgtaatacagacaggaaagaccattaccaggaaacagaacaatagttctcttttctcttgtggctttttgcattacattatcagttaaacattctaaagatatttcaagaaaaaaaaaaaaccctgtctttgatatttgatctgagatgtttgaaaagaaaatctgaaacattatcatttacaaatccagacactgacaacataaacatataaagatgaagttgccatgataacgaattaggtattcatatgtttcactgacaaaaatccattgttctatggttttgcaactagtaagtttatgtcccaagttcatgatataccagtatatctgttcttaacataagacaatgaataactttgtaacagggtccagaaataattagccactccagagagtgttgtggaatttgaaaaccgagatgccatgtattttctctgacactattttctgaatagtccaaataaaaacttggaggaaagttcaaagcccaaaataaatctgtctcacgaaaagatagcttgagaagttctgcatactcttctggatgcagaaaagagctactgtgagaaacacctcactcttcataagtcaagatgaaaactgaggataatgtcatgctaccagaataacaatagttaccacttaacatatgccaggcactttttatctactgtttcctttaatccctctacttccttataacgtattaccacccctattttatagacaaggaaactgaagttcagagagatttcgtgatttgctcatagacctaggactggatcatacacttagatcatggtatgtctgaactctggacttagatctatctagctccagagtctacaattctattttactatatggcagttgtcctcaacctttagtgcctgtcacaatcatctgtaatctttattaaaatacagatgcatgagttgcattcccatagatcctaagccagcaggtctgagagggggctcaaacatctgaaacagttcaggtacttctgatgtatatcaaaggaagagaacttgtatttattactagactggaaaaacaaaaatggcaatctagaataagtttatcattttgtaattacttgtttttcagcaaatttaccattcttattacatattttgtaggcatccattaaatcatcccattttctaatacatgatatccctaaacaaataaggggggtggagtagtataagtaacacagaggcacattgactatagtaggaagatcaaacaggggctgatggttttctacccataat

SEQ ID NO: 1885957 - DNA, 4001 bp, Homo sapiens
aaataagaggacacaaatggaaaaactttccatgctcacgaatacgaagaatcaatattgtgaaaatggccatatggcccaaagtaatttacagattcaatgctattcccatcaagctaccagtgactttcgttgcagaattagaaaaaaaactactttaaatttcatatggaaccaaaaaagagcccccatcgccaagacaatcctaagcaaaaagaacaaagctgaaggcatcacgctacctgacttcaaactataccacaaggctacagtaaccaaagcagcatggtactggtaccaaaacagatatgtagaccaatggaacagaacagacacctcaggaataacaccatgtatctacaaccatctgatctttgacaaacctgacaaaaacaagcaatggggaaaggattacctatttaataaatggtgctggggaaactggctagccatacacagaaaacagaaactggaccctttccttacatcttatacaaaaattaattcaagatggattaaagacttaaatataaaacccaaaaccataaaaaccctagaagaaaaagcccttcaagctacccagcattttcaagagctatatgggattgatggatatttactgtctgtattataatcaaatcccagtgcattgccaggaattggtagaactaagaactttcaggatgtagccttaagtaggcgtatgcctgccaaggtgcatacacattgcattaaagtactgtgcaatgtgccagacattgtatatgttatctaatttaatccagaatggtagacatgattctctccatttttatagataaggaaagttgaagaaaataggtgattatattagtcagctagtgctgtcataacaaaataccacaaactggatggggcctaaccaacacaactttatttctcacagttctggaggctggaagttcaaggtcaaggtatcagcaaggctggtttcttcctgaggcttctctccttggcctgcaaatgctaaccttctggctgggtcctcacatggtgcacacatccctggtatctctgtgtgtccaaactgcctcttcgtacaaggacaccagtcagattggattagggtccaccttagcctcattttaacttaatcacctctttaaaggccttattccaaatacaggcatattctaaagtactgaggattggacagcaaaatgtgaatttgggtgaaggtggcataattcagtgcatcaggggccatacactctgttttgcctgggacacttgatctaagctcattgtcccaatgtaatatgactaaatagcatattctttcaaccttaaaattgtcccatttgaaagaccaattctacactcactctactatgacagcagcaggattagcaaaacatctcaagaacaaagagatggagttcaactctgttctacacgccaaatctgcctgccccctcctgccccttaaaaacctcctttgtaaaaatatatgccccttccccctaccccaggggactgcttacctggcgttttacaggacataggtaaagaaagccagaaaggcacagtgacttgggaggcaacaggtggtgtacaggacctgccacagccccgaactgcctcttgccaatttcaaaatgaagagatgctgtttgaatgaacaggagcaaatgggtcttctccttgtcctcactcctcactttcggcttcactgctccaaaattaaaaacaaaagcaaaagcctgtatccaggaggacgccatgagagtgcctgaccgatcttggtggacgttcccgccagagctctgtgccaggctgccggtgctgtttattctcccttggcaggcccgcagcatatggtgcctccctcacctcttcggcgtcttccacgtcacatgcagtgagagactccactctcctggggggtgtgtcgggcccctcactgggcctgttgctgtatcatctgacagattacaggccgcatattgctgggctctgcctctgttgggagccagcttagtcatttaacagttcattcagagagggaaccagggtgccctgtgactgctgacgtgatggattttgtctggggaggaaaggaggcacagccctgcaaaagtctacaaatcccatgggtgggccaaactttgatgacttgacctagtcggccccaatttatcataataaaatgaaaataatataatagcttccacacagtgagtgcttaccatgtgctaggctttgtgctaagatctttaaagccatattttaatcaaaccatgcaaacctgtgaggcttgactcacaggcagcaagcggcaaatttgaacccagttacgcctctccctctgcagcacttgctatcatgctacctcttccagcatgtcttccaaccgttattagggtaagctttctaaaacgtgtattttctaaaatgcaccaaaactaattaatactaatatgacttttgtatttaaaaaaaatcacttattcatatctacagtaaagcattccagagtgctagtggttcccaaagaattcttcttggcggggtgcggtggcttatgcctgtaatccccggactttgagaggccgaggaggatttcttgagtccaggagttcaagaccagcctgggcaatacagcaagatcctgtctctatttttttttaaataaaataattcttctttcacaaaatattaataaatgtcctgccttggcgagtcttccaacaaaagtggctttgtggccatctgtgctgggaatacagggttgtattggaaatgttctttactgcaggacttctctgagcctttaatgtgtttgcattaattgtgaaactccacaagaacacagtatgcagtgtttcccagactgagtcccacacagaatgctttctctttctaagaacctctagaggcctagtcacctggacagcacccgaaacgctggcctctcataacctcgagcttccatcttaatttccaggccctgcctggtcaagtttcccccttgttattcagcaggaacattttctcttgaaacggacggttggaatcctggcctaaactcaggttctccctcctcatcaatgtctctctccacctctcctactagaagccctacctccaagtgaaaggtgacaacgtgctagcagccctggctcgctctcggcggcgcctccccgtcctctgcgtccgctctggccgcgctggaggagcccttcagcccgcggctgcgctgtgggggcctctctccggggctggccgaggccagagccggctccctctgctggaggggaggtgtggagggagaggcgcggccgggagccgcggctgcgcgcggtgttcgggagccggcgcgggttccgggtgggcgcgggctcggggagccccgcactccgcgcggttggccggcatctgctgggcttgatgcggggacgagctccctctgaggtgccggagtgccagggctaggtgccacaaagtccctaagcgagtgccattgagaactgaagccggctgggcttctgggtcgggcggggacttggagaacttttctgtctagctaaaggattgtaaatgcaccaatcagcactctgtgtctagctaaggtttgtaaacgcaccaatcagcactctgtgtccagccaaacgtttgtgaacacaataatcagcgctctgtgtctaactaatgtggtggggccttggagaacttttgggtgtagctaaaggattgtcaatgcaccaatcagccctctgtgtctagctaaaggtttgtaaatgcaccaatcagcgctctgtcaaaacggaccaatcagctctctgtaaaatggaccaatcagtaggatgtgggtggggccagataaggaaataaaagcaggccacccccgagccagctggggcaatctgcttgggtgcccttccgccctgtggaagctttgttcttttgctcttcatagtaagttttggtgctgcttgcaacttgggtccgtgccaccttta

SEQ ID NO: 1885958 - DNA, 4001 bp, Homo sapiens
taaatattttaaaaagtaataagaagattaggaaatatagcttattgttaactggtgtcaagagggtgagttttaatctatttaggcagtggcttgggccgagtttacaatgtcatatgccggcacctttctttgagttttcctctctcagatgcttattgtcccatataactataaaaactgactttacttaaacaaagatttagagaaaaaaatgaaggaagaagaaaaagaaggaaggaaaggaaggatggatggaaggaaggggggagggaaggagggaaggaggaaggaaggaaggaaggaaggaaggaaggaaggaagggggaaaagtgaaaagatagtaatcaaaagaagaaattgagcaaatccttacatggcaataccaaatggaatgaattgaatggcaagcacaggcataggaagaaggatagtccaagattactcattggcctaataggaagaaataagaagtaaaatcaagctgttttctgaaacttgagtgtgtagatataatcaaatgatgatatctttttatatgtagtatctgaacattgatgatccttaaagaaatagttggaattaaaatccttttcaaaaagctattaagaaatacttttattgtctcaattatgaaatgccagttcataaacttatttctgattatttttgaggaattaattgtattgtaagaatagggaaattataacatcttggaaatagtcacttactacagatgcctgagtttgttggccaaatataaattctacatctgggttcaaaacctcagttgcacaaaaatagcatgatttgacttctaagtagtgtatgtgtcagctggataactatataagtaagcaaaagggacttggccaaataaagatgacccagaggaaggaggagtataatcctgcctatctgtgggctcttccagtctcacttgtagaagagggttctattcagaactttgggggtcattgatgagcttgggcacacagaagataaccattgtaaatttttttcttggttagaagacaacttaaataaatataataataatcttcaaaatgttggttgtctgttgtatgccatcctaaaaaggattgttaacaattattttgagaagggcaacttttagctgtctgtttggaagaaggttcaaataactggaactttccaaagataaaatggaccattatagcagacaatgcattccctttaacaggaaatacttatcttaactgtaggtaatcacttagacccacagacaaagagatctgggtatcagctgggaagaaaaaaataacagctggtaattgctgagtacttactaaatgccaggcactgctatctgtaccatctcatctatcccaataatcagtcatcctttgaggttgattatattctttgtatcttatggatataaactataaagccaagaaaatcgctaataaatgacacagacaggattgaactccaaacttttaataaccatcctatactgcttcttaaggaagtaacagtggaagacttccaaggtcagattaaactctaatgatcattgattttggaagtcacacttcaagggtttagagtagtggtctggaattagaccagggttcaaatctggactgagtttacaatgtcatgtgccaacacttttcttttgacttttcctctctcagatgctaactacaaaaactgactttatttaaaccaagatttatagaaaaaaaaatgaaggaggaagaaaggaaggggaaaaagaaacacagtaatcagtagaagaaactgaacaaatccttacatggcaagaacaaatggaatgaactgaatggcaagtacaggcataggaagaaggatagttcaagattattcatgattattcattattcctagttattaatgactaaccttgagtgatatacttgaactctctgaagtttattgtcttcatctgtaaacttgaggtcacaatgtttcattcacaggactgtaagaattaaataagataatgcatacagcttttaagcacaatgcctggcactagttataaccttgacaaatcgtagctatttttaagtgttccaagacataagatattattagaatggtattttgcactacatgttgcaatcctaaattttagcattagaatatttttaaaaattttattgggtttagacgaggtttaaatcctctgtgagaataaccatttgatttcatccttcaactttttcttcagaaaaataccaactaaaaacaagtgacaattttggaaaaaaatgataatatgtataaaaaatatttagtatcaagagtgaatgaagacaactaactaaaataggcaaagaacaggtagttcacagaaaaagagacactaatagtgaatagataggaaatcatgctcaaacacgtttttatttctttcccaacccactggaaaaattattatcattatcatcataattgtaatatctaactccctcttttatttctccttggcctcatatcttcctgcaattaccactgggtttctcttttcccattacagcaaactcctcaaaagatttactcatactctttcacttcttaacctctctcttgcttttgaatcaattcaaatgcagtattctctctgcctttttctcagggtaaaagaaaaagtatgtttcttccagagttgctgactgccattttgaaatcatggatagagctgattctacagaaatctgagcagaaaggtaagaggaaaactaagtgcttaataacatcattggagaattcagtctggctaactttgaagcctacccacttctagacatttctgtgatcatttaaccagtttgaattgggctttgtgtttccgagaacacacatggatgactaagttaccccctctgacagggtctatggatgaaaataaattcctgtagaggaagaaaacatctggcagcccctaaggagaaaatttctagagacaaatgtattttggcatcccagaataccagttagtattcagtccacataattcctgcagatttgtatttaaagagcacaggataattcccatatgagccaagacaactcactgagagattcaaccaagatcggaaaaggtttgtgaaaagttgagtgataggcttccaaaaccatcaggaaatgttttgaattaaaatacatgatttatttgctctagaattcagactaaagcaattttaagtccaagttgttaatttataattgatttatcaaaaagttcttgccttctcctttttctcctggttaatttagccagtatttagccatgacttgtgtgaggtgctggagacacaattatgaataattgtccttatgcattattgcacaatataatcggaagacaaacacaacaaatatgacttttatttattttaagtgaggtgaattaattttgggagattgatttgcaaaaccctaattaaagttctttaaccttcttcagaagaagacactgtaagccaaattaattaagacagttggcttctttaagttacttatgaattatttttctcttggctcttgttgacctggagatccaaagggagagagatagaggtgagggaatggtgacataaggcagcctctatggggaccaaacagagctggggaaacgggactacaggaggggatgagcagaaacagagtctggtgaatctgcagggtcagagccgagatctgagaccactccaccttaaggtggtttaaaaagacttgtattcaggacatgaaaagtaatcagcagaagcctggataataaattctgtcagaaaccttgccacagtgcccatcctaggccgtaacctcgcctgtgggttgactgaagccattttctctgcatgctgccccctgtgttgtgataaataatttttactcagcatttctatataatttttctttaggtactctttctacacaaatgatgctttacatttctcaaataatgcttatataattgtaca

SEQ ID NO: 1885959 - DNA, 4001 bp, Homo sapiens
tcctgtgtatgtgcagagagacaggttgggaacgcaggccttggggcagatagccccgagtccacaaccggctctgccacatcctagctacggcaaaagccacaaatagtgaatcatcaccctacctgtcaaggtgaggctgaattctcctgaagctgttagcactagccctggcaaaaagtgggactccaaagacacaaactagtattactgaagtttcttggtcactctgcatataaatgcacacgcctgggacctgcttcgaggtcgcggtgggtcaatgcggacagctagaaaaacagtgattgtgcttaaattattcacgagggtaggataggagcaaagaaggcagaagagcagaagctctggcccttaggcctggagagggcaagctcaaacatgcagctccactgcccggcccgcttcatccgcatctgacccccagcctgccctgcgatggtgtgaatggagcctccaggccggtcctcagtcccaaccacagggacgatggaggcccacggctccctggccactctcagcgctccggaccacactcagccccaggagggcggccacggcccgctcgccattttgggcttcgtggttccaagaaaacgcgggagttagccacgcacctaacactcctcgaaaataatcaaagagcttgaagcgctcgcggttgcagactccaaaataacgccattgttccccacgcggggaaggccgtttccgcccctgcccggggtgggcagcccagtcaggggggctcttaccggaagcctctttctccccagcagccacgacacgcacagccgggctcggcggctgcggctccggggaccgggcagccgcgacggagggtccggcgggctgtgggcaggaagacggcagccactctttcctctaggcctcgcggtaatgaataaccgggcatctgtctggggcgagcggacagggcgctctcgacgcgcgttccgcttctgtgggccgcgcggctggacgaatgggaggaggggctcagcgggcccttggcgcggcgaccttccgggtgcccacgcagccatcttgccgcccctcttcgcgctctcaaaatggcctcccgggcccgctgtgcggaccgaggggaaacagccgcgggcctgctggcgcccttctctcctgcctacccaaccccgggcgtcctgtgggcgcgcgccccccgcgcccgcactctggggcctgcgacgaccttcccggcctgatggcctgatgccagctctgggctgcgggcgcttcgggttcggaaggccgtaggcccaggcggtgccctggtgtagacgaggtgtgaatcttggaaaggattctttgcttaggctcttgccgtaccgcggcttccgagtttgtgcctgtttttccagtttccctagctctggatccagctccaggcccgcgggggccggcctgatcctgcgcgggcgggaagcagccgcgccactcccagctaaggctctagcaaccgagcgcctcaggctcccgcgaacgccgggtgtccaagaagccgcctccggtgctagaaccgccagagccgccatttactttgcgcccactgtgtgctacacgccgtgttctgccaaattatgtcacagagcacaacaagccagcaggtgtatggttaaagccatttcacaggttgagggtgagggatgacattggatccgggcctagggaggaggggagtcgtcttgctggtgacccaggtaaaaacacaggcgcactaccaacctgatcctggaatttcccaacctcccaacccgcagtccactctctgagacatctggagcggagtgcgggtgcgggcagccagctcctccacccactccctggctctggtcgctcacctctcctccggcgggccctcctactagtcagtgctgctagctgctggcgagttcgtgactgcgaagagggcgccgatcgcaggtgggaagcgcgccaaggagggaggcaccagcaggggagtaactgtaaaatagagcggagatatcaggcaccccccacgcccgcccagaaacgtgcccggccttcttgaaggtgcactcagggtcgcgtagcggtggcctgagggcggggacacacgcgtcctcaggtcacaaccacagcctggggaggttgctgggcaccggtggcgcctcaaccatgccctcccaggacgcaggagagaaatcgggtggggcaccggctaagggggttgggggtcgtgttccgtctcacctggagctccttacctgccagctagccacgcttccagccacccgcttggctaccgcaggggcaggcgacgggagcgaccctctgcctgctcagagctggatctccggaaatggagaaccgtgaggttctcacctgcgacccagcaagcgcatcgcggagaacctgcccgagaccaccaagggacaaccctggctgctccggacagcgccgctcgtgaatactgagattcggaaccttccagagctggaaccccaggccattttccgcaggcgccaactgttagaaatgccataccccaagctaacctgggcctcccggcagcacccccttggctcccagccccagccccctgggcaacgcaaatcagtccagatcctggtcccttcaaatctctaaagacatttacatgctccccctccccaggcagccaagctgggaactttacacccatgtgcaaccccgctccacaagccgtttttttggggtcccgattctcccacttcaggcccagtgtgtatggcatgccctgggggaagaaggcagctggtcatccgtccttctgtgtgatttggggtatctactggggtgttcactgtctccagcaggtggaatttcaaacttcagatccagacatttatatgcatcccttgccccagcctggaaaaaagagctaccgtttgctcagtgcctactgtatgccaggcactttatttgcatattttacttaattctcacataacccttggaggtatgggtactattgtccccatttcacccagagatgcctgtgacttgtcaaggatacagagtcgtaaaggccaaagcatgcaaaagaactctgtcccacaggcatgggcatgtccccagcccccagctgctgcccttctgcaatctggactgccggtttattaacctggtcctggatagtcctgagtcttccaccctagtgcctcaaatcaggaattgtcacctccagaggcagaagaggccacagaggcaagccagtcctgctctccccatgaccagtgacgaggaatttctgcagcccttctggacaccccagaagcatttccacccctctttagcatagatccagaaccttgagggaagctggtgaagtgccacactgtccaataattcactcccaatttttaaaatcctagtctacactgtcaaagaagtgggtgatctctcattatcaggataattcaagcagaagagaatgagatgcattgtcagggagggcttggtatttttacacacaaccccagtggagacctaaggagactcaggagctaaagaaagcattctgaggaaacgctcctctcttgagttccttacaagggatttcatcccaactgatattcaggcaagaaaccctagctttcccaacctccattctgagaggtgctttttctttaaatgacgttaatgggacattgtttcttctttttcaatgaaacctctgtaagagacaacctccattaaaatatatatatatatatatatatatatatgtatatatgtatatatatatatgtatatatatatatatatatatatatatccattgggcctgaggtgaaagaaataaaaagcaaaagtgaaggaaaaaaataggtttttctttttcagaagagggtcaaggacacagcccccacctgtaggctgcctgagatggcaaagatggcagctgtagttgacatgggtgggtaccatcagacttgggagacatcaggactggggtaatg

SEQ ID NO: 1885960 - DNA, 4001 bp, Homo sapiens
cagtgtctgggatcaatctgccatgaatagcaagggacagctgtactccgtgtgtgcttggctggctaacacaggaatataatttagcaaagaactctcttctccaccagagaagactcacacccatgaagaatgaagattgaagatttgaagatttttcttgtagtatagtaactttgtgttaacctatttcccatctcccattacactgtgatttccttggggtagcctgttatcagccaatgccatgtggggcagaagaactgcccatctgagccctgcctgaattcctgaaccataaaatcatattaaaaatgatttgtaattgaataattgattgaatgagggaatggacattaaactgaggattacctggaaaatctgatttattatctgatttctaccaatgggacccagggtcaatggctggaggaagcttttaacatcctaccaattcaaagggactcctgtcttggtgagagcctccaaatgggttgattgagaattcagtgcaacttagcaagtataagaatccacgtacagtggaggggtccctgctctaaaactcccaccacattgggcccgcagtcccccagaccaatatttgtgattgcaaaaccactgctcctattattagcatgactggctctgtcaccacagtcaggtcctccctgacttgggccctctctgggttaacttctccctccttaggtcccagcatcctgtgtcctcaccctggagagcatatgctacaataccttaaaatttctcaccaccttcttggcctctactgctggtctgagtggtggccatcttcagatctcctttggcacccagtaccccacatgttttagggatgagggagaagaagcagggggtgccagagctcagcttcagctcttcctggcagggaactggagctcgagactgaaatgtattttgttactttatttattcagagatggagtctcgctctctcacccaggctggagtgcaatggcgcaatcttggctcactgcaacctctgcctctgaggctcaagcgattctcctccctcaccctcctgagtaggtgggattacaggggcctgccaccatgcccagctacaatttttttttttgttttattttctaggggagatggggtttcaccacgttggccaggctggtttcaaactcgtgacctcaagtaatccgcctgccttagccgcccaaagtgctgggattgcaggcatgagcagccgagtctggcctattttgttactttaacttattatgaaagtttcctaatgcacatgaaagtaggtgagaatcaaaattaaactttcatgtatcttcgtctagtttcactaattatcaacattctgacattctcactttgtctaccatgtacttttggctagaatatttaaaaaataaatgaccagtatcatatgacttacccgtaaacacttcaaaatatgagcttgagatgtagaatcactgattttggggttaaatgaacctcaaaagtcctcctgtgttcaaatgggcctgggcttggaagctctgcagtgggtgcccggctcttggagaccccggccacagcgggagggggatacaacgtggatgctggaatcagctctctgcctggatcctgggaaaacgccccctggagtgattggcttagttcttcttgggcccatcacagttcatccaagtaatccacttgcttcctgttctccaactcctctgtcacgtgcagccatttcatcttcacaccacacccttgtgatttagggagtatcatctccatcacgcctgtaatcccagcactttggaaggccaaggagggcagatcacgaggtcaggagtttgagaccagcctgaccaacatggtgaaacctcgtccctactaaaaatacaaaaattagctgggagtggtggcgggcgcctgtaatcccagctactcaggaggctgaggcaggagaattgcttgaacccaggaggcggaggttgcaatgagccgagatcacgccactgcactccagcctgggtgacagagcgagactctgtctcaaaaaaaaaaaaaaaaatttcccccaccccttattatttgcatattacaagcaaaccagtttatgctcggagaggctaagtgacttgcccagggttacccaggtagtggagggagaagcagaattcccacccagctctgctgaactccgatgccctagcttgcctggtggcacccacaaccggccctcagtgtccacttctgagtttagcctgggcaagagactggtccataaacgacttcctgcccagtggtaaacagtggaaggcaggctcctgtgtttctcgtggttggtggtaatcgctgcttttgcaaagtggcttttggggaggagaggttttaggaagtgtgttaaatgaggggggaagtgttacttgggggtttcccagcactcaacacgcacactgcaggggctgccctcccccgcagcacactgggagagcctgtcctccagcgctgcccacgcccggccgtgggtctcattccccactggatctcctgtctttgatgtcaaatatacccaattcatctctttcatatcactacaaaggagcctcctaattactctgtttagacagcctcttctccaaatattaaacatttggtcttcccaggccccccaagcatttaatatcatcaaggttgttgcgaaatccacttttcccccaactggtgggcagattcctttctctctccattcccagcctccctgggcagatctggacaagtcaccccacatattcttttcccaagcaggctgcccttgggacacagcccttttcttctggtgagagggtcggagcagtggggtggaccttgagcgttttcttgaatctcagccctgttgggaagccctggagaagccttggggagacccaaggactcaggggtgacctgtcatgcctgacgcaggtatgtggggcatctccacctttggtggtggcaggcccagcaccaagtccagaacgtttgctggctggtggggaaacagagacttcctggttccagatcagaaactgccttgagtagctgcatctctccagacaccagatgctcggtacctgaggctcccatagcctctcctccttcaaaagaaagaaagaaaaaaaaaagcactctaatcctggaacccgtccccatcccgaacctccacggccttgccaccgcttccttaggtagagaagtcggctcacatttcttcctactcaacagctgctagtgttcgcccttctaatgcctccctcctggtcccatgggcctttgccagctgatgtcatggcacagtgctatgtcataggtctgtgctatgctccctgttctgctctctcttcatggtgtggctggtccccagaaggactctgtggcttgggactgctccccagacatccctcctgtctcctcatgggccttgttgctctggctgagcagaaaacagcctccccattcccccggccccacaccaacgcgggggtcaaggaaggtttccaaagggacatttgagcagaatcttttccttctctccttccctttctcctttccctgccttcccatctcccttccttctttctttcaactttttattacgaaaaacttcattttcaaaagtaaagtgtataatgaacccccatttacctatctcacccagcatcaatgctgatagaccgggccaatcttgtttcctcaaaaccccctaaccccactacccaccctccaacaatggatggtattgaagcggattccagacagcgattgtatcattctctctgtaaacacttcagtgtgtatctctaacagacaaggacttttagagaaacataaccacagtatcacatctaaaaatataaacagtagtccagtcagtgttcgaattgtttcataactgcactttttaaagtggcttgtttggatcaggatgctgagcagacagacttgaagggattgaaggg

SEQ ID NO: 1885961 - DNA, 4001 bp, Homo sapiens
gaggcctctgagaatggaggtagtgcacatgaactcgctggccctgcgtccttgtctgtgagcccagggatccctatctggtctcagggatcctggggacttctccatccctattgttctccctcttgttttgaaatcccatgacatctttcatctttccagatgtctatcattggcctgcaaacatttgggggaaccactatgggagacagagttcctgcacacagtggtacaagtggtagcagtgccttataacgagctacactgaaaacattatcatacatactgggacttttctggtttgtaatggaggatcttaaagataatttctttcctgtattgcaacatttgtttaatgccaaattaatttgcttctctgggacttggaaacaatctaatttctccttaacatacataatatgtagttctctgagatgtgtctatgaaagtgattttcttagcacatttagtgttagcattcaaacaggagaattgctcaccttgcttcaacctctttatagagaaggcattcataggaagaattatgcttacagaatacttctttgactttaagactctgccatgtgtccatctttcttgtgctttttctaagtaacagttaaaagttaaaatggccttgctctgaacagaaactccctcacatgttcttgttagatggaccccatcagggaaaaggcagaaaacagacatccgtatctgagagccttttgatgccgcaagcgccaatggcccaggtataaaaacctccaccgagtggacctgggggctggatatgtcagcctaagggtctgtgctagtttctggatatgagagtagattggaggttcaggatcaaaacagatgagagcagtttgtggatgggactgggtaaatcttgcaagcagagacacagttgaagaggaactcttgggaggggtgagaggaccaaataaacaacaagacacagggtggtgccaggggagggcagcccaggtgctggccagagaaggtgtagggtgcagacactgggcggggaaagggtgcaaaactatgataatagcagaagctccgttaattagagcaggaatttaaaatccgattctgaagtgagacttggctgtgaggggttgtgaagccccaggaagaggtgggcaggaaacagaggaggagaagggaagattctgcagcatgggggactggggtctgcccagccctcctccccatccaggctgggggcagctgcagaactcactctgtcagtgtcgggggcccggggtcagtgtgagctccctccagctcccacttccatacctactgctgttatttccttaattcctcaagtgatatgtgaattctttctcataagtaatgaggaactgaaggacaggtctccctacccacccgttctggctatgctctctgtcccacttgcccacttcgtcctttccatggacataaggacccaggcttaaacacctgagacagtcatctgcccctattcagaaaagcccttcagactcacaggagaattttttggttctcccattcatttattccttcagttattccttcccattacaaacttttgttaattgtccactagacaacagtgagaacttcctcagggaaacctcagccagcctcatcctgcactccaaatcctacatgttccttttctgacgaggtgtccaggggacatcagagccctgcggcccagctctgatccctgagaggcagcttcatcccctacctttcggaggaaggcctcttccttctgtgttgctggctcatcctgtccaggtggaggagaaccgatagggtggtctctgaaggatttctaagcctcctttcagttgtaggtgtgccccagcctctctgggattgggactttgcttcggccctgggtttctgtgactcagtagctagggcctgtcctgcaggagatgtgggaccctcaccctctgagaacttctgggagctgagtgagcgccaagcttccagagccctgtgtgacatcattgctgacctagtccagtggggtgggccacgacgacaggcacacctggcaactggtgataggtgcttggggcaaggggaaaacgtgggtgggaaattatataattctttaccaaaatggacttgaacctttccttgctcccatggagtttccatttctcaaggagagatgctgcagggaatggggacagactgtggtggggtgtggcttcccccaaacctccccctgcctctgtttgaaactcttccccctagtcttagtcacacaaggtccccctgaatcccttcaggtctccacacctgagtctcctcacagctggtccctggactggaaaattgtcctcgccctccctcagagaacctggggtggagcagagctgcctgcaccagctgctgcctgtgtcccaaccccaccccaggcctgggggtctgggacccctaagtgtcctctccctgctccctccccacatcttaagatggagagcactccgcccacctcgcagggttgtaagaggcttcactggtggacccgtggaaagcatctaggacagtggctgctataggacatggtcatgcaaacactcactgttgttaactctgcaggtcacagcttgctgagggtgcccagatgtggtgatgtccctgccctatggattcagagcctgataagccctcatcatgtcactcaaggaccacaggggaggctcctttacaaacctgttccttcctcttaaatgactggaatgaactttggggcagagaccaggtctgcctcatgccttagtcccacagagtagggcagtgcctgacacagagcaggtatccatgtgcatttattgaataagtgaatgaataacaatcacacataagacctgcccttatgggcattggtgcaaaacaggactgtttgattagatgcctgagttgccatccctcaagtgtggacccagcgccactgccctccatacttccccagccccatccctgaacccttaggaaggatcaatgtgaagctccagcgagcactcccatgcttttccttggggctgctgagacagtgacggcatcatggcctcacaaccaagtactggggctcagcacccttgttctcaacctgtcttaggggttaggaagacacttggggaaagcccactgagctctgcttgagtcagactctgtttctgttttggaggccatttagaacaggaagcagcaaagtgtgggaacattttgagaaaaggtttatgatgttgaggtggtgggtgggagaagctgaatatatagaggaaaatacatgctctctccagggaagagaggggtgtgattcgtgtgactccagagggcaggacagggacaagtggttggaatcacaatagaacagggaagatctgggcttagttagaaatgtagagaaatgccccagtggcccctccttctcctcgggctcttccctcccaaggcacccctcaccttgcactgtgccctctggagaactcttctggtttcctggatatatcagatcatttcttccttccacaattttgtatttccaaatctggctcaagtatcattttcaggctaaaactgtctctgacccatccctgatggagcttcccaccctgtgacgtgcactcttttgtacctactacaaccctttgccatagctttgaacacactgggttgcatttactaattgtggtggatgcaacaatggccacacgttcttcctctttctgtatccacacccttgtaatgtgactctgctgttccttgaagagtaggagtctttctccctccttgggttgaggctgaccttatgattgccttcatcgctgggacagtagcaagcctgacgcaagcagagacttgaaaggagtttatgcatggggttgcaatgatgctcttcataccctgagaatccatgggaacaagcccagggcagccctctggttgataagagaccatgtagagacagcatccagctg

SEQ ID NO: 1885962 - DNA, 4001 bp, Homo sapiens
ggcatgaggatagcttgagcctaggagttggaggctgcagtaagatgtgatcacaccactgcactctgccctgggtgacagagaaagagcctgtctctaaataaatgaacaagtaaataattttttttaaaaaaggaaatgttcagagcgttgcagagtgttacagagaggaaacttctagagtcttcacacttgcaaatcacttcctttagctctcaactcattgaagacttgagctgagccctccaggtggtcaatttgaagacatatgaggcatagaagtgccttggtgagtccctattatgggccggacgctgtgtgcactatccatgatcctgcaagaatgacattgctatctcccatggcagatggagaaacagtcacaggtgattaagttatttgtcccaaatgtcacacaactaggaagtacaggctaaagaagggtcccagtgcagcagagtatgggtgagtaggcaggcagacaggcagtgtggccccactggcacagagccccgaggcagagcctcagagacaccagttcagggttcctgcaagctgcggaccaggagaggaactagcagaatgtggggtccccagaggacatagaatcaaagatactagagagagaacaatgtcctcatcaacatggagctgatggagcagaacccctaaggatactgtttcacattcatttactccccagctagcagggattgtctgatccaacccctcgattctgacatataaggcaactgaagccagaaggaaaaagggacatgcctgaggtcccccagcttgccagaagcagggcaagacaagagttcctattcctgattcagggtccagtgctctttcagaggcaccttcctgaattctgagattaaactcaggctttaagtagggtgaccctttcaatttatgatccaaaccagaataagggcattattaataattacaacaggatggcaggtgtcaacaggactgccctgtgcaaatgggacacacagtcattctagcatggcattctagaatgccacccacttgcccaccaggaaagcctcttcacagccttatggttgtggacctgacaactcactgtcatcctccatgccaggtgaggggctgatggaccaagcagccctgagggtctggctttcctaggggtctttagggagctcagaactggctgctccaacactggcctctgtccccacctggcactgtgtatgcataaacagaggccccatttgttcccacgtatcaggggcaagctccctgccaagcccagtggaactccagttttaggtgcttgcctctgggtgatacccactgaaccaaagctgtcctcactgtgagactgtgaatgtggggctctcctatggagccccaggacagtggaagaaggcccctgctggcttggtagccaggtcacggcagaaactataaggatgtgagaagcacaccaagtggcataaactagctgtgctgtttcttccccctccttcactcctctgtccccaatagtcaccagcttctgaaacgttaccttacacacacatctgctggggatcttgttaaactgtagattctgatttaggagacctgcagtggagcctgagatgctggatttctcacaagtcccaggtgatgccaatgctgctggcccaggtgccacttggaatagtaaccctctctcacagcatcctgctcactccctccagagcagtaatcataacttgtcattgctttcttatgtggttgttactgattgcagcagatgttgcagtatttcaagcctgataatcacaggcttgaaaagcacatgtgtgttgggcttgtcctcttggggaaccctgctgctgagtgaagagcccatgctagcctgctggcggcccctggctcagccaacagccaacatcaacagccagacctaggagtgagaccatttagatcatccagctccaattgcagccacatgaattagtccaaaagaatcacccacctgagcccagcccaaactgctgacctgcacaacggtgagcacataaaatggtcattgtttaggtcactaagttttggagtggtttgttacatggcaatagataactgatacactggtttaatatctatgttaggggtgggactagatatgttttatttggtatgttacacccagtgttttgaattgatgaataaatgaactaacctggatctgtctgattctaaaacccaagagtttctgctccactgtttctgctccctgttcccagacaagttgctcatcctgggtctagtgaggtcaaagttagggtatgtaatccagcctaggttaattagtgctttccagtctacagtgatcagttaagggatgagtgtgtgacctaatctaatccaatcagattgaaactcgggactttcactgagaatggtggggaaaacaccttctcttctccagtcaatataaagaagaaatataggaatagtttccaaaatctgactaatcagacctaatctgacaagtcactataggaaggaaggacttacacaggcccactgctatgctgggctttaacattttagttgcattttggggaggtccaggatactcccatacttggagggtgagagcatttaagctctgagtaaagtcttgtctgatgctaaaactaccactgagcttccaaatcacacgagtccagaaatatatttgtttcagccaatagggctggacttcctgttgcttgcaattatcaagcaacagaatgcttcctaactggccgaccttctttcttctgggaatctaactctcctttaaggtcaaccagatgatccagacactctaaaattaacccaggtttaagccagaacaagagaagaatgaatccctgggtggacgcacaacattccctacagaatcagctttactctcctgtgttttgccagaagaaacatttcataaaactcgtctttgaatctattggaaagatgttcttgagggtgtggcttcccactttccacagggtctttctggtctttcagctgcatattcctaagcagtagattaattttctaccacatggacagttatgaactatgtaactaactagttttcccttttggtcttggctgccaggaaactttacaccaaatatgtacccacttgcagcaaaagtgcacaactccatggtctgtctttttacagtagcttcattactggttcaattttatgtcgttagccttgttgtaccgtattcatttttacttcctttgacttatataatcttgcttcgttttgtgtatccttataagaaaataggagttataattttttaaaaaaacactttgatttaggcttggttaaaatgaaaagaagctacagggagtactgttatatcaatcactttgaatttcagtgaaggaaacagaagggaggtatggaagaacatatacattccaaggatctcaagagcataaagaatcgacaccaaggccaggtgcagtggctcaggcctgtaatcctagcactttgggaggccaaggtgggcagatcacttgaggtcaggagttcgagaccagcctggtcaatatggcgaaaccccatctctactaaaaacacaaaaattagctaaggcgtggtggcaggcacctgtggccccagctattcgggaggctgaggcacgggaattgcttgaacctgggaggcagaggttatagtgagctgagattgcaccactacactccagcctaggtgacagagtaagactctgtctcaaaaaaaaaaaaaaaagaatcaagacaccaaagtgggaaaaagcttttaagtgcaggtggcctctagaagagggggcaagcaaggaaacagattctccctgagcctctagaaggaacacagccaacaccttgatggtagcccagtgagactcatttttaatttcatacctccagaattgtaagagaatagatttctgttggttaagccaccgagtttgtggtgatttgtt

SEQ ID NO: 1885963 - DNA, 4001 bp, Homo sapiens
gactaacaggcttaacactcctgcaaaccccactcacttctgccaatgacactaagacaagggctatttcaaatcttctgcctcttcccatgtctcccacctgaaggaaataatgtatacagtggtccatttccaagacaaagtgccttgaatgggcttaggtcagcaaactacagaagaaagaggatatactaggccgctgcttggatagcagatgcctgcttgtcagccttccccttcttccccttctcctgcaccttagttgccctcatccaaaccaaagaggtttagtctaagataaaactttactaatctgcaagatagctcattttgtctgttcttaccagcctgcccagctacttaggtcataagtcaaatacttgaagagcccctgagctaactaagattgcaatgcattgtgggttgcaacaaaatgcagtaagacaaccctaaagaaacacctaaagcctctacccaacaatcaatagatgacatccaggaagattgtgacctcatagtagtcagcctatgagaaacctggggagggacctgcgtgctagggcataaattgctcgttgaaactatgctgggtatgcctccccaccagacacctggttttacaagtctgtcattaaaagtctcagtttcgctaatgttttggaagacttaaatgatgactagatccattaccttatttaataagaagatgagcatatcttttatttatttatttattttgagatggagttttgctctttcgcccagactggagtgcagtggcgtgatctcagctcactgcagcatccatcttccagtttcaagtgattctcctgcctcagcctcccaagtggctgggattacaggtgtccaccatcatgtctggctaaattttgtatttttagtagagacagggttttaccatgtaggccaggctggtcttgaactcctgaccttgtgatccacctgcctcggcctcctaaagtgctgggattacaggcgtgagccaccacgcctgaccaaagatggccatatcttaatcatatcatttcttcagcaattattacttagatttattccacacaaagaacctttcataatcaaatatttacctaccctaaggcatggttctgaacaagaaaggtagagtaaatattttatttttttcaagtctgtttccagaagaatgaattttctgcattgtaaaccaacttttaaagttttgttataatcccatctttgatgtagtttggtccattgccttttgctcttaactgcctcctccggccatcagccttggatgtggatatcaacaagcacagttcgttccctagctcaccctctgacagccaagctctttcctaggtcttgggagactagcccagtcagtgatcttcccttccaatgaaagagattttcatttttatacaagggttcatgctaagttccctctccccgatgggtcaacccaaagctggagtctgcagaagtatgtgaggagtccatattcaaacacctgggcgggcctttacctggactaaaaccagggttgtgcaggagctggcttgcataggctcacaggaggtgactctgagtacctctcccaaattctgtctgcagggacagcactgcggtagctggaaaacaaccaagatggaagtaattataccgtggaaattggcaaacactacaaatcagagctgttcctccctggagatctgctattaaacatttactgcacactcctgcaaaacctccgcaggccaccccacagcagcgtgggtttctacctacctctgatttttctttctgtttttggttcctgggaatttccatttgcttgtttcaaattggctgtatttttacatttaatgacatatcaaattcagaatgcatttgtattggtagcaggaaagaaggccttcccagtgtgccacgttgtcagagacacctctaagccacggcgagagggtctggaggttgatggcgtgtgggttggggagggagtggctgaagagggccgagagtgttccgggactggggaatcatctgtctgctgctccctgcacacaagggtttccatgacgccctgacctagtggcctacattccgataggttttgaagtttcaaaagacaatagtaaccacacagcatggagaaaagtgctgggaaaggcaccagagagtgcagagtccagctcaggatacaccggaatctaccatatggtaaagggagctttgcaatcagtgaggaaaagataggttaggcctcaaatcattattttattaaaacaatttttaaaacaaaatatttaactcattccttgcaacagataagctccagataaaatacattttaattttaaaaaaattataaaagtaaaataatacaagctaatttaggtgaatattttaatattattttcacaagcagccaaagtttaaacactgacacatcatcaaagccagaagctataaagaagaatatccatggggtttatctataactttttaaatatcaatttttttttctcatggataagattaagacaaatagccaactgagtttaaaatatctataataggccaggcgcggtggctcatgcctgtaatcctagcactttgggaggtcaagacaggcggatcatttgaggccaagagttggagaccagcctggccaacatggggaaaccccgtctctactaaaaacataaaaattagcgaggtatggtagtgtgcacctgtaatcccagctacatgggagggtgaggaccgagaatcacgtgaacctgggaaggcagaggttgtattgagccgagatggcaccactgtactccagcctgggtgatagagcgagactccatctaaacaaacaagcaaacaaaaaaacccctaaaaaactacagtattatatggattgttttcaactttcatttcaaaattattctaaagtttatgagacaatagaaaataaaactttgaaagagaaaaatgatacagaacttgcatcagtgcacataaagtttatcacgaaggtacaattacaaaagtattattccagcacagaaatagattggcacccggtaaaactgcataaaaggacagatactgaccccactgtatccagggagttataagtaataatttttgctggtggggaaaggaagagtcatgcaataaatgatgctcagccaattggttaattccaaggagaaacgttaagctagatttctctgtcacaagaaacactaaagttggctgggcatggtggctcatgccaccatagagcaggcggttgggggttggggaggcagtctgaggtgaagccagctggatttttagttcgggtggggacttggagaacttttctgtcttacaagaggattgtaaaatgcaccaatcagcactctgtagctaggattataaaacgcaccagtcagcactctgtggctagccagaggtttgtaaaatgcaccaatcagcactctgtagctagctagagtttgtaaaatggatcaatcagtgcgctgtaaaatgggccaatcagcactctgtaaaatggaccaatcagcaggacatgggtggggacaaataagggaataaaagctggccacccgcagacagcagcggcaacccggtggagtcccctttgacactgtggcgttgttgttcttttgctcttcacagtaaattttgctgctgctgtctctttggatttgggccatttttaagaggtgtaacactcactgtgaagttctgtagctccattcttcaagttagcgagaccacgaacctgccggaaggaaccaactccggacatagcagatcaagaaggcagtcagaagtgggtaaggacgtggccatcaaagagtactgagtgttaacaataagaccaaaagtaaaggaacagtgtagttctacggtttttgcctaaaaatctgtatatgcagcggggatttttacaaagcgtaggagataaagtatctatgtgatacgagggattc

SEQ ID NO: 1885964 - DNA, 4001 bp, Homo sapiens
cgtcaggagcctcaagagaagaagaaagagccatggtgagtcgttttacattttccaaatgaacaatgaattcctaaaagaaaacctcaacttgcagccttcctgcccccaggaactcctagcagaagagcccaggtcccaacaaaatgcatggcagctgctgcccagcctctgagagaattaagaggcattagagccccacgtggccgcagaacaacatcttatccagccattcaacagccagcaggctccccttttcatgatgccctttccgctgtgccctagggggctcacctcttgcagccttgacagtgcagttcttgccaggtcccagcaggaacgaactggaaacctcctgggtttccagcagctgctgtgcttctgaactgactcttccttgggggtggcaggcgcactgcctccttgtctaccgctgtgggtttagacaaagtgcattaggcttctcttctcccccgggccagcagggttttagccctacccacttaggggtcatttccacaaaataaatatccccccggctgataaatccccccattcttccttgatacggggtctctccggaaacacaacagcctaggtttcttcctctttcccacccaacctgctcactcacttccatctcacactgccacccccacccccagcacagccaccagaaccaccagtcctcagcttcaactgagcccctgggctacttcagcatgttctcctcacatctgtactcacatatatcttcctacaagttccctcgccctttcacgggctgaagctctgactctctcagagaacattagctattggtcaggaatattgtgcaaaagacttcacttaattggaaaagtattcattcttggtggtccccaatgcccccaggccctcagccataggatgtggctctcacctggacagtagacaccttgcttcaattttcactcttcgcccctggaaaccgtcggctgttgggggtgaaaggaaactccatagtactatactgaggtgacgtttccaccaccaaccatctgcttgggcccctcttaattctccaccggagactggggctgccttcctcagggatcccagctatctctcaacacctcgtcttcctccaagactggagtcttcgtggagttctgaggaattcactttccaagcaagaaggttttgggtcctcatgtcatcttcctccaagactggagtctttgtggagttttgaggaattcactttccaagcaagaaggttttgggtcctcatgtcatctttctccaagactggcatcatctcggaattctcaggaattcactttccaagcaagaaggttttgggtcctcatgtcatcttcctccaagactggcatcatctcggaattctgaggaattcactttccaagcaagaaggtcttgggtccttgtgtctgggggactcaatgcccccaggaatcctccctcctcatcatgggttgctcgttgcaagtgaaagtctcgtgcagtaggttccctgtgccttcttctctggccctgactttgacaggagacctcttctggtgccttctggaccacctgctgccttacatctgggctccataccagaatcaccagcatccactcagaggacactgggcagctataacacttgttttttgccggggccagtcctagtccaatagggtttccaggcacccacaacagctgcccaggcagcaaatgtcagtcagttgtaaaccagccgggtaagactcacactttggcttccctacatggacttcgttttgggagaaattccaggatttcagactctcagggcccatggtcactgagctcaatgtccccaataggtcacaccctgcagctgcacctctaagagcttgtgcttctgccaaaacaataagcttctactagatgggtcagatccgttctctgacttgatgcaatggccactgtcccttcagtctggcccctcagcatctgagtcagtgggaatgtgatgggccccatatgtagaaggaagaactgaaaggaagcacaggaagaacaggaaggaagcaaaagaaggaaggaaaggaagccaccagcttcctgctgagtcttgattagggctcctggacagatattctcctcctcctgttgcaaaaactgttggaattaacataaagcctctgagcccaagcttcctcaagtgtacaatgaggatactggagtccggaatctctgagtgcttctctgtgatggacagaacaatgccccgacaaagatgctcatgccctcctccccagaacctgtgaatatgtcacggtgcatggcaaggggggaattaaagttgccggtggaatttaggttgctaataggctaaccctaagatggggagattagcctcgattatcagggtgagcttactgtcatcacagggacccctataagtgagagagggaggcaagagaagtagtgtcagaattagagacgaatttgcagaagctggcttttaagatggaggaagaggccatgagccgaaggatgccggtggcccctagaaacaggaaaaggcaagaaaaaggttctcctctagagcctcctgaggagcacagccttgccaacactttgaactttgccagtagtttgaacttctgtcttccagaactgtgagataataaatctgtactgttttaactcatttatcttgtggtaaacttgtaacagccgccgtaggaagctaattcaccctcatccctcacattcacaccacaatctccttcttctcaccggcattccatctcctctgcctcccaagtcacagagccccaggtgccacaatggctgtggagtctgcggtgcaacctcattgcaaatatttgtatgctcggaagaaaaacacgagtacaatgtcctatatttacgaggaccttactactcttaaatcgctgtcgttcaaaaacaaaacaatttttttcagcgtgttcttatacgcccattactgagctggtccctggggatgcaaagacacatggacctcattgttttcctccaggaattcacttggaaaaagaaacacgggagatgctgcctagaatccttgatgcctccgaagttagactggagttggattaacccggcctctctctgtggaaataggagatggctagaagagtgacatcaatcagccacaactgcttcagcctcataacgtcggagcaatggtatcagacttgatgcagagactacccgggcatatgtggcttttttttttttaaatgtagtgaaaaattccaagtcacagccacaacactgaactatcaaaagatcatttcatgttttggtttgtattaaatgctctttgcactttgcttttgttagagatggctagaaaattctagaaataaggagtgctagagaagaatcactgcttaagagcaggatctcaaagaatacatcctttgccccctatatcctctcccctttctgattctcaaaaagacacttcaaactgatagatagtctttatgtagatgaatgggacaaactcaaacgtgagagttgatccttttctttttttttttttttttttttctccagatcctgaggaattgccattaggacctggaaacaaatatgttgcgtggaagacttactgacaaaggaacttttactgaagtcctcctctagtgctgaatagtgactgctgaaatggccagactggcaacatatcaggaggcaaactggcattcctattagatggaatgtccaagaaaccatacttttttaatggggttgaggattgcctgcttctataagaagataggtattttctgtatctagccaggtgagaccacacatttagagttataagacagattgacaagatcagaactacaattacaagctatccacaaactgttgcagaggcagacaatgttttctggatgctttccttagcctgagtttctgaacctactactatatgaaggagtactgccaagacctagccaaaa

SEQ ID NO: 1885965 - DNA, 4001 bp, Homo sapiens
gaagagttctgatttgaggtcccctgatccaggcatgctcttcttccccagttgcaggaatcaggggactctatctgtaaatgcgggctcaagccatgccccccagctccctctttcaaccaggtgccaccctctgcttctcttccatagacagcctagagctgccagcagtcccttaggatctgtggcctcaggcctggcttaattttttcctctccaaagagccatctgtagggccagaggccgtcaaagcctgactcattactggatgccagttcctttgcctgaccttcagtgattcctaccttaccctgcggttttatgtttcttgtctcaacactattatttcttatttctccacaagttgaattgctcactccagcccctcgaagcatgctctttttgacacagttagctttaggcacatggttggtgctaaaaaaaaaaaaaaaaaaaaagagcattatgtcgttttcattgattaacaaacgtgatggcttcactgcaaagtaaagttgatactgcctggacccctgagttcaagagtcttttagacaaatggctctgagctaaaacatgagcatgcaaacatatgcatctgtttcggtctgatgagataatttggatacttggttgttatccttgagcattttcctgcctcattaatgcatgtgtagccagcacaataataatcatagctaataatggctaaagctgagggctttcctgagccaggcagtggctttaaaactttaaagtggcttttaaaactttaacagctaaagctgaggactttcctgagccagaaagtggctttaaaactttaaagttttcacatggactctcattgaataatttctgtttttcagatcaagaaactgagacttactatcacatttgggattaagttaaaaaaaaaaaaagaaactgaggcttaaagctgtcaagcatttcacagccagcaagcagctaaatcggaacttgaacccaggcagtctagccctgggatcctgtgcccttccttacccattatccagtgttggctacacaaaactaatgagtacatattttcaactatagtttaagtgggtgacatatttttcactatattttatgtaggtgactttcagtttgggggtattctacttacacaatctattgagctggatattactgagaacaaaaagaaactaatgaactctgaaaaacataaaacatgagcaacatgacatcactgcaaaagacaaaacagcacatagccttcttgtgactgtattttgctgacagtccatgagctgatagcctgaactcagcagtgctgttcccttgggagacacacacacacacacacacacacacacacacacacacacacgagttggtggttttgtacctccccccgcccctaaatacacacacaccagttggtggttgtgcagcctggagcttccagtccgcgagtgtgaggaacggactagatgggtccagcagtgctgggtcaaagccaggagggggcagccggaagcgcgcacatgctctggactcgtgcacccgccgaaacgggtgcgcaccgggcgcgcgggggtgagaggtgaggggtgaggggtgagggacgagagggacgggagcggggtaggggcagccctttcccaggcggtagcgggggcggtggtgctgttgtccttttaagctgtggcttgacaggaggagcgcctcctgtcggtggagtctgttacaaggggagcagccgcccaggccgccacacagctccccgcagaggcctcggtgccccttgccattttccagccctactccgactagagttgaggcagcggggagaggcggagccgcgagagcgccgccgagaggtcccgcgggtggtcgcggccatgacagcggctcccgaccggctcaccttccgcgcccctcccgccagaggtgagagtaaaatgtccgtgtcagggttcaaggccaagctgaagttgttgtcctctattttccacaagaaccaggagccgccgcggcagctcaggctccactgcaacatcacggtgaggcgcccagcggcggcttcacacggcagggcgagggcggagaggaagagcccggagtcccgggacaaaggggaacctgcccaggagaggccccggttccccgggccgggtgagcgcgcacctttctcccgcgactggcctggccccgatcgccgggactgcgggaggcttgggtgggaggagggggagggcgcgtctctctggctccttgctgcggggctggcttgggggctgccggcacctctcgccccagtcaccgcgccccgaggtgggagcccgcgtcgcccgcagccctttcggggcccatggtcgccctcagtcagccagcctgctccccgggaccgcgacggggcgtggcagggcgtctccggctgttgtttgagcccgggcggggaaggggaaaggccttcaagattttcggggttttggccgggcgcagtgctcgttcctgtaatcccagtactttgggaggctgacgcagctggatcgcctgaggtcaggagttctagactagcccggccaacatggtaaaaccctgtctctactaaaaatacaaaaattagccgggcatggtggcaggcacttgttgagatggagtctcactctgtcgcccaggctggagtgcagtggggtgatctcggcttactgcagcctccgtctcttgacagtccatgggttcaagcgattctcctgcctcagcctcccgagtagctaggattacaggctcctgacaccacgcctggctaacttttgtgttgtttagtagagacagggtttcaccatgttggccaggctggtctcgaactcctgacctcaaatgacccatctctgcctcccagagttctgggattacaggcctgagccaccgcgcccagatccaaggcccttaagcttaaatgcctcgttcttcagtcaggttttccttgttcccgcatgttcagccaatcgtgtttaaggagaaactaacaatgaaaacgggcttgttgatggaggaaaagttggaatgcagcctctggtgctgtttgagcgatccctctatcccgggtcgctgctgtgttctggaaaggcacattgtaccctggatgcagcaggtaagagtcctgtccaggtgctctgcccgctttcctttcaggcttctgtatcatctatttttcccctgtagaatgtgcccctgacagccaccccctaaccctacccaatttgtctttacatgtctgaccatcaaggctcttctgggtcatattcagttcatgctgatatttccccttcctcccctctttagtcctcactatttttgctttggtcatgttatgctgtattctgtaaggctttttaattttttttttatgatggcaggggagaatagtttataattatgctttgtgctttttatcttctactcaataaatgcttggtaaatatttgttttattgaatgtatgaccctattctagctatattgtgcttgaacaaaaaccttaactgccttgtaagttaactgctaagaatttgtcagaagtgcagacataacatcaagaacttgtcatggatagtacaaaaaggtctctaagggcttgatggaggcctgtaaattgacttcctatgaaagagagtgtaagaagtgaaaatgtaaagcatgactggagagccagagtgatgaagccagggtccctttctccagatcctttgtaacagtgttatgtgatctcttctagaagatcgttctgaaagataatgccaacttggaacctaggaaaccatccagtgggtttctgcagcttaggtggttcaaatcctcatcagcacctttgttttctctgcctcagtttgctaacaatgatgttctcagtagctgtaattgctgtctttgaatacgtaagcatttttttttagatgacagggatatatgtgcatttttattttaccaagtgttagaatttttactctg

SEQ ID NO: 1885966 - DNA, 4001 bp, Homo sapiens
ggtggctgagccaggatgaagacctaggactctaaagctggtgtgccagtaaatgagaaaagtctctaagcgttcaggatagcttcctcccaagaaatctttctccaaaagttctaaaaacaatgacagatccatcttttataaagcagacaaaactagcagtccgttccttttagagtggggtgtaaaggttagctaagctccagggcatcccattttaatcctatatatttataaggcaactgccagcagagcaccccaaacctaaagaaccctgcacagctgtctctgtggggcatggcgtgtccatggatgtaaagattttccaatgtgtgcttacgggcctgtggcatcaccctcagtcactgtcaaagggtagctaggccctgcccgctaggcaccatcctgagaatctgctgagctttctaactagtttatctgttgtttgcagtgaaagatgccctgaaaagaaggggtgtgggtgggaagagttctgatttgaggtcccctgatccaggcatgctcttcttccccagttgcaggaatcaggggactctatctgtaaatgcgggctcaagccatgccccccagctccctctttcaaccaggtgccaccctctgcttctcttccatagacagcctagagctgccagcagtcccttaggatctgtggcctcaggcctggcttaattttttcctctccaaagagccatctgtagggccagaggccgtcaaagcctgactcattactggatgccagttcctttgcctgaccttcagtgattcctaccttaccctgcggttttatgtttcttgtctcaacactattatttcttatttctccacaagttgaattgctcactccagcccctcgaagcatgctctttttgacacagttagctttaggcacatggttggtgctaaaaaaaaaaaaaaaaaaaaagagcattatgtcgttttcattgattaacaaacgtgatggcttcactgcaaagtaaagttgatactgcctggacccctgagttcaagagtcttttagacaaatggctctgagctaaaacatgagcatgcaaacatatgcatctgtttcggtctgatgagataatttggatacttggttgttatccttgagcattttcctgcctcattaatgcatgtgtagccagcacaataataatcatagctaataatggctaaagctgagggctttcctgagccaggcagtggctttaaaactttaaagtggcttttaaaactttaacagctaaagctgaggactttcctgagccagaaagtggctttaaaactttaaagttttcacatggactctcattgaataatttctgtttttcagatcaagaaactgagacttactatcacatttgggattaagttaaaaaaaaaaaaagaaactgaggcttaaagctgtcaagcatttcacagccagcaagcagctaaatcggaacttgaacccaggcagtctagccctgggatcctgtgcccttccttacccattatccagtgttggctacacaaaactaatgagtacatattttcaactatagtttaagtgggtgacatatttttcactatattttatgtaggtgactttcagtttgggggtattctacttacacaatctattgagctggatattactgagaacaaaaagaaactaatgaactctgaaaaacataaaacatgagcaacatgacatcactgcaaaagacaaaacagcacatagccttcttgtgactgtattttgctgacagtccatgagctgatagcctgaactcagcagtgctgttcccttgggagacacacacacacacacacacacacacacacacacacacacacgagttggtggttttgtacctccccccgcccctaaatacacacacaccagttggtggttgtgcagcctggagcttccagtccgcgagtgtgaggaacggactagatgggtccagcagtgctgggtcaaagccaggagggggcagccggaagcgcgcacatgctctggactcgtgcacccgccgaaacgggtgcgcaccgggcgcgcgggggtgagaggtgaggggtgaggggtgagggacgagagggacgggagcggggtaggggcagccctttcccaggcggtagcgggggcggtggtgctgttgtccttttaagctgtggcttgacaggaggagcgcctcctgtcggtggagtctgttacaaggggagcagccgcccaggccgccacacagctccccgcagaggcctcggtgccccttgccattttccagccctactccgactagagttgaggcagcggggagaggcggagccgcgagagcgccgccgagaggtcccgcgggtggtcgcggccatgacagcggctcccgaccggctcaccttccgcgcccctcccgccagaggtgagagtaaaatgtccgtgtcagggttcaaggccaagctgaagttgttgtcctctattttccacaagaaccaggagccgccgcggcagctcaggctccactgcaacatcacggtgaggcgcccagcggcggcttcacacggcagggcgagggcggagaggaagagcccggagtcccgggacaaaggggaacctgcccaggagaggccccggttccccgggccgggtgagcgcgcacctttctcccgcgactggcctggccccgatcgccgggactgcgggaggcttgggtgggaggagggggagggcgcgtctctctggctccttgctgcggggctggcttgggggctgccggcacctctcgccccagtcaccgcgccccgaggtgggagcccgcgtcgcccgcagccctttcggggcccatggtcgccctcagtcagccagcctgctccccgggaccgcgacggggcgtggcagggcgtctccggctgttgtttgagcccgggcggggaaggggaaaggccttcaagattttcggggttttggccgggcgcagtgctcgttcctgtaatcccagtactttgggaggctgacgcagctggatcgcctgaggtcaggagttctagactagcccggccaacatggtaaaaccctgtctctactaaaaatacaaaaattagccgggcatggtggcaggcacttgttgagatggagtctcactctgtcgcccaggctggagtgcagtggggtgatctcggcttactgcagcctccgtctcttgacagtccatgggttcaagcgattctcctgcctcagcctcccgagtagctaggattacaggctcctgacaccacgcctggctaacttttgtgttgtttagtagagacagggtttcaccatgttggccaggctggtctcgaactcctgacctcaaatgacccatctctgcctcccagagttctgggattacaggcctgagccaccgcgcccagatccaaggcccttaagcttaaatgcctcgttcttcagtcaggttttccttgttcccgcatgttcagccaatcgtgtttaaggagaaactaacaatgaaaacgggcttgttgatggaggaaaagttggaatgcagcctctggtgctgtttgagcgatccctctatcccgggtcgctgctgtgttctggaaaggcacattgtaccctggatgcagcaggtaagagtcctgtccaggtgctctgcccgctttcctttcaggcttctgtatcatctatttttcccctgtagaatgtgcccctgacagccaccccctaaccctacccaatttgtctttacatgtctgaccatcaaggctcttctgggtcatattcagttcatgctgatatttccccttcctcccctctttagtcctcactatttttgctttggtcatgttatgctgtattctgtaaggctttttaattttttttttatgatggcaggggagaatagtttataattatgctttgtgctttttatcttctactcaataaatgcttggtaaatatttgttttattgaatgtatgaccctattctagctatattgt

SEQ ID NO: 1885967 - DNA, 4001 bp, Homo sapiens
tatgtgtattttgttagatagcaatattttcagttttaaaaaaagatgtacaattataggatcaaaaaaataagtaggaacactgtaatgttagaactaagttcaatgttagggccaggtgcagtggctcgtgcctgtgatgtcagcactttgggaggccaaggcgggtggatcacttgaggccagggattcgagactagcctggccaatgtggtgaagccctgtctctacttaaaaatacaaaaatgagccaggtgtggtggtgggctcctgtagtcccaggacttaggaggctgaggcaggagaattgcttgaacctgggaggcacaggttgcagtgagctgagattgtgccactgcactgcagcctgggcagcagagtgagactccacctcaaggaaaaaaaaaaaaaaaaaaaaacctaagtttaatgttagaactaagttggagagaaactccattttcagtagaagcaggtttaggttattcagaccaatcttcctacagaaagcaacttttaaaacttgccaaaatatttaaaatcatcttaaaagcatcaaagatctaagaagatatgaagaaattgcctggccagtgagcccagcattggaagccactttggccatggtagagtttgccaaccttgagaagctgagcagagcctatgagagtcttgggggcatgaaggaacagaacttgcagtggggaaattaccccacacttggggctgggaaacccaaaggacttaaattttaagagtaagggtgggccgggcgcggtggctcacacctgtaatcccagcactttgggaggctgaggtgggcggatcacgaggtcaggagatcgagaccatcctggctaacacggtgaaatcccatctctgctaaaaatacaaaaacttagccgggtgtggtggcaggcacctgtagtcccagttactcgggaggctgaggcaggagaatggcgtgaacctgggaggcagagcttgcagtgagccgagattgtgccactgcactccagcctgggggacagagcaagactctgtctcaaaaaaaaaaaaaaaaaaaatagtaagggtgaccagaagcaaactggcccttgcaagtactatgctctggctttgaattaccagggtaggtcagaaagtcttaatccttgaaaactgattaaggtgaccttggattactagtgccgccacatacctggcagaagctaactaaagtcctaaatgaaggaacgtgacatcatttaggcctaaagtaatttctaagataatgtctgaaacaaatgtccatcctacatcaatataaccaggccaggtgtggcaccttatgcctgtaattccagcacttagggagggcaaggcaggcagatcacctgagctcaggagttcaagaccagcctgggcaacatggtgaaaccccatctttacaaaaaatacaaaaattagccaggcatgttcccatgtgcctgtagtcccagctattcagaaagctgaggtggaaggattgcttgagccctagaggtcgaggctgcagtgagccataatcatgccactgtactccagcctgggaaacagagtgagatcctatctcaggaaaaaaaaaaaaaaaaaaaaaaaaagataactaggcacacaaggtgacaagacaatataacgaagggccagctgacacaatagatataaaaaacagacccatgagaaactcatattacactataaaacaaacatgcttgttatttttcataaatggaatcatacagtatgtgctgttatgtttactcaagggaaaggcactggaagagagtgctggcccctggacgttggcctcttgcctgacccctctcctccattcacagctcacactctatgagtctgttttcatgctgctgataaaggcatacccgagactgagaagaaaaggaggcttaattggacttacagttccacatggctggggaggtttcataatcatggcagagggtgaaacgcacttcttacatggcggcagcaagacagaatgaggaagcagcaaaagcggaaacccctgataaacccatcagatattgtgagacttattcactatcccgagaatagcacgggaaagaccagctcccataattcaattacctcctcctgggtccctcccacaacacgtgggaattctgggagatacaattcaagttgagatttgaatggggacacagccaaaccatatcattcccccctggcccctccaaatctatgtcttcacatttcaaaaccaatcatgccttcccaacagtcccccaaagtctgaattcatttcagcattaacccagaagtccacaattcaaagtctcatctgagacaaggcaagtcccttccatctatgagcctgtaaaatcgaaagcaagctagttacttcctagatatggaggcgggacaggcattgggtaaatacagccattccaaatgggtgaaattggccaaaacaaagcggttacagggcccaggcaagtctgagatccagcagggcagtcaaattttaaagctccaaaattatctcctttgactcaaagtctcacattcaggtcacagtgatgcaagaggtgggttcccatggtcttgggcagctccgcccaagggggctgagcctggggtgatctgctgttctcaccttgaatttcccgctcagtgcggggcactttggaggatggccacagtgggggcagtatacaggcttgctcatgcccatcagcacgctgctcaatgtctgccgctggcatcttgacctgggctctactggctgaggaaagcctgagggtaccccacttctgctcaagccctcccatgggtggacataagatttattacattaccatttacatgtttcgatgtgcctgaacacaccaggatctccattgtttccagcaactgtggaaagtaggcatcattagccccctttggcagggagagacttggacttagggagaacgaccagcccagtcgttctcaagcttggctgcagtttgaaatcacctggggaagctttaaacatttaatttgaagcaccgtgcgtggaacccaggtgtcagtagtttttaaagcacccccaggtgatgttaatttacagccaaaatcaagacccaccagtcaatcccaggcccacagccagtggggagcagagtctactcgagaattccaaatcttaaggcagtgtgaagaatgggggagaggttcttggatcactgagtgtctggagtcccacattgtgggaagacagagccccacaggacagtcctggcttctgcggagccaacctcttctctccttgtccttccctgactccagaacttgagcccaggcagccaaagcccagggggacaatgggtgactcagatgcttcctgttttcttggccacagtggcagggtgatggaaacagcccaggctggggttcatggcctaacagaggggcctggagagaggcaggaggaatgaacggggtagagccacagatggcagttttctggcctcaaagaatggagacaagtgtggtttgtttggtggccaggtcaacaacaaagggaaaaagagaggaagaatttgaagctagctttctttcttttctttttctctttttgagacagcgtctctttcactcacccaggctggagtacagtggtgacatctcggctcacggcaacctcaaactcccaggctcaggtgatcctcctgcctcagcctcccaagtagctgggaccacaggtgctcgccaacacacctggctaattttttgtagagacagagttttgccatgttactcaggctggtcttgaactcctgagctcgagtgatcttcctgcctcagcctcccaaagtgctgagattacaggtgtgagcaaccgcatccagctgagatttcttgacatataacacatgattttctgagtcctcaggggttgaagaagaggcctgaggttctgctttggttcaggcaaagcagataagctgggaggc

SEQ ID NO: 1885968 - DNA, 4001 bp, Homo sapiens
ctggtaacatcacactgcctggctccaatccacaggaaccgctgggcccaccaggactgcgctccttggggaacaaaatcagcaggaactcagacacagccagccctcccacccaaatgccggttccccatcccaatgcctccacccacagagccctgtctccccgtggtgtccccgccactccgtgtccagcgtgcctaggggtgccaggtggtctccgcaacacagagcgaaaagggcatggccccgggaaccccggcgggtaaggggtccttgccgtgctcaggattactgcggaaacgccgtgcgctcgctgcgctctagcaggagcaggaggagatcgccttttagagtctgaaatccagaaagaggaagaaggctccttccttggagaccctgttgctgcaagctctgccgccaccagcaaggcagcccctgatggcgcccctaatccgctgcctgatgttggctctgggatagcgcccccaacaccgcccctcgccgctgcaatgtaaaacccaatagcgcccccaacccatccctgcctcggacgtcgcagcaccagataactcccccatcctaccgtctgccgtcggccatgcagccaccgataggacctccaactaacccccggctgcgggcagtgatgccccggagagcacggccacctgctccatgccgtcaatagtgcagccatggatccttaaggtccccaaccccctccccacgacgagcagtgcagccctacatagcagatagcacccccaactgtcccccacccagggggaatgatgccctggatagtgcaccccacccgcaccccgccatgggcagtgcagcctccgacagcacccctaacctgtataccgctgccaaaaatatggtccccgatagcacaccaacccagcccccaccacaaacagtgcagcagctgatagagcacctaactcgccccaccgccactgaccacagtgcagcccccgaacggtgcccacaacccaccccaccaccccgcctgccaccggccgggtatcacccccaaaccgccccttgctgtgaggagtgtatcccctagtagcgcacccaaacctgccctctatcatgggcagtctggcccgatagcgcccgaaaccgcaccctccaagcacctacccgcacccaccgctgccccgccccaccaccagcagtgtagcacctgatactgcctctaacctctcccctgccatggacattgcaaccccacatagcgcccccaacaagcccccaccatgggcagtgcagccccagatagcatccccaccccgctgtcggcaatgaagcccgaccagtaagcacccccaccagtccgcaccctaaccagccctcccaccaccatgccgccggcagtgcaaccacaatagcagccccaacccggcccctgtcgcgggcagtgcagcacccaatagcgcccccaaccagccctactgctgccatcaatacagcccaagatagtgaccccaacccgccccccaccaaccccccccccacccgctgctgagggcagtgcagccccggatagcacacctaaaagcagtgacgcccaaaataacactctagtacacccaaagtagtgacacctggaataataccccaaccagcccccgccgcgggcagccctggatagcttacctaccccattgcctttctacactctggccagctgcagtatccgtcgctgccaccaaccacagcgaggccagccagggaggcgagccagcgaggccagccgcagtcctgcaggctctagcctccagcctatggtaggtgctttctccttctttccttcctgtagccaagcacggagcagctgtcactgccagctgcctctctccattgccaccacacaccattcaaggctccagggctccaggttccaggctccagcctgcggcagcacaatctgctgccgctttctccaaactctgcggcagaagtacaggttaacacacgatagcctgcaacagcgcgacgcccccttagcataccttatatactggggggttgtgcaggcctggttctcggacttcacgttctgattggatgagagaaacatctacgcctactctgattggacgttattttcatgttctgattggatcagaacaagtcttaggctaaccaatcagaacgtgacaataaagtccaatcagagtaggcctagtgttttcctctcatccaatcagaacatgtagtttataatctcggtatataaagcatgttaagagctagagttgcactattccagcctcgtcggcatctgacttcatagctgctccattgccagcttggagtaggaggtgccagccactgcatgctggaggctgcagcctaccgggctgtggctggcctccctggctcaccacctcgccggcttgcctcgccttgcctcgctggcttgccttgcccgctgcggttggtggcagcgatggacactgcaaccggccagagtgtagaaaagcgtcggggtaagtgcgctatccagggctgcactgcccttggcctgggacgggttgggggccctatctcaggcgtcactgcccaccttgggtggctggttaggtgtgctatctggggctgtgctgcctgcacccgggggtggtttgggggccctaaccggggctgcactgcccccggcggggagcctgttggggaaactatcccagactgtattgctggcaacagtgaggtgggctaagtgtcctatccagggctgcactgcacggctgttgcgggggggtggtggtttcaggttgagggtgctatggggtgctgcaatgcccgtggttcggggaggcggggcggtttgggtgtgttgggtgcgctattgcgggggggctacactgctggttgcaagggggcagggtgggttgggggccatatcaggggctgcactgattgctttagctagggtttccagtactatgttaaataacagtggtgacagtgggcatccttatcatgttccagatcttagaggaaaagctttccatttttccccattccatatgattctagctgtgggggtctctcatgtggtttttattgtgttgcagtatgtttcttctgtacccgttttttgaggatttgtagcatgttccccaaattgaatataccattttttaaaaagagactgagtcttgctgttatgttgcccaggctggtctcaaacttctggacttacgcgatcctcttctgcctcagccttcagatagctgcagctataagcatgcaccaccgcacccagcttgaaggtactgtatttttaattccatattgtcaagcgtttaagatacttttctttaaaaaattaatattaattcaaaggaagaaattggcagagtgaaaagacaacctacagaatgggagaaaatatttgcaaagtatgtatccagcagaggattaatatccagaatatacaaggaactcttgacatctcaatagcaaaaaaaaaaaaaaaaaaagaatccaactgaaaaatgggcaaatgacctgaatagatatttcttaaaagatgacagacacatgaccaacaaatatgttttcctaaaaagctcaacatcactagtcatcagggaaatgcaaatcaaaaccacaatgaggtgtcatctcaccccacttagaatggctactatcaaaaagacaaaaaatagcaaatgctggcaaagatgtggagaaaagtgaacacttaaatggggctagtggaaatgtaaactagtacagccaccatggagaacagtgtggaggttcctcaaaaaactgcaaatagaactattatatggtccaacaatatattattggacatttatccaaagaaaaggaaatcagtatattgacgagacatcggcacccccgtgtttattgcagcactattcacaatagccaagatatggaatcatcctaagtatctaacaacagatgaatgcataaagaaaatatggtatacatacacaatggaatactat

SEQ ID NO: 1885969 - DNA, 4001 bp, Homo sapiens
tcacagcaagtctatcacttgctctccaattcccgaaactcagtattttaaaaaataatatgtaaatataaatgcaccaacagcaaataacaaaaatcccaaactgctatcgaggtgttaaaatgaggagtgatacattttaacaaccagaatgaatacactaaaatgctaatagaactgagtagtggaaaagaaacaaaaagagagatcttgtttacccaatgtgggttctgtgcatatgcttgagtggagaggggagacaactgtgggatgggggcataagtatatcctgtgaaacagaacagaatactatcccaggaatcccgttcatatatctcatgaaatagaatcaaataatatctcatgtagcccatgaaacagaacaggattggaatgcacagctggatggctgcacatgccaaggattggaaaggttttcccaaaatacctatgtctaaccccaaagtgcttctgcctccaccacaccccagaccaatcaaaccagagtattaattttggcatttgtatttcttaaaacaaaaaacaaaagcctatgtgaatctcacatgaagacaggtttgagaaccactaactttaaagggagagaccctttttagggaagggaggtccttagagatgaggaacctccggtttcccaagggcacctctccttcttctgcagaaatacagctcgcctgtttatttctcttcctttttggcattagcagttccagttgttaaaggcaggaaaactggagtcattgtctctctctttttcatgatttatgactcagaagcaagacaggggcaggaggttggagggtaatgcttgcggctgtggttgctgttatttttattttgtatttttcttaaagaaaataaaagaaatatgcttttctgaaaaatcttgaagccttgaagccacctgcagggctgttgttttccaaggccttgcacttacgtaattgacatctacatagacacactcctggaacatatcgggggaggcaggcattctgcttgttctcatttgttctcaaattacatgataaaatacatgttttggaccttttaaaccaaagggagttattgagcccgcttacaaaatccataacatgttagcaggacttatctagctgcctccacagaatagccaagcaactctacacccgctttagcccccacaaaaacaagcggattgcactacaaataatttgcctatttggaaaatgaaagcttctctgtagtttgaggtcctattttttctttaagttgttacagtcttttcatggtccttgaggtctaggttaggtttttgtttggggtaatttttgtatcctatggatactatttaatctttagtattgagtcagtatttctcacttaggccttaggggaatactgcctgaagtatgtagggggcatgcggaattcagacgtggcttggaaactgcaccatgggttcacccaagaaacagaccagaggcaacacattctatcactaaaacgtgttctcagttacacttcccttccaaaggtaagcatcttaattcttcaactttttaagaggctaaacccagtgagggcccgtatgtccacaaatagatgacacacccatccaaagcacgcgtgtgtattaagggacagcgtgtcctcccacgttccagccgcccccctggctgccagccgcgggctcagcgcacgtacggtccctgtcacccgagcgtacctgtcccgttctggccttggagaacgcagtggctcacaagggcaccgctagcacgcgaggcgcggcgaagggagcggagggaagcggcgggctgtcgcgcaggtgcggccccacctgccgccggattggccgcggcggctgcggcgctccgcgggaggagggcggatgatggatggcctgtctgccggcccgggtccgagccgcgggggccgccgagggaaagacgggcgcgcgcgcgccgctccgtgcccagcgcagacagcgagatgcctgcacaaaaggatggggcttggaatgtttggattttgaagattagtttctattatatctctgtgggagaaaggaaaacgcgctatgggaaagtggagggcgaagaacccccgaataatttcggactgatgtttcacaaatcatttcgccagggaacaacccgcgagcctccccttcccaaatggcaaacagttcagaagtcttatttgtcatgtatgtgaatgatgccctatcagtatctgagaaacaacaggaaatcagacctgaacagttgcatccccttatctcgggcaatattaaacccattgaaaatgggttaaaaaggaggggcgtggacaatacactttagatattctacacaggctaaaaatataagataattggctagtaaacgctagtaaacttttttttcgaaaaagaaaaaaatagaaggatgtgcccgatatatatatatatatctatatatatatatatagcacattaggatatgcaacattttcataatttatctagcttttacttgtttaaaagtcatgagcaatttgaatatgttttgtttgcccttgcaaaaggatgacggtgcattgttttaggcaattctatttaagaagtgtcctttttaacactggttaggttgagagtgagggtcgaagcaggcagacggttagcaggagagaataagtcgtgaaccaccatagaaatggggctgatagagagctattgtgtcatccgggctcttctttggcgactgaaagacagacaggtccattcactgcaagcattcctcctgcgcaaaccgccacgctgaaggtaaagcatctcctgtcgaggaggcagtcagtcctgcaggtgctgattcatttacttctgagagtaaaatagtttagaaaaaaccagatttttttttctaggaggaaaatgattttctgcttaattgtgcttttgaattacaccatcttcctctgccatgtccactaccaccacgaagaaagtgaaagccatgtttaaaatagtaataaatgagatggaaacatatcaccaaggtatattttatataactgattgaaaagcgagtgggtggaaagagagagcttaagtacaagtgtttctctttcaaataccatatgaacagaacagtaactttagaaaaaagaaatgggaaaaggaaacataataatcccatcaggctaacagggacagcatataccaaaaaaatgcccatgtaaattaaatgtatgcatgcttcttactagaattgtttatatgtatgcttacatacttataaaagagtacatttgaattgtgggattatgtagtgattcacacagcattatgtcgaagggactttttaatattattagagaatatccatattaaccaattttaataactgcataatctttcattaattgtatatatggtttgctcaactattttcctgatgttggatatttaggttgcttttggatttcactagagtaaataacacagtaaggaacatcttgaggcaacatttccatgttttaaattattaatttcaaagaaatttattgaagtggaataaatgggccatacattaggaacattttcgtagtttttttacaatcattttcaagctaacttacaaaaaaaagtattgtaccgccccatcctgccagcaggaaaatcttgtattacatttttttcagctttgttgaagaaaaattgacaaataaaaattgtatatattcaaggtacacaatgtgacgttttgatatatgtctacattgtgaaatgtatcacattttaaaaaaaagtatgctccatgttattgagactatttggaaaagtatttggtaatgtagcaggtgggaattattttttgatattcattttctttagttattaatgaagtccttttgtttctttaaaaatttctttcctctcttttggattttggtttctgttcaatcattgaaatagctctgaagttggtatataaaaataaaatatagcattttta

SEQ ID NO: 1885970 - DNA, 4001 bp, Homo sapiens
ctggaaagacacacgcaattctgtaaatcacaatttataagcaagcagcaattgaacttctagttgagctagtttttttttttcaggccaattaaagttcatattattttttaaacaactcctattctgccataactttattttaaatctgcatcttaaacatgtaatggcgagaaatttgctataattttccacatgtatttgggttagagatacattatgctctatgcattcattacttgcatgccgttcaaaaatcataaacagtgttactgggaaaactgattgggaaattaatcctttgaaacaacaacatatgaatgcaatgattacacagaataaataaacagcttccccacaatttctcttttggataaatgtaaagtcattagtttcagaacagttttcccaaggacgtaaggttttgcttttcctccgtaatgcctcctcaaagctggtacatatcttatgctgagccatccctgaaaaggtagccttaatcaaaatctaatctataaatcacctttaaagccttgaatgtttggctttatgaggtcttacacacactttgcaggttcgcaaagaccacagatcagattattacaattcctctcaagatgtggcttaatgagggtgagggaagtatagaagacttcaactccagaccctcggaactagatcccctagttcactggatacatattttatggaaaagggtaagattgtatcacagtgttaatccagaaactcgaatcctctgattagaatcagaggagaactgagaagaacctgccggcggatgcacgagtgggttagaatggaacttctccccacgaaggcagcacaggcttcgatggagcttttttcctgggtcccgagccacatcctgacaggccactgtggccctattgcacgcctggtgaggcggtgcatcagcttggattttctaacaggttcttttccagaacttttgctgcgggcacggagactcttaccaaattcggctccataatacattccccaaaacattagaacccaggataggtctacgcctccactgatacggaaaaatatatgaaagcgtggattagggtttttgccacagatgagaacaaaatccaacggagacttgacatttctttagaaaggctgccaccagcagaactttccccagaagttacatccgtgctgaccttcatcagttacattgagaaaaaatctgttctatgtgactgtcagccacaggagagggaattttaggcactgaacgtgacgagaaggactttctaactttgattcagtttcaactcacactccccaaacccctcaatggcagagaggccgaggatccccgaatggggaggtgaggctcagaacagcgagggtgcctgagcacagcaccacactctcccggtttctgagccccgagccccgcagtggaactcgggccgctgcgacgcggctcccgtgcggctcccaccgaggctgctgtcccctgccgcgcgggtccggccctccccgccgaccgaggcgcgccccgggcgcagtgccgccgaggaggggatcggtcccagtgtccacgcgggtctcctcgccgccgcggcagggctcggcccgacttcagcgagcagatcctccgcctgcggccggtgacccgcgcgacgccccggcggcaccgacaatgctgtgctccagccccgcaggcgccgcggcagcgggtcccgggatgctcccgcggtccttacctggcgaggcccgtcccgtgcgctcccggggtcctggctgggccggcgccgagcccagggcgaccgcggatcgccggctacggcgtttcccggtgacgggggcgcgggctcgcggggcgcggggggcgctgcccaggcccggctcggcaggagtcagagcccccagcggcgcgggcgagcccgggccagcagccgagagggggctctgagcggagccgcggccgtcctggcattttaaaggcgaggcagctggacgctgttcaagcggaaacgcagagagaaacttcagcccccggggcagagcgttggcagcgaggggagggggcccaagagctccttgcaggcgcacaaaccaatctgggctattccaatatgctcttcaaatgcattttcttcagatattctctttacagttaaaaaaaaaaatccccccaaacaacaacgacagcaaaaccctctcaaagccttctcctgcagtatgcttcatagcaagccaaacatttccattaaagttaggggcaagagcagggggccggtttgggacgtctggtcaatgcaatcagacaagagaaggaaataaggtgtaaaaatactgaagttgtgcctttgttaaaaaaatatatattctatatgtgtgtatatatgtatatatattatatatatgtgaagcgggagaaaaatgattactgtttgcagcggatgtgattgtgtagttggaaagtgcaaactgaagattgttgaaataatagcctttccaaggaattggcaggctacaaaataaacataccaaattaacggtgttcttgtgcacttactaaccattttgaaaggcaaataaaaaatcccattctcactaatagccaagccacagtagctaggaaaaataaacttatcatgaaatgtgaaagaaaaaaaaaaaaaaacaaccttctctactaggggactagagaagacttgaatctattatgacgcacgccttattcttgggcaagaagaagtaaacactgtaatcccatcatgtcctctttatctgtcaattcaatgccatctctatcaaattccaagtagaattttctttttaacttgacatgattctcagtgtcatgtggaagaataaagagaccaggcaacaaaatgttgataaggaagagcataagggaagctagccctgctggatattaaaatgaagaaatgcttgcatgcataaatgaataaatgaataaataaaatacattgtttgagtgcttactatttaaggaagtgctctacgtggattaatgcattttattcatcacaacaagctatgatgcaggtactgatactgctgccattttcagataggaaatggaagcccaaaagtgtaagtatcacacttacacttttgtgtaaggtcacacaagtaggagtaggggatcaggggtttgatgcaggcgttctgcctgcaaaaactatgcatctatgtgcttcaaccccatcacacgacaccgcctctgtcacaaggcaaaaaccagcacattactggtccggacatgactgttcaatggaatgggatgaagagcccagaattagaagtacatgagaaactgtggtgtttaaggtggtacttcatgttaatcagatagatagtttttattttattttattttatgtttgagacggagttttgctcttgttgcccaggctggagtgcaatggcacgatctcggctctctgcaaccctctgcctcctgtgttcaagcaattctccttcctcagcctcccaagtagttgggattacaggcatgcgccaccacacctgggaaatttttgttaggtacagggtttcaccatgttggccaggctggtctcgaactcctgacttcaggtgatctacccacctctgcctcccaaagtgctgggattacaggcgtgagtcaccacgcctggcccagataaatagatgtttaaataaatgatattggaataactagatagtgaaagtgtggggatctcattttctacctagttccccagaccaaaacaaattccagatccgtcataaattgaacataaaaaactgaagtcaaaaaataattagatgaatatatacataaaagtcatcataaacctagaattctgaaagcctttctaaatatatcataaaagcataaaggaaaagactgatatatatgattataaaatatgcaaataaatgtcttcatggaaaaagacaccgtaaacggaattcaaaaataaacaacaaactggaaaaatatt

SEQ ID NO: 1885971 - DNA, 4001 bp, Homo sapiens
cctgagccactggtgggtttcgtccacgcgtgaggatcaaagaggaaaagaagaaaagcccgccaactgcagcccgtcacagttcctcttttaaaccctattagatcatatcgtccccaaggattgactttgttcctgcttaaaggacttgtgagtcattattttttctgaaaacttactttacaaatgaaggaatccccatagcaaccgttctatgtccttggagccaagagaaggaagtacagtgagagactctcggtctcctgaggagccaaggcctcttgtttaccgacgtctgagagaccacgaaattggcctgatcttcagatttcagttgaggcagaggctaaaaggaacatctacatggagagcatagccagggatgtcagcaccagagcaacgcgtagggagcgcagaggaggcctgggccgccttgaggtctgcaggccggggaggccgtcacctgatctcttcaggaagtgcctgggcctaggcctggtcccagacccctccccaggctgctctgggggggacttccctcccttccctttcttccctttccaccttcctttttttccccttgtatcacaaagcatctcctctgtccttgacagaatgggaagagaattggaaaaaccaccacaggtcactgttggtctctggcgctcaattcatggggaggaaacctggctgggcgccctccttccgggcgagcaggaacggaggggctgtgctggtcccagtagaggagtggggcatgtgtgtgtgcatgtgtgtcatgcatgtgcgtgtgcgtgcgtgcatgcgtgtgcgcgtgtacgtgtgcgtgcaagtgcatgtgtgcttgcatgtgtgtgcatgtgtcgtgtgtgcacgtgtgtgcgtgcgtgtgtgcatgtgtgtgtggatgtgtgtgtgctgtcaccacggtggtgacggcctggtgccatcagctctctagagagcagtccttctcttcccacaccacccgccactgctcctgccaccctcccctggaatcaactttgacgagcacctgtttatagcttcaggggtttctacagggccccggcaggcaagtggccaagatgggcttcaactcctgacacaggaactctcacatgtcctcccacccaccagcccaccctgaaacctccaaggcacagagaagcaaggggctgggaagtggagggtctgggccgagcccagctggaggcagagggcgctttcccaccgtctgggggtgcgcctgtccctctcctgttaggctaggtgccttccgcggcccacctggtccacaccaccctcctccgttctgggtccgggtccgttccggcctgccctactcaccctgaccagccacacccactttgctttggggcttctcatggggagcccagtggaagggaatgacagagtctcaggctgggtggggcatgggtctcctgagcacggcccgcccgccgcctcctggcttccatctctcacagcaggagcagggccaccacctgccgcctgagcctgtgccagctgtttcccactcccgcagaacagaccctcacctgggggttgggtttgccctcccctgcggagggagggaaggaggggagcaggaggatggggaggcacagccaccccggcggaggggtaggaaacccggatactctctacctgtttcctacctggacacccagagctcggggcagcagaccccagactccaggagctttcccctgcggggcggcggggcgtccacacccaggtacgcggggccacgccaccgtcagccgcttctccccacctgtgctccgcgtgctgaccgcgtgtgcttgggctgcagtttgctcctcgcggcgtgccctgctcactgctcaccatcccaaagaaaaagacaaatgacagccccttgttccccacccatattttaagggaaaaatactgtgcaaacggcttcacatgcgtctccgtttccaagctccaagatggctgctctcagtaccgcctccttcttcagtgtcccttcctgttcaccatccattcacggcacatttcctcagccccactctgtgcctcggcctgtgtctgctacttggaaaaaggcaagttcctgtgctcaactctgagcaactgttgctgaggaaggaatcaatcccttggggaggctgcccaccaggggcggatgagatgtgggggtgtgcggccaccgcccttctccctccttccctcttccttcctccctcccccttcttccttcctccttcctccctcttccttccttcacaggggcctgctttactttctggagtcaggtttaactgtgtccattcaggctgctataacaaaaataccataaactggttggcttttaaaaaatagaaatgtacagctcacagttctggaggctgggaagtccaagatcaaggtgctggtagatctggtatctagtaagggcctgatttctgggtcataaatggcctttcttttattattattattattattattattattattttattttaaagacagggtctttctttgttgcccaggctggagtgcagtggtgcggtcatagttcactgcaacctcaaactcctaggctcaagcaatcctcccagcctcttgagtagctggacctacaggcacacaccaccacaccaggctaatttttttttaaagatggagtctcatgctgttgtccaggctggagtgcagtggcacgatctcggctcccagcaacctccgcttcccaggttcaagcaattctcctgtctcagcctcccaggtagctgggactacaagtgcgcaccaccacatccagctagtttttgtatttttagtggagttgggatttcactgtgttggccaggctggtcttgaactcctgacctcaagtgatctgcctgcctcagcctcccaaaatgctgggatcacaggcgtgagccattgtgcctggcctaatttttgtgttttttgtagagacgtggtttccctatgttgcccaggatggtctcgaactcctgacctcaagtgatcctcccaccttggcctcccaaagtgctgggattacaggcaagagccatcaacgcctagccagcgacttctcactgtaacctcacatggcaaaagaaacgatggttctctctggggcctgtttcataagggcattaatcccattcatggaacttcactccttatggcccaatcttctccccaaaaccctacctcctaatatcatcgacttgagggttaagatttcaacatacgaattttgggggacacagacattaggaccacagcaaacagtaagcctcttcatcttactaatgaatatccctggggcgaagtttgaccctgggtaatgaaatgagtggttagttgttcaaatgtcacccataatgccacagaaatggggctcttccctcaggctaagcacagctccctctagccttgttggtggactgccttggtgatgggcctgccttccccactaggctgaaagtgatttgaaaactctcttctaacctccagccccacccatgtaccttacaaatctcagtgattgaccccctgcctggcacagagtagattgaaaacagtatggaagtgaccagaccttacccgatgggcagagggagctcagagatgggaacagagctggtcctagggcacccaaggggcatatcctggccatgccacttcccacctagataggctctgtcctgaacatcctcgattataacgcaggaataacaatgcccacatcatgggattgccaggaggatcatagattatgtacagaaaactggagcaacaggtggcaggcactctcccacagagggttctctaaagcagctctcagatttgcagttgaaatttccaaggaagaggttccgagtcaacaagcattttttgacggaagcaaaaactactgtgaacccaacactgctctaaaaaataaagtaaatttaaaaagaacagggagatttaggatcactgtg

SEQ ID NO: 1885972 - DNA, 4001 bp, Homo sapiens
gctgacttctacagtttgagggaggtgacagaggaatggaatcacctgagaagaatactgcttccagcaggaaactaatgggtaactctgacaccccaaatgtgaagtcactgcctcatgttttgggttgctcacaaatggtaatccctacttcccagcaattccaacaaggaagaagattggctgtaaaaactcctggggaaaatcatcagtcaagagccaaagtttcctgaggccatgaacctccaccaggtaacagtacaagtattactgaaataccaagttcatggggaaagagagaaatgaaaggccaacatttcccatgtgggctctatcggcttggtgtgaaggctcctcccctttgattacgctagaccatatggcagagttaactgtgctctagaagaggttgatatgtggccactaacatcagattactttagttctaaatttaggttccaagatctcaatgtttctaatgaggcctctataaaggatcctttggaggcattaggcagactctagtggtacagtagctttaagaaggacagcagtattttgaaatgcatcacattgactattataattctgaacaacataccctgttttgaaggatatctggggtccttcaacttcagattgtttgaagtaatcacaaactattgatatttgtaatgatggtaatatgtccacgatccagctaggactagtggagcacaggacatatgcctgaggaatacaagaaaaaaagatgacatggcttgcactaaaggagtttactctcttccagggagaccaatcccacccacagttgacaaaattgggcatgaaataaattgtatgttttaaaggacggtcacattaggtgtaattacatgccgtagtacaagatacagcaagtgctaaacacaatcagaaatcaaagataattcacattcactaaagctctgttcaaatgcaatttcttttgtggtctcatccctctagtcactgttagtcaccttttcctcggggtatacttgtctatctaactagttttttctttaaaccgtaagctctttgaggataaatatcctaacttgcccttatattcttcacagcacataataatgacataaaatatacattcaataaatatttactaagatgcaaattaaaaaagggaagatatttgtgttttctagaggttactggggaaagagttatggagaatataaaaaataagccagagccacaagagctagagggagacaaatttaggtgagaaaaaagaaattgactgagcaaatacagagaaagtaaccaacttgtttgagtggcaggggtggagtggggatcaataatgagaaatctgatgatagatgaagaattgtcatagatgaacgaagaaagctgagacagagtttagagaaaatagttaaagtataagaagcttaggtttgccaaaattcaactcattgatcctttatgtccttttatgaaatgcatgaaggtgtttctgggatgggcttatgtgagctcagaaaaatgtttatgactgcgagcttgcaaggctggatgcctgctgcactggtcctttagaggttagagtagtaggctgcttaggtcaacaatggaagttcagaagtaaccctatgtacaaggagtgcttattgaaaatcaggccaagaaactatttattgtgggtatccaggctgtgtctgtatgcacaaaatatcctggccaactctgattagcctaacctgcctggcaaactaacatggtcttggctcataggatcgaagtactggctctccaggatcaacaaggttaattagtcattttccactgtggtaactttttggatattacaacctatgcaaggcatatattttcacattagattttcctacttgctcataggatctgcaggctcagtccaggagaaaacaagcctatggccacactggtgtgcaaagactgcaaaatcatctagggatggtgggctggctactttttctgtggtcacaggcctgagtgtgaacatccctattcataccaagagccatttggtcacaatagggctttgaggtcacttgaattctgacattctacccagcaatctccagagttctccacagcagatccaggccatgggtagttcacagtgggcacagagcctcagctcattaacattttatgtgtatgagataactgcatcttgtttctgaatagaaaactagtacagagtggcacccaaatttccccatgtccaggcattctatgcactattgtttgcaaaattatagcaaaatcatgcattcctactattttataacaggagaaggaggacaaggaggaggaagataattgaggaggagaagaaggagtaaggggagaagaagaaggagtaggggaagaagaagaggaggaaagagaaggaggaggaggaagaagaggaagaagaggaggaggaggaagaggaggaggaagaggagaaggaggaggaggaggaggaggtcgtcattattttggccaccaccaccaaaatgtatcctgattgtttctcatattttccaatccaacattgcagaagactttctaatctccgtatttatacttagaatttaaaaatattctgaaggtcaagaaagaagtaggcaaatccccaggacagacccagcccttatgctcctcacaacctgcctactcttggcttttgcaaccttgagttcaactaccgtcacttcataccacctgtcgctccccacacatgctgtgtgctttcctgctttgttccctctcctaggctgcagcccctcaccctctgccaagttctagaagtgcacagcattcctgaaggcctggttcaaataccatctcttctggtaggcaggcagagctcgtcactccctcctcagcatgcccacccctgacactgagcactcttgtccactacctaatttgtcatgttgtcatgaagttagtgtttgatgaatgtgtcccttgcttctttgtgagctaagtaaggatatagaatggagtttactctcataggctggcataaagtaggtatgcagaaataacatttactggatgaatcaatgcttgcatgcatgagtgagtgtattaaacaataaagttaaagaaagagccctctattttcttctgagagaaatcctttctaaataagacaaggataaattcttccatggctgtaaactactctgtgggcatagagctaaaggttttgaacttactcttagaggactctggtaactgatatgatacaaagaacctaggaagatataaaaagaaccaaaggcattctgttacctcacctgagaacagagagagcaaattttctgaattaacagagtagactcctattgctgcatatttttgtatatatgagtgtgtgtgcacacgggaggacacacctgtgtgagtggggggggcagtgtgtgtatatggggcagaagtcagggcataaggattgaggaacacatggagaatgtatctgagttgatagagttaataacagactctacacaattacaggaaacacttgcacactgaaaataatcacaaaaaatatagaaaatttggccgggcgcagtggctcacgcctgtaatcccagcactttgggaggccaaggcaggtggatcacgaggtcaggagatcaagaccatcctggctaacatagggaaaccccgtctctactaaaaaatacaaaaaattagccgggtgtggtggcaggtgcctatagtcccagccactcgggagtctgaggcaggagaatggcgtgaacacaggaggtgaagcttgcagtgagctgagattgcgccactgcactccagcctgggcgacagagcaagactctgtctcaaaaaaaaaaaaagataaaagaaaatttgcagatttctagaaacaactttgacccttagtcctttaaaaaagcaaataaaaatatggactgcttatgactgcaaaattcactcttcttcatattatcaacttc

SEQ ID NO: 1885973 - DNA, 4001 bp, Homo sapiens
taacaattattttgcatttcacaattcaaagaggattctaaagaactagattcagaatattcatttaaaaccactttcagtgttcaaaaatttcagaaacattgatttgaaaaaccaaaattggtacttaagacagattctgtaaaatcaagatatgcgcaactgatgtaacatgtaccactataggaaggctactcaaaaaataaaacaattttactggaaaaatgcccttagaaatatggtcgaataaaccagtatctgatttcagatgtactatgtaagtctgcccaacactatttttacgtagttctgcacctttacaacacaagagctccgcagaatgaagacaaatatattctaaaatacacaaaggtttgtgcgcttctggtttgttcttcaaaccactacacttaaaaattacccttccaacatttttctaagattagagactatacagagaactctactaaattttatgaaacctgtacttttaaaatactgttccgttttaagcatatctagatttttatacatgcaacaaatgcaacaaatatggctcctcttcatcgcccattaccgagagcagtcctactttattcatatttacattacgagaaagtaacttcaggaagagatttggtgtcagaatgttcttttgtgaaagtttttcgatcatggcttgtgataatataaattcttaaaaataattaaattatgaacttttaaagactaggaattgacccaagtacgttctaacattcaggtgtgagaagttgcagataacggctccttgagacctttttaaaaagtaccaaacagtgtatttaatcatatttaaatatcaggagatcaaatgatcttggcgtcattactcggtaaaataaactacattaaccaaacgtcatcagctagctagcaccgtaattatcaaatctatttccattaaacagccttgacgacacagtaaacttgtcttcgtaattctgaaataccagaagcactcctccaacttgcatttttcaaagacaaccttaacgtcataaaggtttaataagcagcaagtaccttcgcatgtatcactgcagccgtttcaaaatcggctttgaaagagttaaaagccaacacccaataggagggaaaaaaacaagttttatttttgttgaaacgtagtcagggttccattgttcttttaaattcgatcatgaagatgagttcccacctcaccggaaagaggttaaaaagctcctccgttggagaacctgaaagggatttttttaccctaaatatcaaaataactcaccaggacagaaaggggctctccacgcccgatccccttcgggctctcgccggcattcacccgccgcccctttcccggcggatccagtcccggcgacgaggctgccccccgcccacctgccgcccgcgggctctgcagcggggccccgcgtgccccctaccccaggaccctacgactcgggcccagggcaccgaggcgcatcccgccggcgagagccggcccccgaccacggaggggcagtgcgagaagagccgagcggcgaggcccggcccgccgccccctcctgctcgcgcgctcaaggacattttgcttttcctcccaaggacaaaggacaataaaaggagctagggagccactcaccgggtccgagcgcggccaccggcacctcctggtcgcccaaacccgagtcccgggccggaccgcccgcccgagcctcccgcccgcgccgggtccagccgccggggcccgggggagcctccgaggcggcaaccgcagcggcgctttcggcgtcgtgggcccggccgccctgggcgcctctgccgcgggctgtgacgccgacgcgcgcggcccgcctcgcctcagccgcggcagccccactcccgcgggcctgctggccgtccgggcgtagctccccgccggccggcgggcctcgcggccgcggcggaacgcctgacagctcggggtgctgctgcctctccggccatcttgtgccgtgtgtgtggtgtctctctcccgtctcctctctaggctttactccctcctcctcctccccccgccccacacaccacacaacatggcctcttcgctgcggcggcagcggctgcggcggcggcaggagctccgccgcgctccagcccgctcccctcccccaccatccccgcctcccgcccgcaggcccgggggccaacgcgcacgcgcgccgccgcccgcccgccgcggccattggctccacgagcttcctgcatcccctatccgggagcggcctcacgcacgttagctggcgtcttcctccctcccaacaacaacttcttccattctattggttaatttcaacaccaccccttccgcctccttcgtgcggataggctggccttagtgccattcactgtccgtaggcgtttctggttttcttgagaagccccgggccacgattggctggtgatggaacctttggggttggagctgagctgttgcttttttccccgcagtgcggacccctccaggctagctggagggttcctggtatggtctaggccaggctagaatggttagtgcagggtcgcacaaatagtggattcgcgtctagaaaaagctctggcttcggtgtttctaggttcagattttgtctttaaaaaaagggaaagaaaaaaatgactgacaggatgatgagcaaacaagatacaggcccacagcccttgggcaagcagccatatcctcaaaatatttgttctaagcacccaggccttccatgaaggtcacacagtcaggaccaatggttttaccatcagcacattccctagccccagtatccgagttgagatgcgatttatttgtggatttgtagactgcctgttgcgcatttacctgagagcctaaaagaatgtctagtgtcttgtgagctgtcgtcatggaaatcaaaaaaaacaattaaaaagaatgtccagtgtcctgaggccttagcgaatcaatctcaataccggttgactggattccaccctgtaggacaatgtttgttagagtagcagtttgaacctgaaaaatcatagtctaccttttcaacctccttccagagaaccaggcaaaacaagtttcatttgctttcggcaaatctcacttttttttcgttacttcttcctactttaacgtggaaacaactctaagaagaccataggaaaaaaatgaaaacctaaactttcctgaaatggatggggaaaaaaaaaagaggtagctctctcccgttgccggtatttagaaatcttgctccttttggcaggggacctggggaaaatgaaaggaacaccagatgcttagttttaccggatttttttttagaggaggggcttaggggtgagggaaacaactcttcagttcttttgagcctctgcccctgggttagcatcagaaaatgttacatacatgtagagcctaggaaatagtctggccgctttttaaaatgacacagttgttgattgatttggctcagtgtagcatcagccacttaggacaaagctaggacttgatcccaagtctcctgactttttatagatcttgatttccttgtatgcaaccaggccaccctccttggcagtatactttgaactctaagtaggcacacacacacacccacaaaatacttcttcaactgaaattaaattttctccaagagacatttaatttccaagagacattcccttacacagtgtagctttggacacggtggacctgcaacaaggctgtttttgctgaaatagccccattctgaatccttttttcctcattcttctgctgtgtttttgctgtgctgttgttcactcccttttccttccatttttcccctcttattacaacctgaaatccctctctgattgtgcctttacagattcatcaccgagtatgtctatgccagggaaacagacctaagcaggcatttattaaaacagtcatggctgaaaagcattgagttagctgactaggtgccagacat

SEQ ID NO: 1885974 - DNA, 4001 bp, Homo sapiens
attgaccaatgctaaagattaacgcattgaattaaacagaaatacagaaaattcaaatttttggactgatttaagattatgaacctttttttttttactttccctctttttatgacaggcaataaacaaagaaaaagtttaccattcttcaagacaaatcatcttaacatctcccttaccatccggaagtatgttttacaatcatgagcaattaaaaattagctcctccaagagaaattagtgaagttaaaatggccactggttactttaaattttaaaccacaagttacttgatctcaccaagtgggatactagctttgtctctaaagctactctaaaacttacagtatctagacctttacactcaatttcaaatcagggtcttcaacattttcatttcagtctttctcctcccccatttatcatgtaaaaagatctttcaggttaaactgctaacaattattttgcatttcacaattcaaagaggattctaaagaactagattcagaatattcatttaaaaccactttcagtgttcaaaaatttcagaaacattgatttgaaaaaccaaaattggtacttaagacagattctgtaaaatcaagatatgcgcaactgatgtaacatgtaccactataggaaggctactcaaaaaataaaacaattttactggaaaaatgcccttagaaatatggtcgaataaaccagtatctgatttcagatgtactatgtaagtctgcccaacactatttttacgtagttctgcacctttacaacacaagagctccgcagaatgaagacaaatatattctaaaatacacaaaggtttgtgcgcttctggtttgttcttcaaaccactacacttaaaaattacccttccaacatttttctaagattagagactatacagagaactctactaaattttatgaaacctgtacttttaaaatactgttccgttttaagcatatctagatttttatacatgcaacaaatgcaacaaatatggctcctcttcatcgcccattaccgagagcagtcctactttattcatatttacattacgagaaagtaacttcaggaagagatttggtgtcagaatgttcttttgtgaaagtttttcgatcatggcttgtgataatataaattcttaaaaataattaaattatgaacttttaaagactaggaattgacccaagtacgttctaacattcaggtgtgagaagttgcagataacggctccttgagacctttttaaaaagtaccaaacagtgtatttaatcatatttaaatatcaggagatcaaatgatcttggcgtcattactcggtaaaataaactacattaaccaaacgtcatcagctagctagcaccgtaattatcaaatctatttccattaaacagccttgacgacacagtaaacttgtcttcgtaattctgaaataccagaagcactcctccaacttgcatttttcaaagacaaccttaacgtcataaaggtttaataagcagcaagtaccttcgcatgtatcactgcagccgtttcaaaatcggctttgaaagagttaaaagccaacacccaataggagggaaaaaaacaagttttatttttgttgaaacgtagtcagggttccattgttcttttaaattcgatcatgaagatgagttcccacctcaccggaaagaggttaaaaagctcctccgttggagaacctgaaagggatttttttaccctaaatatcaaaataactcaccaggacagaaaggggctctccacgcccgatccccttcgggctctcgccggcattcacccgccgcccctttcccggcggatccagtcccggcgacgaggctgccccccgcccacctgccgcccgcgggctctgcagcggggccccgcgtgccccctaccccaggaccctacgactcgggcccagggcaccgaggcgcatcccgccggcgagagccggcccccgaccacggaggggcagtgcgagaagagccgagcggcgaggcccggcccgccgccccctcctgctcgcgcgctcaaggacattttgcttttcctcccaaggacaaaggacaataaaaggagctagggagccactcaccgggtccgagcgcggccaccggcacctcctggtcgcccaaacccgagtcccgggccggaccgcccgcccgagcctcccgcccgcgccgggtccagccgccggggcccgggggagcctccgaggcggcaaccgcagcggcgctttcggcgtcgtgggcccggccgccctgggcgcctctgccgcgggctgtgacgccgacgcgcgcggcccgcctcgcctcagccgcggcagccccactcccgcgggcctgctggccgtccgggcgtagctccccgccggccggcgggcctcgcggccgcggcggaacgcctgacagctcggggtgctgctgcctctccggccatcttgtgccgtgtgtgtggtgtctctctcccgtctcctctctaggctttactccctcctcctcctccccccgccccacacaccacacaacatggcctcttcgctgcggcggcagcggctgcggcggcggcaggagctccgccgcgctccagcccgctcccctcccccaccatccccgcctcccgcccgcaggcccgggggccaacgcgcacgcgcgccgccgcccgcccgccgcggccattggctccacgagcttcctgcatcccctatccgggagcggcctcacgcacgttagctggcgtcttcctccctcccaacaacaacttcttccattctattggttaatttcaacaccaccccttccgcctccttcgtgcggataggctggccttagtgccattcactgtccgtaggcgtttctggttttcttgagaagccccgggccacgattggctggtgatggaacctttggggttggagctgagctgttgcttttttccccgcagtgcggacccctccaggctagctggagggttcctggtatggtctaggccaggctagaatggttagtgcagggtcgcacaaatagtggattcgcgtctagaaaaagctctggcttcggtgtttctaggttcagattttgtctttaaaaaaagggaaagaaaaaaatgactgacaggatgatgagcaaacaagatacaggcccacagcccttgggcaagcagccatatcctcaaaatatttgttctaagcacccaggccttccatgaaggtcacacagtcaggaccaatggttttaccatcagcacattccctagccccagtatccgagttgagatgcgatttatttgtggatttgtagactgcctgttgcgcatttacctgagagcctaaaagaatgtctagtgtcttgtgagctgtcgtcatggaaatcaaaaaaaacaattaaaaagaatgtccagtgtcctgaggccttagcgaatcaatctcaataccggttgactggattccaccctgtaggacaatgtttgttagagtagcagtttgaacctgaaaaatcatagtctaccttttcaacctccttccagagaaccaggcaaaacaagtttcatttgctttcggcaaatctcacttttttttcgttacttcttcctactttaacgtggaaacaactctaagaagaccataggaaaaaaatgaaaacctaaactttcctgaaatggatggggaaaaaaaaaagaggtagctctctcccgttgccggtatttagaaatcttgctccttttggcaggggacctggggaaaatgaaaggaacaccagatgcttagttttaccggatttttttttagaggaggggcttaggggtgagggaaacaactcttcagttcttttgagcctctgcccctgggttagcatcagaaaatgttacatacatgtagagcctaggaaatagtctggccgctttttaaaatgacacagttgttgattgatttggctcagtgtagcatcagccacttaggacaaagctaggacttgatcccaagtctc

SEQ ID NO: 1885975 - DNA, 4001 bp, Homo sapiens
aaagggcaataatatttgtggcatattgaagggtatggaagatctacaggcatcatttgttcaataatcacaagaaaacctgaaagatatgttttgattccatttaacaggtaagtatggaagttgagtaaattgtcttttctgctgttttttcaataacctcttcttcagggatgcctatcactgttgcaatttcaaacatcacttctctaaagataactctccaaatccaaatctgcaggtgggagagtgctcatttctactaacagtctgactgttcttgaaaagggaacgtatttaatactaaattcatgggttttcttactaaccaatactttcatattgggggaatatccattgtctattgcactcagatttgaggacttgagttaccttatttttctccttttctgatgaaagattctccacttgaagctgctgctgatattcatgcaagcccttcaatccccatggtccctgtttcatttcaggcttttattagctcatgcctgaactagtatgatagcattgtaataaaattttctatttcactttttttttctgtttttaggctgtactttactgtcagatttagtcttcctcaactagcagtatataagttttcactccctagttacaaatttgatggattcctttaaaatttaaatccaaactccctggcattcaggaccgtaagacaattttctcccaatatatctctacaaccttgtatgtaaatgctaccataaaaataaggttcaaacaatccacttgtaaacacgctacacaggccaggtgtggtatctcacacctgtaattccagcactttgggaggctgaggcaggataattgcttcagcccaagagtcaagaccaggctggacaacatagtgagaacccatctctataaataacaaaaaaaaagtagccaggcatggtgtatcgcacctgtagtcccagctacttgggaggctgaagtgggaggactgcttgagcccaggaggttgaggctgaagtgagccataatcacaccactgcactccagcctgggcaataaagcaacaaagtgagaccctgtatttctcaaacaaacaaaaacaaaaaacaaaaaacaagaaggaagaaagagaagaagaaagaaaagaaaaatacataaataaaaatagacacatagacatgctgtagagttattacgggcatacagtgtgccaagcacatatgtatgagctttacatatagtgactttcataacaaccctataaaatagaatgaccatagttacagaagtagtcacaatagtaattgtagtagcagcagtgatggcaccggccacctgtctggagcggccgctgcaaagacaccggctgcaccaggggaggtgccgccagagctgcgcactcagcaaagccagggtgggtggagggccggggcggggggagctgggaacaggcaggggtcccgccccctaccgagctaaagggtggggaacccgtgctaggggcacagctgcagagctgccgccgcagacccaggcatccctgtgctttcggggggccaggaagcccctgaccccacaggttcagcagtgcctgcttgctcccattcctggcctctgcctgctccctgtgcccacttcaattttggagcaaagtgatggccaagcctgggtgctgctgcaacctggccaggcgtgcgcatgctcagggaggcgctgttacaccagccccctgcctcctcagccccctctggactttgggcactgatgagcacgggagagaggcgaggaggcgctgtgggctgctgggctcaggcctagaggcgcccttcaaaacgaacagcctgggtgctgtggagggcacgttgatggcagcaaaaggaagacaggctactggacagaaagggacgggtcccagtgaagccccaccttcaagccagggatggcttcaatcctggaggccgcgctgtcagttccggtcggagtctgtggcctggagtgagcactaatggttctttttccaggcccgcccatggccacccatggaccaatcagcatgcacttcctcccttctgaacccataaaaaccccgctccccggacgcagccggagtcacgcgaagtcggaagtaccagctgcgggaaggagctgcccactgtgcgtcttctcaacttgttgggacaaccttcctgcggaaaggagagacaaccttcctgcagaaaggagctacctgcttcaggtctactgagagctgttctgccactcaataaagctcttctccatcttgctaagcctccatttgtccgcaatacctcatctccctggacgcaggacaagaactcaggacccgcctggaggtactaaaagagctttaacacaaacagggctgaaacacgctcccttgcttgccacattgcgggtgacgagaaggagaaaagagctgtgttcctttgaggatcccagacctagggtctccctgagccagggctgtgacactccctttggggttctatggttcctggcatcttcaagcttccaggcgccaccaccttcgttcccttcatccaaacaggtgcccacagcagaatccacatgccgtccatctggtccagcctcacgcagagccacaactgtgctggcgcctggagctgccagccccactgcagcagccggtatgtatggctgttgccggtccctgcgctcgttcacccacacaccccttgcggctccgcgcctagctctccctgggcaggtgtgggatctgggctggtggcgggagccaagcacagcctaccgggccaagtgggcggaacaagcccagtgggcacgagcaatactcaggcagaaggtgctgccagcaacagaggtttctggctgatgaaacgacacctcaaggatcccatgacagcagtaatagtagctgtggtagcagtcataatagtagttattgtactagcagacgtagtagttataacaatagttataatagttgtcttaatagcagtgagagtagttacagtagcagttaaaatcgttgtaggaacagcaactacaaatacttgattgactaacactagtacaactaagatatttatagtacttaccatgcaccggagagttcacacacattattctttgccttttgaccattttcctcctttgagataattgtctcctcatctgtctctcctctctctcctttaggcatttcatctgtgaaactatttatatcccttaagggatgcccctccatatctttatatctacttctccttcatcccagctccaatattgtgtcttaccatcattatgttttgtaaaaggaaaaaagaagccattccctactttaaacttctctgctttgtatctaggactgacattcagacgtggagcaagttggactgcatagggacccaccagtgagatggacgctgtctgtaaacggtagggatggcggcccgtcgcggtggctcacgcctgtaaccccagcactttgggagggcgagacgggcggattatgaggtcaggacaccgagaccatcctggctaacacggtgaaaccccatctctactaaaaaaaaaaaaaaatcagccgggtgtggtagtgtacctgtagtcccagctacttgggaggcggaggcaagagaatcgcttgaacccgggaggcggaggttgcaggtagccgagatagcggcattgcactccatcctgggtgacacagtgagactctgtctcaaaaacaaacaaacaaacaaacaaaaaggagtagagatggctgtgctggccacactctgcctccatccacctttcctgacactctactccatgctggccacttggcatgtttgactttccatcactgactgccctgagctaacctactttttttgtctgttattttccatatgagcaaatccctaacaaaatcttaaatttttatgaggggatgtaggaggggtattatctatggatgttaatggtatttttcatagatgccatcttttcta

SEQ ID NO: 1885976 - DNA, 4001 bp, Homo sapiens
cttattctgtcaccagtcagatctcttccctgaagtgacagagtcggggcaagctgtgaggcatgttgataaaagggtgcgttcctatttgagcagacaggatgaaggtgatgaaatagaaaggcatcctttctgctgctctgaataccaagcaggaagtcagagaggatcaaaggcaaatgaagtccacaggatttatgacaggtgtgctcaggagaatagcaatcaggaggaggagatttcttactcagggcagcaatggtggtggcagcagcactgggtcaacaatgaaaatgaagaaaaacccagaatgaacactgctaggtggaacaatggaggcgataaatatgttcttattagcaaaagtgaccttaaaagaatttgaattgaatatacatgagaatgagttcttggtggtgggatggggaaaagagaaataaaccatagactctctccatagaaataaagtataccagtgctgttggtatgaaggaagatgaagaggcacaggctcctgacttcagttctgatgaggaaatcctagaaacattaccaggatttccatttctttcttggtttgcaacctaagacactaggatgagtttgaaaatatcttaatttctccatagaatcacataatctatgtcctgtttgaggtttgaacgttcctgtgtattttgggggtgggcatgtttcactcgtagaaaagattcttcagtaaaaacaccaatttgcaaacctcatatcaaatagcgaacaccacagcgccagtcatgaataagaattcctgctctaggcctttactccgatcaataattgtgaagggtctgagattttatcctacttgaaagctaacaaattagcctgcacagtttcatggatgttggtagaaaacacaagactcctgggtcagagacaaaagactatttaactcacagcacagcaagcatcatcatcagcagcattatttgcatcagtttcccttgtccaccaagtcccatggggcagtgcaaacaagaccagatagcttcatgcacataaggtgcccttatcacaggaaagaaaccctgagctgaagatatctaaattttttataatgaggcgtaagcatgtgtgtcctttgcttgcaaaaagttactatctctttcttctaaggctgaacaaacatcctttcaatgatagtacaaaatgaagacactcaatgtttcttctcacaagatgtgcaaaaatgcaaaatacccatgcaagattgtcttccagcaggtcttatgtccaaactttacagaaattacttcccattcctggatcttatattttcatatctttaaaggtattaaactggatcaaattcaaggtcatttcgtggcaacaaaaacaaaatgattatttctttttttaaagaccaaccttgtgaagattctgctcttcaaggtcttacaatctcaggtcacgcttaccttcaaatgatcactgctggttggcattttaaacacaggcacacaccaattcaaagtatcagtacctccacaagagtgatgtttcatttctaattttttgtgggaaagcccagtaaagtggaaggtaatattgggaggaaaactgagctgtgattgaagcaacacatatatcttatttcttctaccatctcagattaattgtaaatgcattttctttaatccaaatacatggaaaatagactgtgagtgtaatctctgttgaaaatttccttacttttaatcttttcccctcactctcattgtgaacttgttctgggagtgaaataatttgttgaaatagaaactttgcaagagaaagtttgctgattcctgcaaaagaagccaggtcattaggcaaagacctaatgcatctgctaccagtggccttggtaacctgccagtgtaaaccacaaagtgctcatgatggtagtggctttctgatacctgtgatctggacagccatgctagtctgctgacactggattcagaagggtcacctttcatgtctgggtttccccgacaacgtcaaaaatgccactgttccagctttcaattccatagaacccttgtctattagggtttcaaagctccatgaaaatcattcatattggcagggcgcagtggatcacgcctctaatcccagcgcattgggaggccgaggcaggtggatcacctgaggtcaggagttcaagaccagcctggccaacatggtgaaacctcatctctactaaaaatacaaaaattaactggatgtggtggcaggcacctgtaatcccagctaatctggagactgaggcagaagaattgcttgaacctgggagactgaggcaggagaagttgcagtgagatgaaattgcaccactgcactccagcctgtgcaacaagagcaaaaaaacaagagcaaaaaaggtgtcacacctttccccaagggaagattagcagaagtttacctagaagcaagcactgaggcctctgagtatataacattgccagaacagctctgtcctatatcattctcgagctgggctcagatacaccaacccatgaggcctgggttaattttttgcctagctcagtattggtgtggatgggttgtgccccggccatcattttactacctaccatccaattatagctgtcttctatcttttctctatgtttactctactcttataacaggtttctgcctgtcatcctcacaatgggtaccagatatcaccttcttcctacatgcctgccagagccaacatatacagatacgcagattttgaacttcagaattcagcaaggcaccttcagacagactactcacagagttttacggtgcccaatctacacaaccacacctggtagcgttcctggcctttgtgaaacaatttacatggctttgtgcatataatgctcacaacaatcccattaaggtaggcattattatctaaattctcacaagagaacactaagcacagagaggttacattccccaacgattcacagctactacataaccaagctaagagatatgtctggacaactgcatctgaggctttcaaaaatttttaaagccaaatcagcttttgctcagtgaagcgtaagcaaaaacacaactaaaacagaacaaagttgagcagcttccctctgatttgtcccatcttctcttccttccccaggcccactaaggattcccaagggctcttaaatgatccttggttgctgactttttctgggctagacagaggaatccactgaacccttgtaaggttattgttacaagggtatttgtacagctcttgataatctcctttctatacagtctagagctttctaccttctccctacaatcaatgcttcacgtctcccagttgctggctgcacctgttcaatagactctttttgttgagtttcactgaagccaagataaatgtgcttctttgttaccatcatctcattacaaatcagacagaattctccaagcccctttgaacatgaacatctggaatacagcctactttccatgcctggagaggagcctttgaggatacagatccctctaactccaggcatttggggacccaactacatctctctttgcaccctctcttcttgcttaaatctaaataagcctcttggtcaaaagcagagccatagtgcatcagcaccaagctcctcactaagagaaggcctttttactaattcacagagctcacttaatggtgaggctggttttagcccttgcaaagtacataaggcatggaaacattttcccttcacttggttacctcctgacaacccatagacccaaacagttcactagtctgccacttctctgactctacaggatgggttgggtacccctcggtaaactcagtccttctcgcatcatagcatttaactctctgtcttgtggctctctgcgtatttgttcctccccaactagactcccaactccaggagaaaatggactttatcttctttgttcaacactctacccatgccccttgcactgaa

SEQ ID NO: 1885977 - DNA, 4001 bp, Homo sapiens
aggccacaaacccgtaagtagcaaagccaggatgtgaacccccccaaaaatcatattccagagcactctgttcttcatacagagagatatgactattatttagatcattaattttttaaaaatcaaggagtgaagtcagcataaatgatggaaataaagactaacaaaacttctgttctccacagaaacaaggagaaagttggcaaagattattagaatcaacttttccagaactctagaaattgacctctagaaattgaccaaagacttgtagcaactcaagaagcatgtatttaagaaaaccagccaattctcaataagaacagtaagctttgtggcattttaccttgattcactctcatgcctcactttcctttcctgcagtggccttgaaaaatgacaccccacattcctggagcggtactggagccaccagagtgagcagaatgaagctgtttttaaagcctcattcccaaagatttgtcctttcggaactgtctcgtcagacctgtctggtaatactctggaagactccacatgcaagattgtctgtatttgacctgacttggagatttactggtttctggtatttacagaaatctctgtcctatccttactcaacaaccaagctaaccaaatagagacttcagttgccacaagtaacaaagagtacagactttgtagaattagttcaaaaaaattattaaatatacaaaacagctaaaaaattgcagcaccaacaatatactctggggagggagataatgattttaagaggtgtcacaatgtattattttaagtagtcatcaacagaaattacaaggcatgtaaagaaacaaagtatggctctataataggaaattaagcaactaatagaaacggttccgagaaagtacagactttagtcttactagaaaatactttaaaattggttattttaaatgtgctccaagagctaacagaatgtgtgtctaaacaactgcagtaaattatgaaaacaatgtctcaccaaatgcaaatattcacaaagggatcgaaattacatatttttgaaaaatttatagaaattctggagttaaaaagtacaactaaaatgaaaatttcactataggagctgagcacaaaatttgaagaagcagaagagagtatagcaaacttgaagataggtcaattgatattatctagtttgaagaacaagaagaaagaaaatgaacacagctttggaggcctttgggacatcagcaacaaagcaagatgtagattagaagaacttcagaaagaagggagacagagaaagggatagaaagaatatttgaagaaataacgaatcaaaacttcccaaacttgatggaaaacatcaatctacatatctaagaagctcaacaaactgcaagtagagtaaactcaaagagatacacagtcagacacatcataatcaaactgttgagagaatcttgaaagcacgagagagagacaagtcatgttcaaggatcctcagtaagctgatttctcaccataaaccacggaggccagaagatactggatgacatattcaaagagctgaccaatgtcaacaaagaattctatgtccagcaatattatccttcaaaaataaagaaaaaattgggacgcgggggcccagagctttcgggcaggcccagccattgaaacccgagacgcggggaggagctgtcgctgcgctccgggaggaacgagggcggccctgggcctggccagagcggctccccttacctgtgactcaacaggcggcctcagcctccatcctcgggctaggctggcgccgcgccccgccccggaggctgtccctgtgcccctggcgtcctcctccctctcccattcctccccaggggctgcccccattccccgctccccggccccttcccctcccccagggtcaccacccaagtcttcccagctaccaacccctggctccccagagagtttgcaaagattgtgggctccaccttccctcctgattcgccacccgcaggagaatttactatttctctttcatttgtggggagaagacaccgttaacgcccccaccccccgctcacacgcccaccctcgccggtgccccgggcctgaacgcggcacatctcaaccccctcccacgccccttcacacttctattatttctgtttctttggacaagaatcatttgcgttaatgatttttttttgaaaacgttcaagtttcactccagtaagcttcctagaaggaaggaggaggtgagggaggagagagaaggaagaggaggaggaggaggctttggctgcagctgcggcgaaggcggttttggcgactttggcggcgaaaatttagacagttgaaaaataggccaaagcacactgaacctgcaggacatcccgtaatcttttctgcccatttcaaagtctttccctgtcctcacccaactattacaggccgcttttgctgaaacctgacaatgtcatttagtaaatgttcagctagtattcatttgaaatagaaataaccaacagcaggtaatttcttcttggcctgtttctgcgtgttatccaaggggaggtggaatacagtggtggttttaaaatgccagcagcctaggaacccaaaggcctcagcagcctggcacctccccacccccctgcggctcttaggggccgaaagattgagggtcgtgatcaactcagtataccactggaggccacgtgagtaagcagcaaactgtttctcatgagagcagggtgttggcaaactgacaacctgtgtctgccgcccagaaggactgctgagggcagtcaccacccaggtgcaagtgtttaggattagacacaactgaagcctgttagtaatgagaacttgtgataatcaaacagctgaccagtcttagggcctcctccctgctcattctcccaatgaatgcgaagggctgtggaagctcggggggctgccttcgctcactagaagcagggagctcccttcttcccggtttccccttcctttaaaacagatttttttaatcatttctacgtttgtcctttcgttcagtcctgtaatgacggtctcaagtagtaacaataactgtcgtagtgacggtctcaagtagtaacagtaataactgtcatagtgacggtctcaagtagtaattgtggcagtcagccacagacacacaggactaaaggttcattaatgtctgctgtaaaaatgtagaatatatttcttcaaggtctgaagaagtatacattttttgatgtacgtttttgtcacattttttaaagttctcttgtttttaaaaaataacatgtatagggccgggcgcagtggctcacgcctgtaatcccagcactttgggaggcgcaggcggatggaccaccaggtcaggagatagagaccatcctggctaacacggtgaaaccccgtctctactaaaaatacaaaaaaaattagccgagcaccgtggcgggtgcctgtagtcccagctactccggaggctgaggcaggagaagggtgtgaacccggaaggcggagcttgcagtgagccaagatcgcgccactgcgctccagcctgggcgacagagcgagactccgtctcaaaacaaattacatgtatagtgaacagttcctttaaaatacgtgtgtgtgtgtgtatacagcatatataaagaataatgaactgaaaagttccctgcttctcattcaactatttccaaagtcagtattagtcaaataccttctttccttttagtttgagttttgtgtctcacatgagtaactttaaactactccaaaactagaaaataattcttctaaatttacctccagtacttttactgtcttgattttcagatttgaattttaatccaatcataattcactgacctatatggcataaggaatggatctagctatatctcatggttcccacaccattaaatggtatattctttctgctactaatttgaattatctctttaactatatattaaattctcata

SEQ ID NO: 1885978 - DNA, 4001 bp, Homo sapiens
aaaaaaaaaaagaaagattgatttgccagtgatatgtctgattgattgaataagggagcctggggtcaaaggctgtgagggtggccgccccaggaatgcagggctgtgcaaagcataccaatggtatttcaatgaaaacattgctatttggtatctgaatatggagggtgaggaaaagaattaagacctacatactaataataatgacactaacgatactaatatgaagaagtgggaaaactagtgctatccttgataaagacaaggtaacaggatttagatgggatatctcttagccagcagccaaagggactctatagcagaaactggctagttattcaccacattgttgcattacatgcctttgttcatatatctttgtaaactcatatgaatgtttccttagggtactctcctaaaagagcagttcgtatatcaaaggacatatgcatatacactttgaaaaacttgggcaagcatttttatcttaagtggcaagtcccattcagtgaatgtgaggagaacaggcattctcctatgtcactgatgcaattgtaagatgctacgccttttctggagggaaatttagcaatacggtcctttaaatgtagtcttatcaatgtgcctatctagtaattccatttgtagttttttttaaggaattaatcagacaaatgggcaaagatatttttgtcagacttttggcagcactatatattatagtgaaaaattaggaggaaatctgtgtctggtattagcggaatgattaaataaaatatggcacattcatacaattaaaaatcatgttgtagacgtacatttatggacatagggagatgttctcaatgatgcgtgctacaaaagcagattacaaagcaccaattggaggcaacatgagtttaagatttgctccccactcaggattccaggatcccatttcttttttttttttttttttgacttgtaccatcacacccggctaatttttgtatttttagtagagacagccaggctggtctcgaattcctgacctcaggtgatctgcctgcctcagcctcccaaagtgctgggattacaggcgtgagcctctgtgcccaacctccatttattttttgagtcaagatcaggagaaggactcggctgggtcctttcccttccttcctggcaggatcggccttccaaagtgaagaatggcaggtgggtaggggatctttctcttcaactctttggcacccgttcctgctgactgacactccttgggttttcaaagaagttggggcattttcccctagtattcccagcatggattatggaaccattcctattacatccctgtgaacatctgggtactgaaggaaaggggactcgaggcttcgggcttatagattgcaacttggattggatgtcctggcaccgccccttactccatgctcttgagaatctctgtgtttccatggacaattccactcccatgccaccctccatcgccatcattaggactgaaggacactccatggtcagaactgtatcctttatgttcttatctctttcgtaatttttctaaccatgggattgaaatcacattgacctcctccacgtcctcccctttttcgcttgtgagaatgtcttgaaagtttcctttgaaatctaagaaaactgacaatacccagtgtccccattgctcaatgttagaaaagttctaaaaaaatatattcaggtggtggtggttttggaaaagtacagagggtattgaggacgtgagactgattctctaacaaagagcaggaccaacagcgtgggctatgggttagaccccacttgccttccttttaaatgttgggaaggttgagctataaaaaagcaaaccttggccggcttagattccttgatctttgtgggtcacaccttcctcttgcctaccatcgacagggtacttgctgcaaacatgttgggaggtaattgagacgtaggttagtgaacagtaaggaagtttcattctttcactaaagtagaacttccttacctcattagaacttaagaactcctcacaatgagtaaagtgcataataatagatctgccagggagctggaatttctcttgttgtagaaaaattttattgtaaagaaaagtggtatagtatattcgattgaattaaaaaataactcttgttacatttgttgagaacctagtatatgccagttcctcggatgcacacacacacacacacagttacatattatatgttacgtattatacatcatatgctacatattatatcggatattactacatatccatcacacacacacacacacaaacacacacacacacacacatatatatatatatatatttttttttttttttttttttctgagacagagtcttgctctgtagcctgggctggagtgcagtggtgccatctcggcacactgcagcctccacctcccaggttcaagcaattctcctgtgtcagcctccccattagctgggattacaggcacctgccaccacacctggctaatttttttttgtatttttagtaagacagggtttcaccattttgcccgggctgatcttgaactcctgatcccaagtgatcctcccgcctcagcctcctaaagtgctgggattacaggtgtggccaccgtgcccggcctatgtgatacatattagatatcacatattgcagccaggaggagactagcactgtatttctaatgcctgagctttccttactgacaatttgaccccaaaggttaatggggttgcttttttttttttcttctgcaggggacaagtgggaagcagagctctctagccaaaaaatttccagaagatccattagggcttttcatttttgggatggaaaagggaagaaaggcctggaaagagtcgtgaggatgttgattgctgggttggtggagagcactcagctgcagcccctatggaaaaagattgccggagccagctttactgagtgaggcgggcccagagcagggggaccaagctgacaggtaccagcagttgaccccagcaacacacagtctcgggaacagtagcaacatgagcctgggagggcaggctcctctttgcttgggagttgaaagttgggggatcttttaaaataactcattgcagagaacgaggtgctctttgactgtcagcggacagagttcacagattccctgagggctggatggatgagatacagaaagacagagctaggatctagaaaataccttggtgggcctgagcgctgccatgaggctgacaaccgcatccaggccaggacaggggctggcttagcagccacatgtgtaaaaagtcattaggcacagagaggtacatggaggggaagagtctatgaaaagggctttgaacctcaggaagtgtgacccaagtgctgacccgaggggctgttttgggtgctggtaagaccacacctgtgctttgtggttggcaccaaacagcacaaatgctccctttctcagctgcctggagaccctgtccgctaatcatggctctctctcatttccatctcatcttcactcctatctgccctggatcctcctccacctccttgacttgtcgccaccccctctgaaccactgttgattctctagggccccttctttcccagagctctctgccgtccttcttgctgcccatctgataaacctttcgacatggaagcattggcgtttgtcccctgccatctcccatcccaaccctccagtggctcctaacaacagcaacaatagccaccagttactgaaagcctaacctgtgcccgttatcagtgtggtgcaggtggtggtggggattttaaattgagtcgttcttgggtacctccctcctctcctactccccaccccgccaacacacacacaacacacacacaacacacacgatcagtttagctacttagtgatttccattttcaaaaatcagccagaaagaagaaaaacagatgttttctagggggtgttaattagtg

SEQ ID NO: 1885979 - DNA, 4001 bp, Homo sapiens
aaacaactgtatgctagctgagcttggtgcaaatgacaacccacaccatgcttgcccacttcagaactgtttgcatgcatgggacaattcgtatcctataacgagatgctgaggtccaacgctacaagtctgtttctcagtgaattcacttggagcctcgttctgatgagattcactgtcagagtagcctgagctgtcagtgaatttgactcttttgttagaatgtctttattgaacttcatgataggctctcatgtgaaaagggctgaaaaaattgtggctgctagtggtgctaactgttcaccactgggttatggataaacactgcctggcacctcaagtaaggaagacctgaggtaatatcttgactgctaaaaaatagctactgggatctcaaaatgacacaatgagaccacttttgttttcctaaaaatatccctcttgaaggatgtttgagccatctaggtagcattgtgacatccatcttgcttccagtcccatgatgcaggggagtaccataaagtcacagtggtggattgtgactgtgaagatgaaattttgacagcaacatccactttattctagtctagacctgcctggtaaaaagcagtaccactaggttgtgctagagtataaacatagcacgatgtgcatttcctggcaaatctttactttattggctatttctttctttctttttcttaagaaaaaaaattatctgttctctgtaacttagaagaacatatcagaaatatcattgtgatcactgttgtttgaaaagaagggcctttgaatgacaatattgtgatttttgtaaaggccggaggtagtgaaatgctcagaattatttatacttactcccagataccgcttagtcaccttccaacatctggtgctctgggatgaggactactgctcctcttcagtcttctcattggtgcctcattttctgtctgacttgtcagcactggaaagctcaaggctatctctcgggttctctttcttctcttctctgtgtactttcctagggcatcttcctcagtcacataccatgtgtatgttaagggcaatgatgccccagctatatctctggtcctgacttttccatgaaactccagactcatctctccaggatgaccaaacatttcagccttctgggacagctctgctttatacctactctcctgttataattattagtagggctcatttctctctcagaagatttcagtcatgtcatcctatacatgaggttggtatttaagtcagatcatgtcacttttccaactaaaattctcttataggaaggaaagtaaataattgagaacaataataaaattgactgtatcactaaaataggcagggaacctagaatttattgagtgccattgtgctatgttatttgcatttgttctctcatttaatttaaaattcatctcaactctgttttgtgagtattgctctaggtgatttcagctacagcaaaacacaaccaaccaaccaatcgagaacaaaaatgtaaggctcagaaagattaaaataacttgcttaggattacacagccagtaaagtattagagctgggtttgaatcttagttctctctagtgctaaagctgaaggattatgtgtttgtttttttccaattactttgttgatgtgatggctaatgtgtcagcttgagtgggctaagggatgcccaggtagctggtaaagcattatttctggcagggtgtttctgggagagatgagcattggttcagtaggctgagtagagaagatccactttcatcattgtgggtgggcatagtctaatctgttgtgggcccgaatacaacacaaagacagaggaatgatgaacttactctctcttcttgagctgggacattggacacttactctctcttcttgaccatctcttggttctctggccttcacactatgggacttacacaagcagagcaacccctacccctgatacctcaggtcttcacactcaactaggagttacacagtcagcttccctggttcttagaactttggacttagactgaattctattgggttctctaggttgcagatgacaggtcatgggacttctcacctccataattacatgagccaattatcacaataaatctctctcactggttctgattctcaagacaaccctaatacagttggtaaccaagcatctttcttcatctggcctcagaaacacctttcttttcttttctttttttttttttttaacatgttttcgtgttacttaggccagttgcttagtgatctatcaatggtcatcatcaaagtcttgttgaagagttttcctgtgtgattgtattcattagaattagatttggctatggctcatgggaactaaaatcactattttattcctttttacataaagaaatctggaggtgagtgttctgggggtccacactcatggctctggtttccctccatcctgatgtgatgcatgattacctgccttgagaacaccccgggctctgggatggctgctgggaatccccgctaaaattggtctgttactaaggaaaatggggagaaaccggcagtctgctctcctgaccaacttttttttccctttatttctcagtatttgagaatttgtttttcagaagaagtctgagtgtgtaaggaataaagcctaaaatgaggtctatttggcatctgattgacctacctgtaatttccaattttccctgtgtgactattgtgttgagcaagttttgtaacttctatgacctagatactttacacaattatctcatttaattctcactaaagactccaaagtaagaattatctctatttcacagatgaggaaaccaaggctcagaatgtgtttttagtgcatatcaagcaatgtataatgtgcaatgattaacacttcacgtgtgcacaagaggtattcaaaactcttcttgacctgttttaatcaaaagtttccctcctgatcatcaaatgggacacgtcatccttcatattttttctttttctgggttttcacagaaaaagtaacaacaacaactaagcttaatgtaattagagatgatagaagaacatcatggttttaacaaattcacatgcctgaaatccaaccccaggacctgtgatttggtgatttggattggtgcgggaatctgtagtttagaaaggttatgtgtaactccattagtgagcttctggcacaagaagaataactgtcaagacttgctctgcggatcttagtttggtatcttcttgatttgaaaagtctctgcttattccagtgtttgtgctgtcacattaaactgctatctctgaatttcttgttacactgacattgttaccgttctcctgggtgtcaatataatgtttctactcagaaaatctctctttcaagagatggccctcaccttttcccaggtggactcagttccatttttaaaggtgctgccaagggctttaaaagcaaactctcatttgaggtgctggggagccctagttcatcttgtctttctccctttgcttctctctggagtaaaggctggcagaggagaatgagaataaaattattaaaagtccaaattggcaggtaggatttcaaagaacaaaattaattgtattcaagacacgtctcccctctgtttatgctcacaaaatgctgtctttgcaagaactctgcagcaccacgtacactgttggccctctgcgaatcagcaccaatgacaacattataattacacttcaaaaaaaaaaaaggcaatgagaagttgcatcttaaatttcctttatttggttgctctaggagcttctgtttgagtacagcattggagagcaggtgcagaggttaaaaatatgctcataaaaatctagaacccagtgtctttttgttacattcataataaataagaatgctttcctggaggctcagccattaagggaggtgatggggcaggaaataggagttcttctcttggattctgtttataat

SEQ ID NO: 1885980 - DNA, 4001 bp, Homo sapiens
tgatgtgccaggcactgttctaggtcctgaggatatggtgatgaacaagatccccactctcatagcttacccagcagatgccctaggcaggcaatgaataaatatatgagcaagatgaaaagagaatgccagaaagccctgaagttttggagcaaagccatgaactcttttcacaactatttcctttttgaaaaacatctctccacttgctgttgggttctgttgtttgtgagtgcaaggatggaagaaggcagatgacgatgttaagcagccaaaggggtggactgttcaggccatggagttagtgtagcaggagattaacaataataactaaggctgggcgcagtggctcacgcctgtaattccagcactttgggaggctgagacaggcagatcatctgaggtcaggagtttgagaccagcctggccaacatggtgaaatcctgtctctactaaaaatgcaaaaattagccaggcacagtggtgggtgcctgtgatcccagtacttgggaggctgaggcagaagaattgcttgaacccaagaggcggaggttgcagtgagccaagattgcaccactgcactccagcctgggcgacagagtgagactccatctcaaaaataataataataactgataataatatagaacaattctaacaatatactgtgataaaactgatgtgaatgtggtttctctctctctctctctctctctgtctctctcaaaatgccttattgtactgcactcacctatttttagatggtggttgaccgcaggtaactgaaaccacagaaagcaaaactgcaatgtgggggggctgcttgcatgctcctttcagacctgtttgtgagagagttttaactggagggtatctaaataatcagagagtgggaagagaaaggggtactcactttttatagttttgtattgtttgtgaatgttttctatttcatatgttttgtaattaaagccaaaaagggtaatgacaaaaaggaaaaaaaatgctatgtgtctggcttttgggaagttattagagggagtggaaattctaccacctcctattgctaaatctcattaaagtgcccttgaaatcaacccaaaccaactctcaggcacggccagaacaacggaggcagagcagagctcaggatcctgaatccacaccccccggccactcctggtgggaagagaagaagggggctcgtttcctgtggttcccaccctacctggctggagaggctgatgtggggcgaggtgtgaccaccagtgcatgtaggaggcggagaaggcagtttctcccactggccggtgccctgggcccagcccaggacggggaactaggacaagagcccagccctccagcatcaggtctggcgtggctctgggaggaaggaggaagaaaactcacccatgtcaccccaagtcatggggcatttccagtgagcacatacagacttaggaacccgggagaaagcctggaggctagaaaagctgagaccacagtcagctgggctgcagatctttgctccgccttcctccagacagcacaagtgactcagccctccccagggtgctgcttctcgctctgacaccacgatttggcctcctctcactcacaactctatctcctctctgtgtcattcctcctactcagggccgatagtcaaaatatcaaaccactaataaagcatgggcacctgccagtcagactacacaccagctgggaacaatggctagaggtagcaaattgccccaaaacttagtggcatgaaacaacaaacatttgttacataacacactaatgggtcaggagtttgggtggttctggctcagggcctctcatgaagttgtcagcatgtcagagttggaaccatttgaaagcttggctggggctggaggatcctctttcaaggtgtctcattcacaaggctgtcggcagaaagccgcagtgcctccccagtgtgtgggcctctccatagggctgcttgagtatcttcacaacatggtggctggcttccccagagggagacatttgagagaccaaggcagagtcacaatgtcttttatgacctatccttgaaagttatataccgtcacattgcagcatcctattgggtcagccctagtcaatgtgagaggggctacacaagagtgtaaatacaaggatgcaaggatcactggaggatgttttggaggctggctaccccaggtactatattatgtcctgtttaaaactctctaatggcttcccactaacctcagaataaaatccaaatgtcttaccatgatctgcaaggcctggcatgaactgactcctacctactttccaatctcattatgttcctctttattcacctgcactaaactccaaacacatcaaccctccctacatccatcaacatctgaagctcatcctttacattttctgctccccgtgtctagaagtctcctcgcccagatctttctatggctagttccttctcattgtttgggtctcagcctaacgtcacctcctcagagaggcttcactgaccccttatcaagtgtagccctcaccccacctgtcactctgtcttacatcaccttgtgctgacctcctcctagcactgatctctatctgaaagtaatttatttgattattgcttttctcccttcgtgtactggtaggagtccttaattacaagcaacagactgctctttagctgcttttaagctacagaggaacctattaaaggataggaggtgcctcataaaatcttagcgaaatcagagaaccaggctcaaaggccatttacctgcactggttctttctgctgctgcctctgggatctgctgtcatcctgacagaaaggactccagtcatctgcttctcagtgtcacttagcctcatgcaggagcagccaacgggtggtgtcttaagttgtatgctgtgcccaatcttcaagagagatggggaaaggttctggcttccatcataagcaggtgtgagttcataaggtaggaaattcgcaaaataggaagactgttccatgggctggggaagccaaagagagctgatgctatttggcctcgacagtccacgcctttagctgcttaatgtcatcagccagccttcctccatccttacgcttactaacagcagaacccaacagcaagctgagagatgcttctcaataagaaaataattgggaaaagagttcatggctttcgggccgggcgcggtggctcacgcctgtaattccaacactttggcaggctgaggctggtggatcacgaggtcaggagttcgagaccagcctgaccaacacggtgaaaccccatctctactaaaaatagaaaaattagctgggtgtggtggcacgtgcctataatcccagccactcgggaggctgaggcaggagaatcgcttgaatccgggaggcagacgttgtggtgagccgagatcgcaccactgcactccagcctgggtgacagagcaagactctgtctcaaaaaaaaaaaaaaaaaaaaagagttcatggctttactccaaaactttagtgccttctgctattctcttgtcatcttgctcacatatttatttattgcctgcttagggcacccactgggtaacctatgagagcagggatcttgttcatcaccatatcctcaggacctagaacagtgcctggcacatcataggtgctcaataaatgttaatgaattgtgtacatgaagtcccctctgtggactgatggccaaacctcgccccacatcagcctctccagccaggtgggatggggatggtgggaagcgagctctcctcttcttctcttcccaccaggagtggccggggggtgtggattcaggatcctgagctctgctctgcctccgttgttctggctgtgcctgagagttggtttgggttgatttcaagggcattttaatgagatttagcaataggaggtggtagaatttccactccctctaataaattcccgaaagtcagacacatagcat

SEQ ID NO: 1885981 - DNA, 4001 bp, Homo sapiens
ttccttagggggaaatctactgctaatggaaaaagaagataccccacttctggccgtgcgcagtggctcatgcctgtaatcccagcacttttgggaggccgaagcaggcggatcacaaagtcaggagatcaagaccatcctgggtaacacagtgaagccctatctatactaaaaatacaaaaaattagccgggcgtggtggcgggcgcctgtagtcccagctactctggaggctgaggcaggagaatctcgtgaacccgggaggcggagcttgcaatgagccgagatcgcaccactgcactccagcctgggcgacagagtgagactccgtctcaaaaaaaaaaaaaaaaaaaaggataaccccgccttccatatttttgcatgtacagtattcaaaatgcacatttaatgaatgaactcgtaaatgtgactgtgtgacagagtatgcataagactcaactatatgtccctgttggtggtgctttttacttgtatgttggttggctcgttgcattcacaagaatgtattttacagctgtattcagactgccaaccagaaaatgcaaaacagtgttatgtttacataataatgggtgagtctgagagtaattaaaatgttttcttctgttatttttccacatatttatgaataagatattattccttacatttaaaaatgtaaagaaagttccatgtgatccaatatctgagtgataaatgaaaaatatgatttttaaaatgtttctcaaatacctgcatattttgaaatatgaaaatgaaaaataaaaactcaccagtctgactaggaggaaatatcctgctgcctgtgttggctggatgtgggcagcacagatatttgtgtgtccgtccagggttgggcctgcagggaaccaaccggagacaaaaaacaattttactttccttttttttttttttttttttgagatgggggtctcactgtgttgcctaggctggtcttgaactcctgggctcaaatgatcttcccacctccacctcttaaaatgcctggattacaggcgtgagacactgctcttggccacactttcctctttactataggaaaacaacgtaaaaggataagattgatgataaatgggcttggtgatattgacaaaaaggggaagaggggctacttttgcctggaccccagccctgtgtacactggtcagggcttctccctgcatgcagaatgccagcccctattcaagagacatggaaaggccatgacatggatattgttttagagagagggagagagagatggaaaacccagatttctctgtgaactcttccaatctttttgacaagtacttcaaatttttaaaatactgtgggagcctcacaaacatttttgtgtcctgtctggttcgttggtcaccagtttgcgccccctagatgcgcactggatcagtagtgggtttgtcatgttctgaagctctcaaggctgctttgaagcctcagtttgtcgtgtgtgcaggcgaggacccgggcaggtgggtgagtcccgcttgggcgctgcctgggtgtgctctgctccagcatgcgtcggtcgagagtgagtgagaatacgtctgtgagcggtcaggtgaaccgggtctgacctgcccaggtaaggtggtggaagaataggaaatggccctgtgaaaaaaaaatttctgctaattggtctccagacgcctgcagtctcccccagcctcttctctgggaccaggcagccacccacctgctatgaccagcccggggaggggacgggactggctctggtgtctcttctggtccgggcacaactggattcagcactaatgacggactctaccccagcggagcgctggaccctggcaggagtcgcaggctgcccgctgctggcccgcggaccggcaccccctcccccaaagctgttgccatggccacaggggacatttgatgtgaagcgcggctcccccctctccactcgctttctccgctcgccttcaggatgacgtcatgaacatccgtggccctgacaggccacccgtgggttggtctcagctttaaagcagctgttctcctctggcccggcagccgcggcgactgtgtttgcacccggcggaccatgccaggactacggacccggacaggactgatggcctcagagaggcaagtattcaaggggcacttcacaaacagcttcctcaaaccccaccccctcccccgcactgcgctgctacttgcactgcggctcctggggggaagcaaagtaccggcagctgggtggtgaggggctttcttccagaaagaaacggagagcaagtggtcttcctccctagccgcggcgacccatgccaggtaaaaatcccagccgaggtccccggtcccgtcccctcctccaggtcaagggctcgggactggagaagcagccaactggagctgatattcgggaagctaagcctgaggctgctctggagggccggagaagcgagcggccaggcttggcacccgccaaatgtgccttgccaaaatgaagaggaaggaaggcgactccggagcccagcaggtgagcgctcctacgggatgctgggcaggctagaggtgtgggggcgtctggttccagtacctgcccggggcgacgcggaaacccagcttgcagtttgtttcgctcggtcccgcgcccagtaggagaaagacggccccacagcctcgcgggagccggctctcgcaacccagccgccccaagcccgccgtcgcccctcctcccgcgcttctcgcccctgattctagatgcagctgacttgttgcatgcagaagagcagctgggttcggcgttccaagcctctcctctttgctttgcctgccaccagatctgagcgccaggctggccagcacccagagagcccagagccgcaggaaaaaatgtgaaaagtaccaggagaccactgggtaatcgccccagtgcaaagggcctttcttcctacccaccgcaattgcagcaaataactccagggaggggaatcagaggcgccggggattgcgccctgggagagccctatctgctgaaagagagcgcctaatgccgttacttcccagtgtagcctttccactcggcagaccaagcgcctctccttcgagtcgctacccgcttggagtcggctcagaatcaggctgctaaaggtccctggagcccctcccccagcgaatccgagcctgcagcttcagcaccagaggctggacagcgccccggccctagggtgcccatggtcggtgcctgcgcacggctcggcctcccagcccacgccacttgcgctcgcggcccctcagaccccacgcggaggaggtcaggaggtgacacaggttcgcggaagaaagcgggactcatcttcctcatttctccagggatttaggtgtgggattctaggagagcattctctctcgctctggccacgaccagtggaaaaacttggcgccaaatttaggcagtggtgcggggagcagaggcacgattgcaggcggtgagcaaaggggcaagcgggacagaggatctactgtgagccccaggctctggtgttccgtgaaaaatcgccacatttaaatcctgcgctcccccgtgctccctctcgctctctcccccttcctttttcccttccttccttcctccccgcgctctctgtatgccttaataggagtgagtgaaagggaaagagtggggtggagggagaagatattgaagccgaggtaagaagcacattttatctaggtctcaaaactcaagcgtggatgaaatctgttcaaaaagaacatcaaggtacgcgtttttttacccaaaggagcccaaagtgacctttgtatgaggagcaaagattattgtttggccaagaaggggaaagatagcggagggagaggcgctatcacaaaagggctaacggaggtggagaaggaagggaaaggacttggcactagcatgcttaccaggcaaccagtcgcagcacctgcctcctgttgccttgg

SEQ ID NO: 1885982 - DNA, 4001 bp, Homo sapiens
ttgcattcacaagaatgtattttacagctgtattcagactgccaaccagaaaatgcaaaacagtgttatgtttacataataatgggtgagtctgagagtaattaaaatgttttcttctgttatttttccacatatttatgaataagatattattccttacatttaaaaatgtaaagaaagttccatgtgatccaatatctgagtgataaatgaaaaatatgatttttaaaatgtttctcaaatacctgcatattttgaaatatgaaaatgaaaaataaaaactcaccagtctgactaggaggaaatatcctgctgcctgtgttggctggatgtgggcagcacagatatttgtgtgtccgtccagggttgggcctgcagggaaccaaccggagacaaaaaacaattttactttccttttttttttttttttttttgagatgggggtctcactgtgttgcctaggctggtcttgaactcctgggctcaaatgatcttcccacctccacctcttaaaatgcctggattacaggcgtgagacactgctcttggccacactttcctctttactataggaaaacaacgtaaaaggataagattgatgataaatgggcttggtgatattgacaaaaaggggaagaggggctacttttgcctggaccccagccctgtgtacactggtcagggcttctccctgcatgcagaatgccagcccctattcaagagacatggaaaggccatgacatggatattgttttagagagagggagagagagatggaaaacccagatttctctgtgaactcttccaatctttttgacaagtacttcaaatttttaaaatactgtgggagcctcacaaacatttttgtgtcctgtctggttcgttggtcaccagtttgcgccccctagatgcgcactggatcagtagtgggtttgtcatgttctgaagctctcaaggctgctttgaagcctcagtttgtcgtgtgtgcaggcgaggacccgggcaggtgggtgagtcccgcttgggcgctgcctgggtgtgctctgctccagcatgcgtcggtcgagagtgagtgagaatacgtctgtgagcggtcaggtgaaccgggtctgacctgcccaggtaaggtggtggaagaataggaaatggccctgtgaaaaaaaaatttctgctaattggtctccagacgcctgcagtctcccccagcctcttctctgggaccaggcagccacccacctgctatgaccagcccggggaggggacgggactggctctggtgtctcttctggtccgggcacaactggattcagcactaatgacggactctaccccagcggagcgctggaccctggcaggagtcgcaggctgcccgctgctggcccgcggaccggcaccccctcccccaaagctgttgccatggccacaggggacatttgatgtgaagcgcggctcccccctctccactcgctttctccgctcgccttcaggatgacgtcatgaacatccgtggccctgacaggccacccgtgggttggtctcagctttaaagcagctgttctcctctggcccggcagccgcggcgactgtgtttgcacccggcggaccatgccaggactacggacccggacaggactgatggcctcagagaggcaagtattcaaggggcacttcacaaacagcttcctcaaaccccaccccctcccccgcactgcgctgctacttgcactgcggctcctggggggaagcaaagtaccggcagctgggtggtgaggggctttcttccagaaagaaacggagagcaagtggtcttcctccctagccgcggcgacccatgccaggtaaaaatcccagccgaggtccccggtcccgtcccctcctccaggtcaagggctcgggactggagaagcagccaactggagctgatattcgggaagctaagcctgaggctgctctggagggccggagaagcgagcggccaggcttggcacccgccaaatgtgccttgccaaaatgaagaggaaggaaggcgactccggagcccagcaggtgagcgctcctacgggatgctgggcaggctagaggtgtgggggcgtctggttccagtacctgcccggggcgacgcggaaacccagcttgcagtttgtttcgctcggtcccgcgcccagtaggagaaagacggccccacagcctcgcgggagccggctctcgcaacccagccgccccaagcccgccgtcgcccctcctcccgcgcttctcgcccctgattctagatgcagctgacttgttgcatgcagaagagcagctgggttcggcgttccaagcctctcctctttgctttgcctgccaccagatctgagcgccaggctggccagcacccagagagcccagagccgcaggaaaaaatgtgaaaagtaccaggagaccactgggtaatcgccccagtgcaaagggcctttcttcctacccaccgcaattgcagcaaataactccagggaggggaatcagaggcgccggggattgcgccctgggagagccctatctgctgaaagagagcgcctaatgccgttacttcccagtgtagcctttccactcggcagaccaagcgcctctccttcgagtcgctacccgcttggagtcggctcagaatcaggctgctaaaggtccctggagcccctcccccagcgaatccgagcctgcagcttcagcaccagaggctggacagcgccccggccctagggtgcccatggtcggtgcctgcgcacggctcggcctcccagcccacgccacttgcgctcgcggcccctcagaccccacgcggaggaggtcaggaggtgacacaggttcgcggaagaaagcgggactcatcttcctcatttctccagggatttaggtgtgggattctaggagagcattctctctcgctctggccacgaccagtggaaaaacttggcgccaaatttaggcagtggtgcggggagcagaggcacgattgcaggcggtgagcaaaggggcaagcgggacagaggatctactgtgagccccaggctctggtgttccgtgaaaaatcgccacatttaaatcctgcgctcccccgtgctccctctcgctctctcccccttcctttttcccttccttccttcctccccgcgctctctgtatgccttaataggagtgagtgaaagggaaagagtggggtggagggagaagatattgaagccgaggtaagaagcacattttatctaggtctcaaaactcaagcgtggatgaaatctgttcaaaaagaacatcaaggtacgcgtttttttacccaaaggagcccaaagtgacctttgtatgaggagcaaagattattgtttggccaagaaggggaaagatagcggagggagaggcgctatcacaaaagggctaacggaggtggagaaggaagggaaaggacttggcactagcatgcttaccaggcaaccagtcgcagcacctgcctcctgttgccttggttacggtgggtggcggggctttggccactgataatcagtgagcaccttgactatttaaaatatctcctggggagcccctgccttgtctgggctaggtgagaggcacatcgatcccgcgtaaggccccgtctggggaaatcctggaagatgtttgttttttgtttgtttgtttttattttaagtaaaggcgcatagcagagcaacttacctttccaccactacagtcatcccctcccccctccaccccatggcttcatttctccaggatttacaatttgggcttttatatttttcatttagtcctttatactgaaggagctgagttcctatccccaccctctctttttcccccttaaaatgagaaaaaaaaattgcttttcctggatgtacaggagggagacaaggaaattgtccaggggtgtctactgtagagagaaactttctccctggtttgatagtcatccctgccccactaaaccactcccctcaggggagagagggctgaat

SEQ ID NO: 1885983 - DNA, 4001 bp, Homo sapiens
aagctttcccttgggtttgctgcccctgggccagggctgtgggtgctgccctctgggggttaagccctgaaccatggtgctggggtggccacctgcagtacccccacctccatgccacccctgtgatgagggagtttctcagacactttgcccataaccaaaggcatggcatgcccgagaatggcagggaagggggtggcaggccaaggagccaggagagcccctgcggaagctctgtaggcctgaggctcccagctttccctcccgccatccaaccccgatgccccatgggcctctcagcccctccctgtaaccggaccattgctggtgtcccagcagcccttctcaaggtctgacctagacggggaggggagagggcccttcccactgcggacctccctaccctgaggtttgcctctgtccccagtcctgccccagggccctgggtctcccctgatcctgtggacagccctgctctcctgcctagtccagcccacacagccgtcctgctcccagcaccatccaggggacctgaaagacatctccatcccctatctgaccaggctgccctgactgatactgtaagtgccagccccagctgccctcaccctgataagcgggtgacagacaggcaggtgtccagggcacggggagttcttgggcagaaagagagctcctgggaatgccacaccaccacaccacagtggctgtcagagagtgcgctgtgtgtgagtctctgtctcctcccagagctaagtccagtggtgtggggagaggcaccaagcccaggctccacaagcttccttgctgactcgctgcatggcctcaggcagctaaggcacctctctgtgcatctgcaaagaggcctcagcgggatagaccaaggctgcacaagtgagataaggggtgcagagaggacccctgggagaagaggctcaaagcgtatttgataagaattttcgggattccctcttttcctctgggagaagggaagcacttgcagaagtaatgccctgctgggggatttccggacccggagatgaacctgtctgctgcccaagcccaagtgccggtcccagccttgctccctgtgtggtatggagcagactatgggggctctgaagggcttcctagggccaggttggggagaggggcaccttccctaggcccagactgccctcctggccttcgtgtggcccttggcagagctgagcactccatgggcacctaagtgtccaaattaggctgcctggaagggaacatctcagagactgcagacccccagcctgaggggaagtggccttccaagctcttcacatagaggagccaaaatgccaaccttcccagctgttctttctatcctcctttctccctctccccacaccatggggcctctccctgttggcagctctgactcgagaggcctgcctctgtttccctcctccactccctgggggtgggggtcccccatgcatggtgaagcctaggatgaaccaagccctggcaactggacaccttccccctccgcagctgtctcccctcccactgctgtcctggactcaggtcttaatggagcgtaaacagccaggcagacggaagcctcattaggcctgatctaattaggagcccctgagatatgggggtggaaggcagaggtggaggagcgccccatttatgagggcctactgtccacaagaaatgtcacacgcatatgctcttagaacccttcccacaaccctccaagataggcatgagtatccccaggtggcatgaatggaaagcggctcagagagggcaggtgacttacccaagaccactccgccaacaggtggcttccctgggatgtgcaccctgagtgtctgaccccagtgtctagttcttcccagcatcccagctggcctcagcctatcaggctgggcaggacctctgacatcctctgtcgcaggtttgtccagctgctatctgaacccacagtgctgggacagccacagccccgtttctggctctctgtgtctctgggcctcttctctctcccagcaccacctgactccacagtgggtcaagatggtgggagacggggtgtggggccagtcaggctctcagcctcctaccacgcccactcctcatctgtctccttctgtaattggggagggtgtagggggagcccatgcagtgccaagaggccggccgccccttcgttagtcttagctaacaagctgtttatgggtgcgacatgacacctgctttcttctttataacttcaataatttataggcatattagtggacaagcagccgccctgggtcccagccagacgggccggggtgatgcagctgggtgcctctgctgatatttactctctcccaccatcaattattaaggagccctccttcgtttttgcacataattacatgcaccgttatggttcaaactcccctgctcttaatctctctggagagggacccagcctacccaacagggctgagatggcatggggacccatcagctggagaagaaggcaggcagccaccctacctgggcgagaggtggtggcagcctcagcctcgcaccccactctcagctgagctggcacctccttggccagcagcggccttcctcagggctggctgtctctcccctccatcccagggcccagcctttgcacctgctgttctgcctggagcaccagcctctaccttccgtgtacctgactgatcccaactcatcctttgatttcagctcagccattgcttccttctggatgtctgacctgcctgctgtgtgtgtgcagccccacccccacttctcccacctcagcctggatcacactaggttgagtcttgcctgccagaccatgggctttggagcctagagaaaactgtggcaaatgtttggcatttgatgaatgaatgaatgaatgaatgaatgaatgaatgaggagatgaatggatggatgcctccacctgtctcaccaccaatgagcccactgaagcattcgccttcaccctcctcccccaggaagcctctcctgtttgctccacctcctctggactcctccagactctcctggtctgtgctgagattccccagtgggcaccaaggcctggtctccgtctatgtccccaacaccaaacagaggacaggtcagaatggagggagggtacatcctgacaatctcagctgtcagtgtgacctggggaagttgctcaccctccctgatcctgtttcctaactgctaaatgaggataataacagtccctactttacagggtgtgattgaggcttatataatttgtaaaagcacctagtatgtggcctagcatgccagaggtgctcaagtaatatccttaacctcacccgttgtctgtccgtgatttgagcccatgtgaaattgaaccatactgaattacgttggattgaattgtcttatttacgccttctctcgtccacacttccttgtttttagtctcccctgccatgtagctgggaccaggcttggctcacagggtctctgcaaatattccaggttgattaatcaagactttgcgagtctctcaagccacacctatctagggaaaggagtgagtgtctcccaagtcacagaaaaataaactgaggccagggagataatgtggactcctccaagttaatgacagagtgaggaaccaagtcctggcttcctgctaggctggaaagcccaggaatatctccctggattctgtgtgcctcagtttccccactgtaagatgagatagtaatagaagggagcccatagcgttgctgagaggattgagcgggttgctgagtgagtggataacacacttagaaccaccgtgctgctcatggtgtggggttcaaagtgtggggatcaggataggcctgactctgccacctccccttctctctccctagaggtgacagtcctctggaattggtgttaatcactgtcctgcgtgttttaatacttttcctatatttgtaggtatccatattcagtttat

SEQ ID NO: 1885984 - DNA, 4001 bp, Homo sapiens
gcctcaacctacctaccatctcctcttgccccatccagaggtcatggaagctcccgttgaggggagtcgggcagggtgggtgcaggcagcatcctgggcaggagtggcccatgaggattgggaaagaatcagagacagcatcctctcctccagaccatgggccctggaagggtctccaagactctctgggtcagcacagcccttgtccacacagggaaactgaggcccagcaaaggtagagggctggcctgtccctgtgtgagatgtgggccatgctgtctctgtttgctcaggccccgctgggaagggcaggagggaaaaagaagcagagggtggggcgatcagtaggggaaagaggacaagggtctagggtgctgtgaggcacacttcaggctgtttacccagcagtgtttgagccctcgggccagagaaggtcttgccttctgccctctcagggatggtggcccaacccaggaaacagatagtgtctggcgctgagtctcattgggggcttcaaatgaactggcaaggcactgtcattcccatttcatagatatccaaactgagacccaaagagaggcctgcctctgggaggtcttccacagctgaataccctcagcgaggaggctctgcttgctgcctgaggcagagctgggagtagctcctctgggagggtgggcattgggggcagcttgtccccaggacttcccagccttccctgtttgttcccatgctgtccaagaacttcttctgcaagtctgaccacagtccctcctgctttaatttcatcccaccactcatgcgagatcttgtcaatccaaaggtctctctgtccctctgccttcttggtgtggggtgggtctgggggctcaggcactgtccctgcaacctggctggctcctgagggcaagggatgaagctaacccatcccagcctgcccacccaggccagtttgaaaatcggctcgcctttgcccagcattgcaattctcatcacagcctctgcccatctcatttctgttaaactcatttgccagctgaaggccttcattttccactctgtttgcccataatcaccccctgaccctgtcctgtctccccaaactctccctgcagtgcccagcactgtgatgagcaggcagccaggctcaggcacagccgcagccctccatccatccctcccgcctgtcttgggaagaggcctgtgctccaggcagggatctcatccctgcctctgtgcattcctctactcccaaaccagacactgggaaaactacagacagactctcagcccttgaaggctactcaccctccactctctgcctgtccacccaggccaggaaggcactgttctaaacactgtgcatgtatgaagtcccttaattcatccactagcccgaatgaatttctaattggtgggagtttaaggagaaatgttgacaaagggaaactgagggagcaagaggcaaacttctccctcctccagggctccatccctgctcccacttggtacagagaatagagcccagctgttgctgcaaaccatgtcaggcatctgctgaggtcgcctcgggagagcaagggagactctgctctccccccagggctcaccattctcccatgagatgcctgcaagggtggggcttcaggccaggcaccctcccctccggatctcagagcacccctgagaaagtcccttggcgccgagtatcatcacacagactgtgggaggaatcagaagtaatgtcctctgaggcctcggcacccctccacgtcttaccatggctgaacctccgcctggccccctggacacccttgactctactccaggctggacatgcccgagggcccatttctaagcctatttaccatgagcctcaaacgaaccctatagagtgagtggagctgggacaaggatccccattttgccggcagggagatcgaggctcagagaggagaagtaactgtgccaactcctcctcttcagaatggtctgatgatctcttcctggagcatagtgtagggaagggtttattgcattctaacaaggactttcactattttaaacagaagaatgtgcaataatggtacgattccaggccccgcccctttcctctccaccaggaggtcttctggttcccagggtgccctctgctggaggaggctaggcagctgctctaggctggccccaccccaccccaccccagcctctcccgccccaccagctttcaaggtcaggctgcctggtaatacagtaattgatctgggagacttccattataaatctgccagctggccaggtggcacgccccatggtccatcccatccagccccccatggtaatgaccactcctctgttcctgtgtgggaaggtgactggccactctttgcttctccccatccactacccctgtaggcaggagcccagggactctgaactcagacagaggtgacatggttctgaactgacctcacacttcaactgctgtgtggtctcaggcaaactacatgccctctctgagcctccatgtccacaactggaacatggttctggtcagatggccttaaggatccactgtgacaaagtgggaaccgaaagagtgtccattgtgatgagggctcccttgagacctctgcttgagggtccttggatgggggagtcctaggtagggcatgattgcacctgtctctctcagcaagtcagggaagacttcttagaagaggtggcatttgggctgggtcttggaagatgacaggactccctaaggtttgggagtggggacagtggtgcatggtgttctggggacggcaggaaagggtcctgtacagagccatgaccagcccagagcattagggttttttccttgcaaatctaaccccatcaagccctgcttatacgcttcagtggctcccattgccctacggctgaagtcccagctccctgaggaagcttcagatctagtcccagccagcttctccaggcacccaagccactgcccttgcccccagggctccaaccttaatgaatttttaaaattctctacaatctgtgacctttgcaccaagctgctccctagtttgactcaatgaccacaataaaattgaatcctgtgactagataaaatctccactccactctattccagggcccacgggccctttgtgatctgcctgcctccctttcccctgctcctctcccactccgtcctcgctcagtcttagctcctctgttgccccccagatcttcacattgctggtttcatcatgttcaggactcagctcaagtgtactcaacctaaagtagccttcaggtgacagtcatcctggtttgcccagaaccgaggtgtctcctaggatgcaaaactcttagtgctgaaagcagacattcccagacaaatggggatgattggtcaccctcatttctttccagtccctactgccaggcctgcctgctttcttttcttcctctttcttttgttggaagtcccagtttgtcagtctgttattacttgcggatcggctgccttcccctggccttgagctgctggagaacaagcctgcatctgccagttcagcactgagtcccccttgcccagaaccacgtgcggtgagaacggtgctcagcaccagcaccagagcatgcctggtcagtgtttgttgagcgaatgggtgaagtgtgtacacagactgtttcactgtggacctggcctctcctctcctctctgggcctcagtttcccatctgtactacaagggtgggctttgggagtcccagagagggctctccaagccccagtgcccccacatgcaggaagtgaagagaagagctactgcccagctcggtgtgaagggctgggcatgcgccggactccagggtgggcagggcagggcggccctgctgacggggaagtgtcacagtcctcaccttcctagacatcccgccgtcacctgagggccatttctgggccaggccgttggtccagaccccaggttgggggcatcc

SEQ ID NO: 1885985 - DNA, 4001 bp, Homo sapiens
aatacacacacctttttctcaaaaagagatgattctgaaagttttccagcaggaaacatctctaatgtaactggagttaatgaatgatgacttaggtaaaagacactttctatccatgctgccatgccagcctcctggtccgccagggagagctgtggcctgcagcccaggggtcatgagggtgagctggcccaggaggaccacgtggaatgcttcacaagattgcctcagatggaagggcatggtatagaaggcaaatcagaggaggagtgacattttctgtggttataaggaagacaggtgaggccgagagcttgaagaagggcttgcagctgtcctgacattaaaaggcttgttcattatgggggtcatgaagctgtttctcatcttgcttgggctctttgtggaggacagatgtgacaccctcacatccttgaggctggcgtctcagattttttggtggcgagtccctgaggcccactcgagtgagccaaaggcaggagcccatgggatacttggccaggacccacatccctggaacctgggctgtgtggggccctagactaagatctctcctcgaccaactgccagccaggctcctctgagtcctcttctcaacaatacctccacgctggcctataaagacttcagctaacactaacatggcatctagcaactcatggccacatccctaggatgacaccagccccccttatagtccctacctcaggaaactcaagaccgccaaaaaataccctgttccagccaatccctgcagctacggcccctgtctcccggcctctgtgggacatcaggagctaacttcgaccagagccagttagcagcccagtggggccggcccctccttcctgggctttgcaatttctcacttcctgactccagcaagccttccctcacccctccctcctcccttggaaaaatccactcacctctgtacacatccaagctgacttcagttcacactgtaacctcttccccactgcaacggttattactgtgaaaaatctctcctgaccctctcactactgcctggctttgtttgtctttgacactctgggttcaggtaggacagggtgtgcccggccacagccccctcagtaactccaggctggcccacttcctgccgtgtgtgaggttttggagtggcaagtttgttctgctttgtttcatggttttcagtccctcccaatatcccctggcctgtggtcaccacagtcagcccaggccagcaactgacccaggctggaggttaacaccacggagctgcccacacgtgtgtgcccgagtccctgcccatgcctcagcaatggtcacaggcttctcacctccattcagcccccctatttggggccctacctttagccagctagccaagtgctcattgtaacccagtatttgtattcattcaccatagaaaatttgtcaaatgggtaatgcatttctttttacccgcctcttagtgactgggcttatgatcagaatcaagtgctattttgtggccactggcccctcattggccccttcctcaaacccatgctggatctggagtgaaatgccctcaggttgacccctgctcggagcccaggccaggtgagaccggctggtgggtgcacttggagatcacaccccagctgctcaagggacactttgagctagagcaacatgcatcagtgtgcacagagcccttcctgtgcacccgcactgcaactagagctttctaagaattgtctcactccatccccaagaattgtgtggctggggggatatgctcacccacattttgcagatggcagagagtcttgcagagctgccagcgttcctgaggctcacacagccagccatgttggggcggatgctccggcctctcgtctggctccagagcgaggcagcgccttgcagcacattcccaacaatttcctcattgggaggcttcctaggaaaccagcctccctgcatatgtggacactgcgatgcatcagccctatgcctgcttcctcccaagctgaaggcacccactcatgaaccgcccttgatatgccagggcatcttacgctgcactgggttcctatttatgtgtaaccacatttcactacctaaacaatgcctgtttattatctcatggttctggtagatcaggactgtagacagccttgagccgagtcctctgctgagagtctcccaggctgaaatccaggcatcagcacaggctgcaggctcatctgaggctggggatcctcttccagctcactggtgcttggcaggatccagctgggctgtaacactgaggtctgtatattcttgctggctgtcagccaggggtcactccaagctcctagaggccactctcacatttggagagtgtcaatcaaaatatgactgggcagcggctcacacctgttctcccggtactcatagaggcagaggcaggaggatcgcttgagccaggaattccggacttgcttgggtggcatagggagactgtctctacaaaaggaaaaaaaaaaaaaaaagagcaaaatatggcagctgacttcctcaaggccagaaggaggatgtctattgctgcctcttgtctcctttaagggatcacccgattaggtcaagcccactcaggataatctcctttttattgactcaaagtgaactgatcagggaccttcactacatttgcaaagtccctttttgcctgttcacactgaaaccctgttgtcttcacaggagtatcccacactcaaggggagatgctattcagagtatgtacatgagggtggggactttgggaaccatgttacaactcagcctaccgcactccccattatcaaattctcccagtccctcttcctgaggccaaacctaatgctggaattcctcacccctccctggacctcagaatagtgaacttcactctcacttaaaaacaaggacaactaaatgacagacctggtattgtagaaactcaggagactgtattgccttcatgcaccaactggtgacaggaatacgtggatctgtgagtcaaaagggtacactccacttagactcatggaggacgggcaccttctccccacccaggcccagctccacatcgttctcacactgtcactgtcagactgacctctgcccattcaaagcattgcacataagcttgggcatagcttgcttgcttgtgaggactgaagtttgtccagacagatgaggctttgctcaacaccttggctccaaccatgtcacatggatcctcctccacattcagcattgcagattggctgaattccaaatgcctcacaactagggcaaaggaaaggcaggccttctgagacagaagggagacagtgagttatcacagggcagctcacgtaataggtatgagccatccatgagagtggttgcccactcctagagaacagagggaaacggtgaacaagaccggactcccaacttgcactattcaacaagaacccacgagaactgtgccgcgcttaattgagtattcctgcctccccggcagccatcagctagcatgcaactttaatctgtcctattaactgatgtctgcatgtggtgaaggaagaaattcacatggttcagaagggccatcagtgaaatcacaggccttctcactccactgaggtaaccactgtccgtagcttctggctccagttcttctgtgagtttccatttatgtctttttcaagtaagtcctgagagatttccccagctttagcttccagatttgcaacttggtgttcagccatttccaatttattatcctgctctaacctttggctcatgtttcatttatcatgtttcaaaattccaagaacacattatatttctctaaaactccttttacacagcagtccattgtcattttaaggctgtatcttcctgtagtgtgtgtgtgtgcgtgtggtgtgtgcgtgtgtgtgtgtgtatacacagtcacttgtcacttaacaacagggatacactctgagaaa

SEQ ID NO: 1885986 - DNA, 4001 bp, Homo sapiens
agcctgtgctcttaaccttttgctttacaaactctcaaacaggtgtaatatttttgcttttatatattcttatcttatacttaataattgtatttatatatttattcatttataaacatgtttgttatatgtttatatttttaacatagtttatacagatttatatattttatatattttttatacatccatttaataaactagcattaactgagcacctaccatatgcaagtactatgctaaatatctaaatactaaggaacagcgacaagtaaacctattattatacggatgggaacggaaaagagaactagcagtgaataagcatctgctatgtacggagaagtctgctaaagtcttcacccacactatcttacctttttttgttttgtttttgtttttgtttttgttttttttgagtcttgctctgttgcccaggctggagtgcagtggcacgatctcggctcactgcaacctctgattccagggttcaagcgattctcgtgcctcagcctcctgagtagctgaggttacaggcacgtaccaccacgcccgactaatttttgtatttttagtagagagagggtttcatcatgttggccaggctggtttcgaactcctgacctcaggtgatacacccaccttggcctcccgaagtgttgggattacaggtgtgaaccaccgcacccggcccacaccatcttacttaattctcataacaatcctatgaagcagatcctatgaagaagcttttccagataaggaaacggaggatcccagactctaacctgcaaaacaactatgtacagattaacatcgagtaccttcaacttttctcagatagagaaggcccgggacagcaagtggaggctggcttctctgggagggagcaggtacagagaggtggggacagcacccaagattctgcttggcgatgttctcgcagcatctgtaactttgatctgccttctcattctctgcacaaacgcatgcaagatcacataggagggaaaaaggagaaggcttgagttggatcatccacaccaaagtccagagcactagggagccagcctgtctgggtccaaatcctgtctctccctctttcttggagcatgccccctgagcaattactcagtctttctgtgccccagtttcctcttctgtaaagtgggaataagtgtgcccattcaagttgactcctgtgaggattaaacaagtgcaaattaaagcacttagaacagtgcctctcacacttcaggcgcttgcggagaggggatgcttcagtctgacagaagtcgctaaacgtgcatcctggcagaactgtgccagcccttcattctaaagggcaggaggtggcctcagaagtgagaggtccgagatgcctgggcgtgggctcagaagccccaggtctgagcctgcgcgcccacttgacccaccgccatctccttttgccgcccccaggccagggacctgattcctgcgtgaagaaaagagaaaataagggtgggcctcctaatgccgcagagactccgtctgagaacccagcaactagttttatttttgtatatttagatcaacaaacgaagagggtttccggttccttgttgggggagcaccgtagctacctgcggccaagcctcgtagccgtctcctctcccgtcctctctctgcctgcaggagccacgggcccgcagcccgcaatcaagtcccacagagcggagatctgcacgagaggcttggggatgggagggccatgtcgcgggggcctcaccggtctccccagaagcggggagtcccgagttggaatcccggcttggcccttccctctgtgtgcgtcctcgggcaaatcacccagcatccctaagccacagtttgcccgctggtaaaatgggcgtcacactccctgcctctcccggaggagagaggctgacgcggacatcgcaccaggcactgcgccagagcgcgcgcccaggtgcggggtcttggggctcaggcgcagcagccgggcccgcagctgctggcgtcatcgcggagggcggggccgcggggcggtgctcggggccggggacggctgctggagcggcgcccgccgcggctcagcgcattcccgctctccgcttccctctccgctgcgtccccgcgcgaagatggcaaccgaggggctgcacgagaacgagacgctggcgtcgctgaagagcgaggccgagagcctcaagggcaagctggaggaggagcgagccaagctgcacgatgtggagcgtgagtgcgggccgggaggcgggcggggcaagccggaccggctcgccacttcccgggcggggacggcgggggcggtgggggcggtcgtggctgcgacgggagccaggcccgcgccaccgcccgggagcagggccctggggcccgggcgcgcaggtgaggcgcgggtagcggtcccgatccccgggacgcgcggcggtggggccctcggagggtccgggcacctggccgacccccgccgccagctagcggaggaccgcgggactagctatcctcatcacctgcctggaagctgcgaacggatcgcgttcttgcccctcccatgcggagggcagggggtggggtgtcggtggtgacgagcgagcgcggcgagcccgtgtaggcgcggcctaggagagactcctgttttgttttttaatgcccgtctggctttctccatcactgttgtatcttttctcagttttgcttttatgagactgcaatttcaaagctcatttttccaacctctcccctatccttggggcggggagctggatgacggagagagaagggaaacggaggagctcactaaattcaaccgttcagttcgtttaaggctgtttaaaaagcttttggatcgatgtggtggattggcataaaaaagccatagcgatcttaaacttgcattcttcaccaccaccaccgtaattcagaactggctctgtgatttttatgagtgagcgattaaatagccaggttcagcggctcttggccaaaacagcgttcctttactttgtcagagggctcctcctcagcagagcttgggctgggggccaggcttggggaagtggttgtatctgctcacttttgagctctgagggtggcatctcccctttgctgagcacctcccacggtgccctcctgcacaccttgacgttgttctcctgccattcctaatcgatgccaccctttacattctatgtggaatggaaaaatggggttcgtgctagggcctttaccttttgatctctgaagatcacttaagagaagtggatgacctggatctagcgtgtgctgtgctttcctaggggtcttctttaaataggaggcactctaagcttagaaatcctgtccagcaatcactaactgtaaaccccaaataatgtagttatgcaaattgagagttacttttcttacataacaagagcaaaggtggatgatcacctgctgttgttcagctgcaccatgcaccccccaccaagggacccaggctccttctgcctttcttctccacaccttagagcagtggcatttgccccatgattataatatgattgccacagctccaaacatcacttctgtatccaaggcaggaagaagggggaatatggacaccaatctctctttgctccctatcaagaaagcaaagcaaaagttttcccagaaatccttctcccagtttgagaccagcctggccaacatggtgaaaagtattcataggtcatctaatttctccatttgacagatgaggaaactgaggcacaaagaattaaaggacttaccgaaggtcccctgctaagtgttgggacccggattccccccaggcaatcagagtgccagctcaggctcacttcagattattttcgccaaacccgttttgagcttcatgcagagggcgttctccagaaactcacttattcaatagtgcaggctgcatgcctggatattttcaggttttctgtgaatttgtaagttgccttaagaca

SEQ ID NO: 1885987 - DNA, 4001 bp, Homo sapiens
ccttcatatttccttctgtagcaaatctttttcaaagtcttcatttgacgtggctgatggagctggtctgcagatcttgcagacgtgttaatttttgcacggactttagcttcaacacacaaaacttacggcctctttgaggaaccaatttttcaggctaagagaacaaatgaaagtgttcgctcatctttcgaaaactatttatgtacttggtatccggaatgtgacattggttttacacgtcggtaggtttttgtcctaaatttctgggaagttacttcctcatctaacgttttattttcctgacttattcgtctttgatatgctacagaaaacccctctcgcccagtggctgttttctctctgtctcttaagataatttaggaacagaagccttgacttttgacggtcatttagttttattctcctcccgtgactcccctctgtacactcacaggggaggccgccggcatctgggctgaaagaacccttggcgggcgaggagagcagggtgtcatgttggcgacaggctcctgctggcggccagcgagcccgccaggttaacgggggcgccggggtcagcgccctcgaagttgggggcctcgggcggggccgccggggagccacgacggccgctcgaccagagcatcccgcagtcccgttccctccagaggggaagaatggccgaatctggcacgatcccacggagatctcgctcttcccagcgcagtctccgctactgagcgcgggaccaacgcaggcgatgccgggcggccgacagggaaagcccagacctggggcagagaaggaatgaggggccgccagccggggggatttcctcccgctcttccctctccaacgggagcggaaaatgtgatttgctgtgcattccaggcgcggttccctggggtgacctctcccagccggcccgggcggggggagcagacaaagaggcgaggcgggcggagaggggaccccgcggggaagcaggaggggtgcggggggcgggggcagtaccgggaaagggggcggatagcgggtctggcggcggcggcggcgcctggccaatggagaggcgcggccccgggcgccgcgctctgccgccggcatttaaacgggagacggcgcgatgcctggcactcggtgcgccttccgcggaccgggcgacccagtgcacggccgccgcgtcactctcggtcccgctgaccccgcgccgagccccggcggctctggccgcggccgcactcagcgccacgcgtcgaaagcgcaggccccgaggacccgccgcactgacaggtgagcgcggacgcacccggcagggatgtgagtgggcggagggaagagggccgcaaaccaacccaggacccgctcagttccacgcgcggcagccctccgtgcgcgcaggctcgggtgcgttgttcgcgggggtgaattgtgaagaaccatcgcggggtccttcctgctgaggccgcggacaccgtgacctcgctgctctgggtctgcagggaaacgtaggaaaaaaagttgtcaggagcgggcaggatgacccccacatcccgtttccacctcccggaggcccccgaacacgctcctggtgctggtggcagcagcgcctggcagacgcgcccgcttagcgagggcgcgaagtccaggccgccagagcgcaggagcatccggacctgctagtcggccgctgactgcgcggcgagttgccttgagagggtcccatgtgcttggggcgccgcgctgggtctgggggcgtcttggggcgcccattggagtccgcgggttggagcatccggagaatccatgatgtgtgcatttgccgatccccgaggtgagatggagactggcaagggcagagccgctgtgttcagccacagcggaaaaccgaacggtgggtaatccgacagctgcggtgcggggcgcggccctggccgcggggtccagcgaacccgcagtgctcacaaggcagacaccacacgcgctcgcggaccggccacgcactcgcgggcgctcgcttctctactccagcctcttccccgccccgcgcacgcccgggctgaatggtagacgttctggcgccgggcagcggccaccggctggttcccacttccgcgcgcaccccttaaactgtgttctagaggccccagcctcgccttgcagcgcctcactagctcctgaggactagggactggcggctgaggcgggttggcggctgcaacgagctgggcgtctttcgttctctctcgctgcctggctggctccgctggcccctccacagcttgcggagcaaggccatagcaggggagtgggaggtatattggggctgtcacctccttgctggccggagttatttgtagactacagactccggaagaacagacgcgccaccgctctcgcttggcattgccttcggatcgcagctcctccttgggggtgccccagcttggcgtttatttgcctgcgccaggctctggcgacggtcaccgggccaggcggggagggacggacggcaggtgaccagcctctgctgtgaagaaattcctgcgcgcccggagctgtccctaatgcattcccgggtcgaatccgtctactgccttcccctcctcgaccgactccgaatctcggctcttatagacagaaatacagcctcagcgttaggggttaaaatccccctcttaaacggtccgagggcagagaggtgaccaccgataggtaattggatctcctgctggaaagagcaaatctgagcggtgtgcgcgtctgtttatgttccccttcgagatggtgccaggacacgaactgattaaaacaatctattgtgttaagtgggtcactagggttttaagctgtcccagggaccccagagtagtggcttccttctggctgtacacacaagttaaataaatagcgtagaagaggttaagataaccccattctagggtgaggagtcctctttcatccctagggcttccccctccccttttctctttttttggaaggagggggagcatgagagtcttgagggggggatgtacttttcaaagcaaggagggaaagatcttaagaaaactatatattctcactgccccccaagccaagtctataacagtaggtgatttgattactatctctggataaatggcactgtcaaattgttaatattaactatttcagggatttttagcagggtagtggcagtatgtgtgcgtgtgtgtgtgtgtgtctgtgtgtgtgtgtttaacctccaggtcattgtaggaattagagtcttttgtaaactttgtaatttcacaggtttcctattttcttaaaagttcatttttagtgaaatgttttggtaacccacgctctgtaggaaatccaggttggctaatgcggtctttatgtgagtagttacacagggaaggataaaaaccttttatgtcctacatctctgaatgagggctgcctaccctgtctttgaaactaagccgaagatgccttcagtctgaatggtcaagtattaaaagtgataaaatgcaaagaaatttcatgccgcagacacctcccccaagaactgcttgttgacagcaaagctgtggaacatgttccacaacagagagtaaaggacagccaggaaatataaaccttttatgtaaaggaaaggcaggtgggggacagtggttaggggaggtgactgcagcctctaaccaaaaggcaaccatcaggcaagtgctaccagcccgtgtcttcgatctgcaaggaattttctttagttttaacatatgctcttagaaattcaaagtacaacaggaattcctgggacaagagaaatctttttattcacatgtgaacatgaagatacaaaatagataattattttatttatagcactcttcaaattgtattgcattagaaaacatatccattgacccactgttaaggacagcactgggtgtcaataggacagtggttaaggacctgtgtttggggctagatagaattgggtttaaact

SEQ ID NO: 1885988 - DNA, 4001 bp, Homo sapiens
tcaaaacagtaacagttagcctggcgcagtggctcactcctgtaatcctaacactttgggagtcagagatgggagaatcacttgagcccaggagttggaaaccagcctgggcaacatagagagagaccttgtctctatgaaaataaaaaaacaagaacagttaataaagtttccaggagtagcttagataatcccagaattgtatattaggagaagggttatttttaaatattctaaaatttataattggaatgcccataaaaattgcctatgagtagagtcatcattatgtcagaaaaatttatgataattatttaggactgtgcttttgataagtatgtatgctataactacttaataaagtcatgaaaaataatttttaaaatataaatgttacttacatatcccagtttggagctatccgcaaatactggattagcaattagaactagaataaaaaatttaaatataaaaaaagaaaaaattaaaatatttaactcacacaacacagaaagtgacagcaaagttaaaaactcagatctttataaaaaggaaatttatgctgtataccaaaaatgatatttactaaattacaaaggcacttgtatatgaataagattaaaatagaaactaagaacagtacttttagtttctcctaccactttatattctctaaatgactgcccttacctgatagacacacaccaactatcgaaaaaagtaaccttaatactatcctgggagcaaatgaacttaaattttttcaagccaattcccaaatgagggcccactacagaaaacacctctgaaccaccgtaattcctttctgaggatgactccaaaaactctgccaatcgatgctaaacatgagcccaaagaaacaaaaaacaaaaaaacgctgacaaattcccataagcttaccaatggaccaagattgtccaaaacgtaatattcccagaggataggaaaaaaatgtcttagggggttgatgtctgccttcaatgtcacagcagaaaccttgcagtttaccagatgacccagtaaaggaaccaacacccacaacccattccacatgggcagttcattccagtcactgatgagaagggaaaaggtcttatgatatcacgttttgttttgttttgttttgagatggagtttcgctctttttgcccaggctggagtgcaatgccgcaatctcggctcactgcaacctctggctcccaggttcaagtgattctcctgcctcagcctcgccagtagctaggattacacgagtgcaccaccacgcccggctaattttgtatttttagtagagatggggtttcaccacgttggccaggctggtttcaaactgctgacctcaggtgatccacccgcctcagcctcccaaagtgctgggattacaggcatgagccactgcgcctgggctaatttcacatatttttttttttttttgagacggagtctcgctgtcgcccaggctggagtgcagtggcacaatctcagctcactgcaggctccgcgcccctggggttcacgccattttcctgcctcagcctatatatttttttaaaatcttacaagttaacataaaatggaaatctaagtattacaaacaacaacaacagaaagttcaaaatcaccatctactctcatctactttaagacctaaggattaagcagacgataatttgcataaacctaaaatcatgataaatcagttttttcatggtagttaaatcaaattgctattttagcacttgtttgagcctctataaaaacatacatttaaatgcataagtcatgtcacagaggcctaccagcggggaaaggagaagcctggtggccacctcctggtgaccagccaccatgcacaaatagcaaaggagattaaacttggctcaggaggtccccgagctcttctcactggagtcgatctgcgagcacacttgttacaaaaagtcattccaatcttggtctttcagaaattataacttatccactgccaaggaaagaaaataacagaagtatgatgatgagaaaaacaactgctggaaacattacatgagaaacacagaattacgacaactaagatgaggataaagaaaacattacactgtcaaaatcaaaaatactccaaagatgacactacttctatttgtccttctatatttcccatctctttatctacacatggaaactttttaaccacttcaatggaaaactatgctttcaaataaagcagatgtctaaagcagaattgtcccacaacctagactataacaaaatgtaaagttgaatacgactgaagtaaaagacaaaagagcctttgtataaataaatcaactctcaaatattgagaaaagcacaaatcccagttattaaaaagttccaataaaatcactgtaaaaaaataacgaggataacatgatagctaaaatcacctgaaattttagctccaaatccctatacaaaaaaagggcaaaatctaggaaatgtgataccccctaaaattaacatatttttggctgatctcaatctttagacaaaagaaattgtaaatataatttcctaaataaaccaaagaagaaaaaataaatagtatttccaggtaataattctctaggtttgcataaatagacctacttggcactgaaagcactattaatattttgcttcactttggtctttcaaaaacatccttcacaggtttttttggttgtttttatcggtaattaggttgactgatacaaacccttagctagtttatttaaacctaaatatattttaaatttatttcaaatcatagattctaatctagccacaatgaataattttccccaaattgagtttaacagcttaaaatataatttgttaaaaaaaaaagtttaaggtatgtaaaaatttctgactttcaccctaaataagattttcattagctcaacagaaatgtaataattatcccttaagtatctccactcccacaccatctccacagtcatgaaccacctagtcccgttctcaaatgtcctggtcccgccaatagaatcccaatccttccttgttgtccccaaccctgtgcacctacacctgccataaatggtggaaattcaaccagctctatgaacggaagggaggaggccccccacccactctacaggaaaacttgcccagatctacaggaacctccccacacacaagaggacagggcagcccagactcatgtcaacagctggcacaaatgaattacagattacttacaattcacataacactgacccaagaatataaccaattgtcaagacaaaataaatttagttattcacatacaaatattccatttgtgaataaatttcatattcgtatctgtatacagacagtctacatgttcgataagtcctttatgatcctacctgaaaatgctggtagatgcaatatttttggatcaaatttaaccgatggtggttgtttcattatctgtggttaaaaaaaataaaaccttttgagacaatttttgagattgatatgtctccttatatgtcccttatatcagataataaatcaatgaggacaaaaaaagaatgtgtaaaatttgttaccaaaaacaataagaacgatgccttttcagattaaaacatacaaatatagataatttattttaaaaaatcatttcaattgatatctgtaataaaataaagcttcaaagaaaaaattcacccctatcttggcttactctttagataatttacctctaattagaaattcagtcattcaacaaatatctattgggtaccgtgccaaggtaaggctctatgccaagtgctaagggggatacaaaaatataaaagacacaatcctattttcagagagctgacattctggttgggaagatgagacaaacatttgataaacaacaaaatatttcacaattcaaaagaggcaggacataactacagacaaaaccctggacagaaagaattttttttttttgtaaatagtag

SEQ ID NO: 1885989 - DNA, 4001 bp, Homo sapiens
agcagccgcaacagcaagtaccagtagaacgagggcagcacatcacccagggtgaccagcaggtcctaggttacttcacatgccctctgcccagtcccttgagaattcctgcagcagcaaaacataccattttccaggcactgctacagggagtcccaagcatactgatacactttcattcacttatttcaaaatatttgtcagtatctagatatacacaagacactgtctaggcaccggggtggagtgttgaacaagacaattcacaatccctgttccaatggagcttgtagtctactgtggaaagagaaataaatacataaaatgccaggtggtgatatatgctgtgaaaaagatcaagtagaacaacggggtttggaaattacagggtgcccatagtgttcttttctataagttggtcatctcaattcagactagccaatcttgaagcgctcaatagctacagtggctggtggctactatactagatagcgcaacaaatctgaaactatcattcatgcctttttagttcataatttttatcctctttctttctgaatcctaagagaattcatccaactgatcttcaaattcactaactcagcttcctaaagtatccatactctactgcaactactgaatcatttaattcaacagtcatattttacatattcagaggctctttcttcacagctcctgagcaacaaatgcctgctctgacgatgcaggaatatcctctaaaatcttgggactttgtcttggactttatgttctctcccatctcctacagctactccatctcactggagacgttttgctctgagccatcagaaggaacccccatttttaagatcctaagccttctcatcttcctggtaatactgccctatatgctcaatcttttagataaaaatctactcgacacatctctgagaaccaagttgggtaccatcagtaatcacacaggtcacaattcatttattttaggccccccaaaaaaggaaaaaattagacttagtggcattttactagtagctcagagatccaacagtttgcaggaaatagagatggaattgtaagcaagggaaatacagtgaaattatattaatctccacccagacactataaggacagctgggatactatcccagcaattggctactgcagtgaacggcacagagaggaaagtttccaattcctcttaaggctccaaataccaattggctactatagtggacaacacagacacagaaaatgttccaattcctcttaaagccccaaataccacacaaccagcttcagctctacaaaataccctctccttacccccttttaacctccttcaggacctcttgctatttcccctaaaaagtcttggttcttttcacctacactgactcttgagcctctcccaattcaagggataaaactctattaccaattaagtgtaatacacattaacagaataggtagaaagtaatctttcatacgaaaacactgaaagccagaagaatttgaattttgaattataagctatgatttaattaggaaatacattagctgtaacaaaatgttggacagactacaagaaaacgggaaatgaacaagtcttattcaaaaacaaatgaaataatgatgagtagggttcacgagccttgttaactctgctgtgccattttaatgatggactacattgtaaatgagccgctatgtttaagcctaaaggtctgttgaggtgatagttttcgaacaatttccacaatcccacaaagaaaaatcaagtgaaggtcaaggaaagccgcatgttctaaattacggaatcaacaacagtatttcttgtcattaatcacatttcagtcataaaagacattacctcaacaacaggtgtattttcctggagctcagttgtgtgaaaagccagtaaaccaaccacccaagcaacgttggcccatctgtaaacggagagaaaacaggctctgaagagtaggtactgaggaaactaaccccagctagttacataatgcaacgaagagcattagatgtaagactgtgaaacaaaaattgaatgtgacaggtcaggcccacactccccattctctgggcatctacacagcccagagaatctctccctcatatacacagggagacacgaactgtaatgactgcggcaattctgcaatagcaacaaaatttaaacaagttatggtgtaatagtaaaaggaaaaataaaattttttaaaagccttaaccagagaaaagagcaaaacagtaattaatcattttatttctgagtacagaggcatttggctaaaggtctcttttctaattgttagtagatcagtgagtttctatgtaagtgctaaatatctgaacaataacatacctgtatgcattaagtttaaaagaaacttttacaattaaaagtgtttaaaatattgtactatttccataaacactagtcttaatgaggtgttcctttagtgtccagcagaaaactgaatttgataaatcactattaataaatcacagtgtgatttgaaaaggtatttcatgcagaaaaattcgttttgaagagattttttctaattgaaacaaatggtgagttgatgagaactgcactcattgagtgatgtctgcatgttgtctggggtaatcagtatgtaccttagcttttattttttaccttcttaaagtaaacccatgtgtggccaggcatggtggctcacgcctgtaatcccagcactttgggaagccgaggcaggcggatcacaaggtcaggagatcaagaccatcctggctaacccagtgaaatcctgtctctacgaaaaatacaaaaaacttagctgggtgtggtggcaagcacctgtagtcccagctactcgggaggctgaggcaggagaatgacgtgaacctgggaggtggcgcttgcagtgagccgagatcacgtcagtgcactccagcctgggtgacaaagtgagactctgtctcaaaataaataaataaataaataaataaataaacctatgtggcacccatgggggaaaacaaatcagactcagagaagtactaccgggaaaaggtctgctttatcacaactctaacatacggaaataattcttagaaatttcaacacttattaaattgcccattaaaatttcttaacatatacaaattaaagaagtcctaggcaattggagagttagcatcccacctccaaataaaaagattataggttaaaagtaatcattttgaaaaatatctgtaggataattggaaaagccatcctaccaccacaaccccccaagtagctgggactacaggcgtgcaccaccacgctcagctaatttttttactttttgtagagatggggtcttgttatgatgcccaggctggccttgaactcctaacaaacaatcctcctatctcagcctcccaaactgctgagattacaggcctgagccactgcacctgcctatctctttccaaagacaagctcaaaatacttttgaaacactgaaccatttttcaatctataaaagtaaataatggctaccagatttaatcaactaaaataaaaatctaacaacatgtcagttattttccctaatatgaccaaaacaattattattagaataagagaaaacacactacctaaaaaccctatacttttaaaatagaaactttaaatagcttatgaatagtcactttttaccaaaatcctaaatacaagtaccacatgccccatagacaacaccctcacagtacaggttccttctcaaaattcaggttttctcaggtcaccactccaggtgcccccagtgacttgacactgtacctcagaaccaacccatctccatgacggcatctaaggcaccactgtctaccaaaccttcgtgcactgacaaatgtcccacatctgcactgttcaatccagtatccactagacacatgactatcaagcacataatatatgacacatgcaagtgaggaacaacaaattt

SEQ ID NO: 1885990 - DNA, 4001 bp, Homo sapiens
aaactttgaggaagtataactaaattaatacacagggatcagggttgaagtattttataaccaatactcaaaacagtaacagttagcctggcgcagtggctcacgtctgtagtcctaacactttgggagtcagagatgggagaatcacttgagcccaggagttggaaaccagcctgggcaacatagtgagagaccttgtctctacgaaaataaaaaaacaacaacagttaataaagtttccaggagtagcttagataatcccagaatcgtatctatattaggagaagggctatttttaaatattctaaagtttataattggaatgcccataaaaattgcctatgagtagattcatcattacatcagaaaaatttatgataattacttaggactctgcttttgataaatatgtatgctgtaactacttaataaaaccatgagaaataatttttaaaatgtaaatgttacttacatatcgcagtttgcagctatccacaaatgctggattagcaattggaactagaataaaaaatgtaaatgtaaaaaaagaaaaaattaaaatatttaagtcatgaaacacagaaagtgacagcaaagttaaaaactcagatctttataaaaaggaaatttatactgtacaccaaaaatgatatttgctaaattacaaaggcacttgtatatgaataagattaaaataaaaactaagaacagtacttttagtttctcctaccactttatattctctaaatgacagcccttacctgatagacacacgccaactatcaaaaaaagcaatcttaataccatcctggaagcaagtgaacttacatttttttcaagccaattcccaaatgagggcccactacagaaaacacctccgaaccactgtaattcctttctgaggatgactccaaacactctgccaatcgatgctaaacatgagccaaaagaaacaaaaaaactctgacaaattcccatgagcttaccaatggaccaagattgtccaaaaagtaatattcccagaggataggaaaaaaatgtcttagagggttgatgtctgccttcaatgtcacagcagaaaccttgcagtttaccagatgacccagtaaaggaaccaacacccacaacccattccacatgggcagttaattccagtcactgatgagaagggaaaaggtctgtcttatgatatcacattttttttttgttttttgtttttattttttgagatggagtttcgctctttttgcccaggctggggtgcaatggcatgatcacggctcactgcgacttctggctcctgggttcaagtgattctcctgtctcagcctcccaagtagctaggattacaggagtgcaccaccacgccctgctaattttgtatttttagtagagatggggtttcgccatgttggccaggctggtttcaaactgctgacctcaggtgatccacctgcctcggcctcccaaagtactgagattacaggcgttcattccagtcactgatgagaaggtaaaaggtctgtcttatgatatcacgcccggcctgatttcacatattttttaaaaatcttacaagttaacataaaatggaaacctgagtattacaaacaacaacaacaacaaaaagttcaaaatcaccgtctactcttatctactttaagacgtaaggattaagcagaggataatttgcataaacctaaaatcgtgataaatcagttttttcatggtagttaaatcaaattgctattttagcacttgtttgagcctctataaaaaacataaatttaaatgcataagtcatgtcacagaggcctaccagcggggaaaggaggagcctggtggccacctcctggtgaccagccaccactcacaaacagcaaaggagattaagcttggctcaggaggtccccgagctcttctcactggagtcgatctgcgagcacacttgttacaaaaagtcattccaatcttggtctttcagaaattataacttatccattgccaaggaaagaaaataacaaaagtatgatgatgagaaaaacaactgctggaaacattacatgagaaataaacacagagttacgacagctaagatgaggacaaagaaaacattactctgtcaacaccaaaaatactccaaagatgacactacttctatttgtccttttatattcctcatctctttatctatccatggaaactttttaaacacttcaatggaaaactatgctttcaaaccaagcagatgtctaaagcagaattgtctcacaacctagattataacaaaatgcaaagttcaatacaactggagtaaaagacaaaaaagcctttgtataaataaatcaactctcagatattgagaaaagcacaaaccacacagttattaaaaagttccaatgaaattactgtaaaaaaataacgaggataacatgatagctaaaatcacctgaaattcctacctccaaatccctataaaaaaagggcaaaatctaggaaatgtgatactccctaaaattttttgctaacatgtttttgctgatctcaatctttagacaaagaaattgtaaatataatttcctaagtaactcaaagaagaaaaaggaaatagtatttcccaataataattctctaggtttgcataaatagacctacttggcactgaaagcactattaatattttgcttcactttggtctttcaaaaacgtccttctacacaggtttttttggttgtttttatcactaattaagttgactgatataaacccttagctggtttatttaaacctaaatatattttaaatttacttcaaatcatagattctactctagccacaatgaataattttccccaaattgagtttaacagcttaaaatataatttgttaaaaaaaaaaagtttaaggtatgtaaaaatttctgactttcaccgtaaataagattttcattagctcaacagaaatgtaataattatcccttaagtatctccactcccacaccatctccacagtcatgaaccacctagtcccgttctcaaatgtcctggtcccgccaatagaatcccaatccttccttgttgtccccaaccctgtgcacctacacctgccataaatggtggaaattcaaccagctctatgaacggaagggaggaggccccccacgcactctacaggaaaacttgcccagatctacaggaacctccccactcacaagaggacagggcagcccagactcagctgagaaatgtcaacagctggcacaaatgaattacagattatttacaattcacataacactgacccaagaatataaccaattgtcaagacaaaataaatttagttgttcacatacaaatattccatttgtgaataaatttcatattcgtatctgtatacagacagtctacatgttcgataactcctttatgatcctacctgaaaatgctggtagatgcaatatttttgcatcaaatttaaccgatggtggttgtttcattatctgtggttaaaaaaaaaaaaaaaacttttgaggcaattttaaagatggatatctgtctccttatatgtcccttatatcagataataaatcaatgaggacagaaaaagaatgtgtaaaatttgttaccaaaaacaaaaagaacgatgccttttcagattaaaacatacatatatagataataatttattttttaaaatcatttcaattgatatctgtaataaaataaagcttcaaagaaaaaattcaccccatcctggcttactttttaggtaatttacctctaattagaaattcagtctttcaacaaatatctattgcttacctgccaaggtaaggctctatgtcaagtgctaagggggatacaaagatataaaagacacaatcctattttcagcgagctgactttctggttgggaagatgagacaaacatttgataaacaagaaaatatttcacaattcaaaagaggcaggacataactacagacaaaaccctggacagaa

SEQ ID NO: 1885991 - DNA, 4001 bp, Homo sapiens
ttatcagaattaagtaggcacgacactcatactttcagaaaagcatttgcagccaggggagtaacgtggcactcaccagcatgatatctgttttgccaacttgctgaggaacgagtaacctgaaatgaagaagcgagaatctcatcctcagccccccaacagcttcctcagcttctttttattctgagtcactccctgaaacagtcgctgcatctaagaccagcctcgggctaaacccagctggcctgaaggctcaactcacatcaaacagagctgggagttgcttttgcgtgtgtccgcagtttgaagtgtcctctccgaaggtgaagtggaggaagcaggtgcgctctgggatgaagtgcagggaggcaaactctggctgggttcctgtaaacatccatggcagttgcaaataatgagaagccgaggccaggccatcggtgtgacgctgcaggcagatgaggtcttgggacgccccttgcgttcccccttctgtgggagcaggtgccttcccaatctcagcactcagtcccaatctctcttccactctcctgggtccaaacaggaacctctctgttggcacgaagcttttgagggtagcaggcaggcctcggaggcaggggagggtctcctcctggggaaccatccccgtccagatggtgcccccaaccagctgctgcggcgccatgatctgggcggctggtccagggcgtgggttgcggatcgtggagggaagaggggaacggcagtcgagaccctactccaagtacccatcaaagacgtcgagctccgagtcagcatcgtaaaggcccgagccggggtcggagagcacgccgaggtccacgagcgcctggtccatgtcctcgaacaggaagacgaggcccacgttgaggacgatgtactccatgaggaaggcgtagtacaggatcagcacattgacgaagaacaggcccacgtagaacatagagggcagcagcggcggcggcacgtaggggaccagggggcccagtgcgtccaggtgggccgcgacccgggcgccgagcatgcagccggtggcaagggcggcggcggcccggcgatcccggcgaactcagccgctgtggcgcccgggccgccggcgagggcacagcgcagccatccaggggtaccctggagcccgacagaagcagggccgggctccagatgtcccctggcaaatgcgccccgacccccgaaatgcgccgggcgggtcaccgcaccccgagatgtgcccccaaggctctttcgaccgccctgaagtggcgggcccccctgaagtggccggcggctgcccggctccctcgaggcgcctccctggcgctcgcagggcctcgcagagccggcggggatcccaccgcggctcagtgtctagggccggtcccggcagccctctctcccgcccggccccgcaggtcctagcgtcgccctcccccccgcgcccctgcaggcccagcacccatggctgcggccgcggcgtcgccctccgagtcgcgctcagagccactgctttatgttcaaaactgaaaagcatagatgatacacattgcgttgatactctctgacaagctcgtttgcatacatgtttatattccttggctttggattcagaatgataaactgcacctatagtagaaaataaaatccagttgttaattgttaaaatatcaagagaccttgcttatgttatataaatactccaataaactgatgctgtcctagtaaaaaacaaaactattgccctaactgtatggagttttatgatttctttctccaatgtaagcctttttaataccatgccttatctccgttttcaaaagctcttttcctgccaaaagccctaaaaatagctcatgtccccagaggcttcaccaaggtcacctcccctcttcttttcaagaagctttttccaaatcaggagttcttttgatctggagctaacaacccagaaggtgtcagggacagggtccctccaggttcctctctgctgaaagcccctgccatttgggaagttactgtttcaaatccagaattcataagaataattcagaaagctggattgcttctgaacaacattggaagttgaggcatcttacatctcacatgtccacaaccaccaccaattgcaccattcctaaccaaacacttcacgtcctctcaataaagttgctagattagtctcatttcttaaaaagctgttttttgacaaaatgggagaaaattttcgcaacctactcatctcacaaaggactaatatccagaatctacaatgaactccaacaaatttacaagaaaaatacaagcaaccccatcaaaaagtgggcaaaggatatgaacagacacttctcaaaagaagacatttatgcagccaaaaagcacatgaagaaatgctcatcatcactggccatcagagaaatgcaaatcaaaaccacaatgagataccatctcacaccagttagaatggcgatcattaaaaagtcaggaaacaacaggtgctggagaggatgtggagaaataggaacacttttacactgttggtgggactgtaaactagttcaaccactgtggaagtcagtgtgtctagatcctcagggatctagaactagaaataccatttgacccagccatcccattactgggtatatacccaaaggactataaatcatgctgctataaagacacatgcacacatatgtttattgcggcattattcacaatagcaaagacttggaaccaacccaaatgtctaacaatgatagactggattaagaaaaggtggcatatatacaccaacgaatgctatgcagccataaaaaaatgatgagttcacgtcctttgtagggacatggatgaaactggaaaccatcattctcagcaaactatcgcaaggacaaaaaaacaaacaccgcatgttctcactcataggtgggaattgaagaatgagaacacatagacacaggaaggggaacatcacacaccggggactgttgtggggtggggggagggggagggatagcattaggaggtatacctaatgctaaatgacaagtgaatgggtgcagcacaccaacatggcacatgtatacatatggaactaacctgtactttgtgcacatctaccctaaaacttaaagtataagaataataaaatttttttaaaaagttgctttttggtagtttatatgtaacactgtagttctatatgtacttgcaaatagctatagtaccagtaaaaaatgtgataaaatgaaactcacatatgccaaaaatactttgatttagcgcttcattaagtgcatgattatctgcatcttttgatttacctatctttacaattttcagctgagatacttagaggtcacatagtaaattaaggttttctttttttaaaataatctccatctttctaaatttggtgagtccagtaagttatttttgagatgttgaaatctgtggctttgttctaaacttgagcacagaaatcatgccacttacgaaatatgctttgtcttccaacatcagagtgtctggtagaaggtgactgttcttggaatttaaaaaatcttaacaggaaaagacaagaatctggacactttttctgtttctgataatatggctgagtaggtagacatgctggctagtccttgcatagatcaagacatacttgaacttgccaaaaaaaataaaaaatccagagtctctaagaatgaagatgaagtgaaaatcagaagggctattgagagagtaatggggaagcagccccagttatcaagggacgtgtgcatgtgttcattaaaaagtttcagatgtaaaaaaagttgagaaaaataatgtaactgccctacatatacacatcatcaacaatttttcattcatggcatggacagttttttgtttttgttggttttttgttgtttgtttttaaaggtgggattttgctgtggtcgcccaggctggagtgcagtgtcatgatcttggctcactgc

SEQ ID NO: 1885992 - DNA, 4001 bp, Homo sapiens
ccgtctccccggggttcaagcaatgttcatgcctcagcctcccatatagctggaattacaggtgcatggcactacacccggctaatttttgtatttttagcagagatggggttttgccatgttggtcaggctgatatcaaactcctgacctcaggtgatctgcctgcctcggtctcccaaagtgctgggatcacaggcatgagccacagcgcttggcccactcactcattttttataaagtaaaaacgggagaccaaaaaatctccttacatactcctaaaagcaaataagaaataaaccatttactctacttgcaggttcatcttgcccagtgttttctttctaacagaggcaacaaatggagttctgaaaaatttatcccagattgccttctaggaaagagaggatggagttcgagcattagccatagaaaggcttggtttgggtctaggctctgtgacttttgagcatgtgacctagaagttaagttgtcaaaatcacagcatgtaaatctttgtaaaaattaattagcttataattttaaaataatgcatagtcattagggaaatacaaatcaaaaccataaagagataccatttcgtatccactagaatggttataataaaaaaagattaaaagtattggtgaggatgtagaaaaattggaactctcatacacaatggtacattcagctttggagaacagcctagtagttccttaaaagattaaacatagagttaccatatcacccagcaattccactcctgcatatatactcaagagaattgaaaatctatgtccacaccaaaaatttatacatgaatattgataaccacattttattctcagtagccgaagagtggaaacaatccaaatgcccattaactatagatggataaacaaaacttagtatatctatacagtagagtaatattcatcaataaataggaatgaagaactgatccttgctacaatatgacgacctttgaaaacagaagccagttacaaaagaccacatattatatgtttctgtttctatgaaatactaataggcaaacccatagagacagaaagattggtggtttcctaggactaggggtttgggagaaatgggagtgacaccgaactggtacaaaatttcttttgggagtgacgaaaatgtcctaaaattgaggtggttacacaaccctgtgaatatactaaaacccactgaaatgtacacttaaatatgttaattgtatggtttgtgaactatatctcaataaacaaagatgtaagctgccaaaaatgttacacaatacaataggacacgaactggatttagatcggcaaaccgtagaacctagtgaggaaatgagaagcccagcaggaaaacgggcggaccccagagaagggcttagggctctgcgctcccctgcatgcaccggcctacttaccgagatggtacttctcttgggccccacagacacctgcttctccccggatcgctattctcgactatttgcgtttcgcgaccggcctgcccctcctctttcccgctctgcccaggaaaagcgagccctcggaaggaacctgggcagccccagaaagcagtgcccatcactttccagctccatccacccagcagcccatcaatgacctaaatatgctgtctgttccacccagtcctgcccggtagttattcagcgatgagagagtaggaagcttgagctccaggagtgtgccactttcccggccctccgtggcttcccagtcccggacagagacctgagcaagccgaacccgggtgcctggctgcactgggctgggaaggaggaccgggcggccgcaggccagggagggcaattggagagagatagaagcagagggagggggaggcagaggagaaggtactcgacgatggacgcgcccaggctgggggcggcgcccacagagcagagccaaggtcacgaagcagagcgtctgcgtgcaaactcccggaactggataggctaaaacactagcttgtcacccttttaattcgcttttacagtttccgaactgcccaatcaaaacccgagcccagggtcgctcgtcaccggtctctggacaaaaagcgctgtttcagattagaaatcaggactttcccgtcctggtttctctttcttcaaagccagctgctttccgagaaaggggaagggcagggttgcttccctcaccccaccccatgcagtgatgagatcagcaacttcccactctctagataagtgattctcagtggttgttccaatgaagtcacttggagtatttattaagaggccgagggccagaggtcgcagtcctctgcaagcacacttaatgtataaaaaagcagccgggcgctgtgactcacgcctgtaatcccaacactttgggaggccgaggtgggcggatcacttgaggtcaggagttctacatcagcctggccaacatggtgaaaccccttctctactaaaaatacaaagatcagctgagggtggtggcgcgtgcctgtaatcccagctactcaggaggctgaggcaggaggatcgcttgaacccaggaggtggaggttgcagtgagcccagatctcgccacttcactccagcctgggcaacagagactccgtccaaaaaaaagcctgcatataatctgggcttacaagcaccaaggacatgtaagaaatgtgttttatatttttatatttttttatttttttatttcttgagtatttattgaccatctactacctcaggctcatatacactgaattttccaggaatataactaccaggtaactcaaaggaagatgtatgttggttttttatttttggagttttacctagagattttcgccattttagaaaattacaccagaacctgcaataccatacttgaatctgagccatcaatccagcgtgcctctcagtcttccatgccgctggttcacagagatcctaggcagttgcaagtgtctggcacttctttataccagcagtgcagccaagctagagcattcacaagctaaattacttaattttcatgatcatattagtaaaagaatcaccacaaaacaattgttataaaaaggggttgttgggggaaagggagctgttgaatatgattggggttgaaacctctaatccacactgcaatcctggggacggtgcccacctcagtctgccaagcctgagcttggatactgagtttctatcctagaaatctgtcagataaggctccattacataaatgacttggttgctgcatcgtcactaggaacccttcattctcttcacctttcctggcctcagtaaaaaaaaaatacaccttcattctggaaaacccctatgctgccagaaaagagttctacctgtaggcctacctttggaggaactgtccagaatgagtcagggccatcttgttactgaaagccttttagggaaagggattctcccgtagtttcttctttcatcagattagtgccaagaagttttccattgtacaaaatgagtatccttaatccaaaaatctgaaatcctaaatgctccaacatctcaaactttttgagcaccaacatgatgctcaaaggaaagggtcactggggcattttggattttagattttcacattagagatgctcaactgataattaacaaatattccaaaaatcaaaaaaaaatccaaaatttaaaacacttctggtgccaggcttttcggataagggatactcaacctgtatctccctgctgtggtaatttgctctaatgagctgtgaaaataaagaaccactggaagtaaaagcagttgcctggagtcttgcatcttagagagcccttctcattgccatccccttctcagaaccaccctaaaaagagtgcccggcacaaagtagacactccatatttatttaacaaatgactaagtgaataaataagtaaatttatgatataggaataattatcccattttatggatatggtgacaaagggtcaagtcagcaatat

SEQ ID NO: 1885993 - DNA, 4001 bp, Homo sapiens
gaactgtgaagcttaaatattgggtctttatacaagcagaggaactgccttatatacatttccctccacaaggacataaattgtttaactgattttatttggaggatgccatgttttcctttttctttttctttctttgtttttttgagacaaagtttgctcttgttgcccaggttggagtgcagtggtgcaatcttggcccactgcaacctccacctcctgggtacaagcgattctcctgtctcagcctcccgagtagctgggtttacaggggtccaccaccatgcctggctaatttttttgtttttagtagagacggggtttcaccatgttggccaggctggtcttgagttcctgacctcaggtgatccgcctgcctcggcctcccaaagtgctgggattacaggcgtgagccactgtgcccggccagatgccatattttcacagctaatcttttctgtgggggagtagccctaagaaaaacaaaaaggccttcgtacttttgtcctcagtaaatagtaggacaaggactaagagctcgccagagcaaaagcaggcactgccaccctgaaatgatgaaatgtgacctccatacctgactcactttggagttcaccttgataatagtttttaatagcagccaggctgaaggtgtgcttgccttcctcctctgcactgtcactgccagggtcctggtaggagacacttggccactcctggtagcgcttctcccgcagatggattccctgagactcccgttgagtggaagccctcaagcgttcttctttctgtaaaaaagcaaataacctcttcagcctaaaacagaaacttgtgccctcttgcatctacttttaccataaagaacacataacagctgtcccatgtgtctttggggtaccatcttccccatcacacctctgttactccacgtggatccattggtttgcaggtgtgaaggcaatgcaagggtgaagaggcagaaggggccaggtgtggttcacgcctgtaatcccagcactctgggaggccaaggcgggcagatctcttgaggtcaggagttcgagaccagcctgggcaacatggcaaaaccccgtctccaccaaaaaatgcaaaaattagatggaggtggtggcgcatgcctgtagtcctcagctacttgggcggctgaggcaggagaatcacttgaacttgggaggcagaggttgcagtgagccaggatcatgccactgtagtccagcctgggcaacagagcgagactccatctcaaaaagaagcagcagaagggtgccctgacactaaccggctcaattggcattggcacaggcctgtccttcagaaccttgctggtgttctgttggcacaggcctgtcctccagagctatgctgctgttttgtgctgccacttggcccagagagaagcatcccacccgaattgacctcctggagcagcagaggctgtttctgttcatccctgagccacaaccacctgacctgcccaggctccaccaaactcccatggctcccagatattcctgtcctgacccctcaacccagagctccccatagctccagtgagagaatggggaggccttactaggggacagttcttgagccacaaggtagacttcattttttaaaatctgcctggcatttcacacattggggttcacaatgtatgtttgtgaaaggttacttttttaaaatcatcagttttctagatttcagagtcctttgtttggtagtctcaccagcagccattgacattactgtggttaactacacacttagaaggttaagctggttccctaataactgcaagaaataaaacagcagtggcaataagaaatggtgaattaatgttctggaaaacataggtcttactaccccaaatgtcccaggataaagcttagcaaacataccttcttcatcacttgtgtgtgttggccttcaggatcacgacccgccattggtaagattctaattttctgtgtctttgaacttctattagcaagtggcagggtcatctttctgtatgtggcactgtctctagagtgaggtctgccaggaagtggacaaaaatgtctcactggttactaagaacatttggaggcaagcatactgacagcaaaaacacccggggacgaggacctcacactcagcagacagaggaggcaggatcacagttcttccttctccagcctcctgagaagctcctccctctgccccacctcctggggaaagctgactgggctaaagtgggagtgcagtggaagtgaggagaggcaggtggcaacgtcagtcttttacaaagaatatccccgattgcagtcagagagaggagaagagaaggaatatgaaatctcagtttccagagagagatgcagatgccagaagggacaattagagaactaacaatgagtctcttcatctggaaaaaattggaagtcaaagcaaggaggtaggtcacagtagcagcaggggccttataacagcccagggggataatacagctagaccaggagtcctggggcggaaagaaatgtcttcctgactataggaaggcagcttttaattacgtatatcagaggggaggagaatgatccttaggggagtctctggaagagagagcatggctataaagagacgggacgtccagaatgagatggtgccaggcagtcaaatattatcgcagtgtggagcacaggggacagtgaaaaaaagcaagctcagaatcacacgtcttttaggatgctattctaggagagatgattaagagactggattgagcaccactcaccacttgtgccaggtctctgtttgatgttctgtgtgttatttgaattcattgatacaacatccgtgtgcagtagatgttgttattgcaattttatagataaggaaggtggaaattagtgtgattgcaacccttcctcaagattacataacctcagagctgtccttatttatagtctataaaaagaccaacagatttactgaatatgatttacatactataacatccattcgtttaagtatacaactaaacagttttacaaccatgacccctatctgattttagaaaacttccacgtcccccaaaagagtgcttgtcttttaagtactccacctctggaggaaaccctactcctaatcaacagtactgtgtccttcagagggaaggcatggagaaggggccacaacactgagcttagctggccccagtatctgactgcttaggcacaggctgcagcagcctcaggtgagtggagagcccagcctgccgggtctgttgccggcacacaccaacaccattctgatgatggcctagcttcccaggtcaatttcactccagggaaaggacctgctgagcagcagagttgcaaggacaaatcctgcaggcttcttaccaagtatactgatcaatgtggattaacatacctacattctgggctataatcactctcctgggaattctgataggatgaactggctccctgacaaatagcagcttggagtaaacttgaaaaaggtgtatgagaaccagaccatggtccaggggtgagttgtcctatctctactttgttgctccttaaatgcaagtaatcgtgtcggtgtaatagttacctaaaggtaagtttggatttaaagacggcttgtccctgtagaccagtgtcttctcttataaacaggtggatgtaattgcccagcagcggggctttgtacacatcaaacacttcattgcctaaatgcagggacatgctggaaatgagaaatagttcaaatattagggtggatatttaatgagtcctatggcttccattctgccctgtgagctttgcttaaaatagtgtggaactgctagatcctgacctcatactgaattcataggaaaagcagaaaagatgctgtaaataacctgtctccttccagagtaaaaagtggtaaaaatctatcctctttttaacttgaaatataattgttttgtaattttataaatctct

SEQ ID NO: 1885994 - DNA, 4001 bp, Homo sapiens
ctcaagcagttctcgtcacacctgtgggaagataccgttcctgctgaagtctggggaagaggctccaccactccgggctcccttcccagaaccctcacctccctgcacctccttcccaccccctcagcctcggtcctctgtggagaggctgtgtcgcccaccattccctgacacaggggctgagtgtctgcatgtcttttctcctgtctgacctcactattgccctgggagggcagagacagccatggccagttggcaggagcaagcccaggatcaggggccaggcctccgaggcttcccgcagctcacctggacaccctcctgggccctggcacccagcccccaccccaccacacggctcccagagctgtgtcagtcttctctctccagcggctgccgggctgcgatggctgtaggcttggggtccaggccagactccacccagggatgtgacacacctgactcgagctgaccagaaggctgctgtcacctatatgtggccatgcctgcttaccctcggggagtgggagagatgccccacaattcctgcccctctcggacggtcctggcccagcctgcgcagagatggacaccagccagggctatttctaatgcagggtaaacgtgacctcaggggacggttggtgcactacagcccaagggccacatccagcatttatcctggaccacagtcacactcattcattgacaatcttttgtgtagcagtggctgagctgagtagctgtgacagaggcagtgtggccccaaaagcctgaacgactgaccattgtgccctctacagaaagcacttgccgatgcgggccgagtgcttgaaggagcacgtttcccatcctggggccgtgagtgcaccccggctatgctgctgcctgtcctgagtccagagcccggtgactcggtctccacagtgcttgcatcagctgcccacctccccattgttgccagttaagggtggaacaggccccataggcagggcttggagctttgttgtgctcatgcctgggcctccctggggggcagttctttgctttatacagatgtcccctccctgctgtgtgaagccttcccacgctcagacaccaggcctcctcgtggggctctttgcagagcagccctctgatggggtctggtctcaccacggactccgctgctctggagccccaggtgcagcatcgcttcagcctgggtgggaggtgggttttattcctagtgtgtctgaggatgctgagcctagagctcaagcccttggtctgtaattgtaaatgtgtaaaccccacaggcaaactcacacccacgagcctttctaatattcccatccaggccgccccagaggaaaggatggggttagaggacttgccagagggggttgtgcacttgtgggaagccccatgggtctgcccccatcatgctgccccctccccacacctgcccttgcacattctggtggcccagccaccaaaccctgatgccccagtacaggttatgactttccccacagaccctctggtttctcttacagacaatgccactggtgagacgagaaccagggccgagctgagtcatttaaagagatgtcagtggtctggaggacccaggggcccagtgcccccaggccacggctgagggctgcttcatcagtgaagaactgtggtgaggagcgcgctgcggtggacagccaggaggttacggcttgcttgcttcttcaaatacaacctcacccagctcagcaggatggcaggggcctcggttttccattgctctaaccaggttgccacacactcagcagctgaaaataacacccactcagcggctccccgctatgcaggcagaagtccaggcaggtgcagctgggctctccacctagggtctcacgaggttcagggcaaggtggtggccaggctgggctctcctctggaggtctggggaaataatccatcaccatgctgctcagggagatgggtgatgctcccgtccccgttaggccagtgcagacggctctccctgggagaccctgtgtagctcctgctttccgtcaggattaccgtgcccagcagcgggtcctcgtgggcagcaccagctttgggcagggtggcttttaagatgcttctggttctgcaaccatctatggtacctacttttcccccaaacaccatggccgctttgccctgccacattctggaaggacagggatgccggatgcagccctctgtccctgctcccttgcagaggccactcccatcagcctcctgcctgttcaggagtgggatgcagaagactgacgctttcatgctccagcctggacgcagcatgcgcattggcagaaggcgtgccccttcaagctgtgcccctgggagtctctgcccccgctgagcctgggggcaagtggaggcagggccagggcatgaggagtttgcctcccccgctggcaagcactccacagaggcctgtttttcttccaagttgtccaggctggctcttgctgggtcctctcactaggtcttgagggtgtccggcccctctcttagggaacttatcgtgcattgttctcagcgtcgggcctcggcccctctcttagggaacttatcaggcattgttctcagcgtcgggcctcggcttccacctgcagttgccaacccagcaggcctgcgtcctgacctgcatgttccaacgcagcccgtctggccacatgctccctcggagctgcctggcacagcagcagcggacggccacggcgtccaccagcattctggggcctggaggatgcctgtggttctcagctcaggctgtccaagtggggagagaccccgcagaaccaatcggaccaaggccttgcttcctttgggaggcgtccacactgacgctcttcctggggggtgcttctccaagacccggtgtgtcagccccagcactgtcagcctctgcagggccgaaagctgcccctcacctgggaacaagtacccaggaaactcctgtcctccactgcccaaagagaggtttgcggtggggctgcccgcctgctgcctcctgaggggcaaagagaggtttgcggtggggctgcctgcaggggtccagttgcacagctgtgggcatgatcagcatgccctgaaatccagggcatttgacaaatgaaagtgattatcactgtttaattccaagttctccctggattgctatatttaattatctgagaaccagctgactggttaccatgaagggtttaacttcagacaactgtgcccagggccccgtgcaggactcagcaaggctgcaccttgcaagcgggtggcaagtttcctccattacagcaacgcagtagaaggggctgatgcttgccgagatacgtaaccgccaccaggtccctctgctgtgggtcagacaagtgcaagggcttggtggtccctcatgggctcactgtagggctttgtttctaggggaataggttacaacccacagtggttcttacacacagcctgggaggcagaccccactgtgtggtgaatcggtacccagctggcagccagccatgggcacccctcccctgctctgacacaagcctttgagggctccctcattttcagtctttttcagacggaagccccccgatatggtttgaacatttgtcccctccaagtgtcatgatgagatgtgatccccagtgttggaggtggggcctggtgggaggtgtttggatcatggggtggatccctcataaatggcctcacaccatccccttggtgatgagtgagttcatgtgagagctgcttgtttaaaggtgtgtggcaactcctgacttttttttttcttttgagatggagtcttgctctgtcgctcatgctggagtgcatggtgcgatcatagctcactgcaacctccgcctccttggttcaagcgattctcctgcctcagcctcctgtaagactgggattacaggcacacactaccacgtccaactaatttttgcatttttttttttttttttttt

SEQ ID NO: 1885995 - DNA, 4001 bp, Homo sapiens
tggcttatttcactcaaaattgcatttgtgaaatctatttatgttatggaccagtgtttcattcctttttgttttgtgtagcaccctgttgaatgaatatggagctttccaatccattctatcctgatgaacatccaggtgtctctgttgaaactgctggtcataaattatgtgtttaaatttagtagataatgataattatttttccaaaatagttgtatcaacttaataactcattcaaatatgtgaagacctcctaacaatctaaaaagatggacttccaatttcaaataataaatacaaagattaagtacttgaacaggcagtatatgcacatttttaaacataaaagattgagttaaattttgaaaaatgtaggccgggcgtggtggctcacgcctgtaatcctggcactttgggaggcccagacgagcggatcacgaggtcaggagatagagaccatcctggctaacactgtgaaaccccgtctctactaaaaatacaaaaaattagccgggcgtggtggcgggcacctgtaatcccagctacttgggaggctgaggcaggagaatggcatgaacccgggaggcagagcttgcagtaagccgagattgcgccactgcactccagcctaggcaacagagcgagactacgtctcaaaaaaaaaaaaaagaaaagaaaagaaaagaaaaaaaagaaacatgtaactaagaatctcatttgagctacatgtgtgaaaatatttcttttacattatcatataacacagattttggatatgacgagtgctgaactgaggcttttcacttgatatgcattacaaattagaatttttcactcacaaaacatgcttatgacagttttatatatgaatagaattgtaaaaattgccttaagagttattgaataaaatgtttaaagtacctcataggatgaggaaaaaatggaagagttaacaaggatacagagcataaaagagaagaataagagttcaaataaaatcgaatgaaaagacaccatcttgtgtaactctgtagttaattgtgcatgtgtgctatttttcatgacttggagcacgttatttttggccaagagtttccattctatctatggatatgccagaaatttcctattttagatcttctagtctccaactctcaagataaaaaacaaaaatcattaaaacctctgactctgatattgaatgcctgcataaaaatctcctcccatcaccttgcaacagatgacttgctcatacacctttttgactaccactccccatcaagggttctctccttcgagactacagtaattctctttgtatttcatattatgtgcaaactttactttcaaagagttgttacctatattaatgtacttacatcattcaccgaatatattttctctatcagcaaaattggtttagatatcttggattaggatagaacacgtcacaacttctcccccctttatgatcagttttttttttttttttagtcggaccgtttttcagttggtgactgtcagaaatgaattaaagttttaagagaagaataggtaagggtaaagagaagggtgtccttatgtatcaactttgcttatttagttttttcaagttcaacaagaccctcctctcccttcaaggaagatgattcctaggcacgtttgttacttctatcaaaacagctgagttttttttttttttttcattcatgttgttaaaataccaatagtggagcgaaaaatgcttcacctgggactgtcccctgacaggcagtgcgacgaggtcaggcccgcgcccgccgagtcctagggccgctgccgccgacggccatggaggacgagcagctcgacagcctggagggctgggcgccggtccggcaaggcctcttcgccgatgccgagaggcaccggctgcgcttcctggtggcgtggaatggcgcggagggcaagttagctgtgacttgtcacgacctcaccgcgcagcagccgcagcggcgcgagggggcccggctggggctggagcccaaacccaaggccgctgtgtccccgcccagctgccgtgtccccgcccagctgccgtgttcccgcccaactgggccggccggttctcggccgcggggttccgcggcgcgcgctggcagctagcggcgctgtggccgcctctggaacgctgctccccgcagctggacgtgggcggcggcggggcctggagtctggggctcgggctgtgggcgctgctctggcaggcgcgcgcgggccccggcgaggtggcgctgcaggagctatgcgggcagctggagcgctacctgggcgcggcggcccacggctgcggcggcgccaccgtgcgccacgctgttttcgcggctaaaggccgcgcggctgactgcgagagcccgcgcgagtttcgagagcgggccctgcgcgcctgatgggtcgaggcggacgcgcggctgcgtcaggtaagcgaggccgggccgccggcgtttgaccgcgcttgggtggcctgggaccctgtgggaggcttccccggcgccgagagccctggctgacggctgatggggaggagccggcgggcggagaaggccacgggctccccagtaccctcacctgcgcgggatcgctgcgggaaaccagggggagcttcggcagggcctgcagagaggacaagcgaagttaagagcctagtgtacttgccgctgggagctgggctaggcccccaacctttgccctgaagatgctggcagagcaggatgttgtaacgggaaatgtcagaaatactgcaagcaaactgaaaacaacccatccatgtaggaaagaataacacggactacacgtaagcaattccaagtctgtgtctgcggggacgtcgcaagtgggataaaatggtttaaaggaagaaatggcttttaggagttagggtgttttgttttaagtaatacagacttggtcaaatggaaagccggtagaaagtgagctttattcatcagtttaaccgcattagtgctcttttaagcttgaaagaggtagtttgagagagtaattgagtggtaaacttactgaacttaggggacggggaagtacatgttcatagaagggtttaggagaaagtatgccttctaaatccacacccacggtttactaagcagagccaggctggagtctcagctcactgctcttattaacctgaatgatttttttctgtgcattcttttgaggaaggggaggtgaaaagaagaattcagcctaagctaaatatagaataagctttctaaattaaaatggttttataaaaggagcttgttagtggggtcatttttgtactgtgagctttatgtgtaaatgtctacacacccacttaacatgtgttgatttcactttagactatgaggaaaccacaggggagtttcaggccagtcagcttttgatcttcaactttataactttcaccttaggatatgacgagcccaccggagtttcaaaaatggtatcattttgtatcagacttgttttttacactcttggtttctcacagagataggtggtttctccttaaaatcgaacatttatatgatgcattttactgtagttactatcagaaaagttagttttcccaaatttaagttcactctggggtactatagcgtgaatgtagttcattctgttgagctagttgttcatgttagtgtagttcacatatttatctggaactcaaaaatgaggggttgagaggggaagctaaaattcaaaacatgtccaaatatataattttaatattttactttatatttaaaatagaaaagcaattgattctagaattagactaattgctagcattgctagcatatataaaatgaagctgaatgttttaactctggaatttttctgaatagtctaagaaataaggctgaagtgtatcacttgccttaagtttacttttgcgtgtgtgttttaattttgttcagtggggctttcacttaaaaaaaaaaccataatattat

SEQ ID NO: 1885996 - DNA, 4001 bp, Homo sapiens
acccatcagctttaacaattaacaaatggccaatcattttttaatttttttatagacatgggggtcttactgtgttgcctaggctggtcttgaactcctgggctcaagcaatccacctgcctcggtctgggttcacaggcgtgagccaccgtgcctggcccaatctttttcctgaatgttcctacatctccccctgggttattttaaagcaaatcccaaacatattttagtttttttttttattttttaagagacagatcgggccaggcatggcggctcatgcctacaatcccagcattttgggagactgaggcgggaagatcacctgaggtcaggagttcaagaccagcctgaccaacatggagaaactctgtctctactaaaaatacaaaattagctgggtgcgtggcacatgcctgtaatcccagctactcaggaggctgcagcaggagaaacgcttgaacctgggaggtggaggttgcagtgagctgagatcgtgccattgcactccagcctgagcaacaagagcgaaactccatctcaaaaaaaaaagagacagaacatatcactgcactccagcctgggtgatagataaagccagaccttgtctcaaaaaaaaaaaaagaaaagaaaaaacaaacggtgtctcactctgttgcccaggctggggtgctgtagcatgatcgtagcgcactgcagcctcaaactcctgggctcaagtgatcctcctgcctcagcctcccaagtatcgagattaaaggtgcccaccaccatgcctggctattttttatgtgttgtagttgaccaatcttatctcaaactcctggcctcaagcaaccccccgaccccgacctggacctcccaaagtggtgggaattagagacatgaaccattactcctggccaaattatttcacctgtaaaaacttcagtatgtatctcaaagagataaggacttgtttttaacagaaatacaagcctgtatgacatagaaatacaaaaaataataataacatagaaatacaatacctggcccaacgttgtggctcacgcctgtaatcccagcactttgggaggccaaggcaggcggatcacttgaggtcaggagttcgagatcagcctggccaacataatgaaaccccgtctctaccaaaaatacaaaaattagccgggcatggtggcactcgcctgtaatcccagtctactcgggagactgaggcaggagaatctcttgaacctggggcggcaggggggttgtggcgcggagcttgcagtgagccgagctcctccactaggcaaaagggcgagactctgtcaggaaaaaaaagagaagaaaagaaatacaatacccgaaaagttttagtaattccttaaatcagttatctttgaattattatccaaaaaagatccacacattgaaacattttgttgatacatctcttaaatctcttttattctgaagtgttttcccctcccacatttcccactttgccatttttttgaagacgacagatcatttgtcccatataatttcctacattttggatatggttgatttcatacctttggtgtcttaacatattcctgctaatctctatatagcctataaactggtagttagatcttgaggcttgattaggttcaatttttggcaataggtgatgctctgtatttcctatgcatctcaccaggaaatgatatgatggtatgattgatcagagttgaggtattgttagctagcctgatgcattcattatgtctttttttttttttttttttttttttttgaggcaaggtctagctttgttgcccaggctggggtgcagtagcgcgatcgcagttcactgcaacctccgcctccctgactcgagcgattctcccacctcagcctctggagtgctgcgaccccaggcgccgccacctaattaatagacgcgttgcctccgtttttcaaatgtccctttcaggacgccgtccccttcctggtacgcgaagcgctgggagcgaaagggacttccgggagatctaggaagtcgcttctttttctggtagaaggcggggttctcctcgtacgctgcggagtctctgcggggtgtagaccggaatcctgctgacgggcagagtggatcagggagggagggtcgagacacggtggctgcaggtctgagacaaggctgctccgaggtagtagctctcttgcctggaggtggccattcattcctggagtgctgctgaggagcgagggcccatctggggtctctggaagtcggtgcccaggcctgaaggatagccccccttgcgcttccctgggctgcggccggccttctcagaacgaagggcgtccttccaccccgcggcgcaggtgaccgctgccatggcttttccccatcggccggacgcccctgagctgcctgacttctccatgctgaagaggctggctcgagaccagctcatctatctgctggagcaggtcagtgcttgcctgacgcctttatcgcatctacagtttagcactcattggatgcacatttcttccttgccgtgcccctttgatcttgttcttggcccctggtattgtccttggcgcttccccagcaggtccagaatgaatccagggagtagtaagagctgtttggaacctggccagagagttaatggaaatcaccccccaaccccgcatacaggcaagggagacaccattagtgccaggcatccctagggacggaaagatggttaagacatctttgccattagggatcttaccactccagtaggagctgtatgaagcacaaattatcacacacaggtggtaaatgagtgatagagctagtgtacccgaagagttcacagtaagtgatcatttctagttggggtgatgatctaggagcttcaaggaagtgagtgtgagtaataagcatattttctttggagactaagcatgctccaggcagatagattggtaggagcaaagttggcaaaccagggaaagacaaggcatgtaagggaagacacccatcagcagttacacagtagccactgaaaaaaattttttttccatttgtggcatgagacaatacttgatgattctaatagtgatgtgtgtggtggcgtaaatgggcaacaagaaggccagttaggagaccgtagatcagacaagaaataaaggcccacacaaaattggtagcagtgggaatgaaggaaagtgatggatttttaagttatggtgaaagaaaactcaaagacttactgattggttataaatgttgaaggagaagcaaaaatgagtgagatttttaacctgggttattaggaaaataatactgccactgtgattttaatggattacttgtgtaatcatttagttattcattttatgtctgtattcctcattagactggaaggtgggcagggatcatgtttgttttgttcaacactacctagtgagtacctagcttagagtcaagcacacaccatgtgcttaataaatatttgttgtattaacattgaatagaaatgagaaaaataattagaaaaaggaacaggtttgatgggggaagttgatttgtttgggtttggatgggggaagttaagatgcccgtaagaaatatagcttgtaacatccagcagatagaaatgtagaactgcagctgcattgtgaggactggaaggaagatggatcaagatgagaactgcagggcatcttagaccagattttatttctattttattttatttatttttttgagacacagtctcactccgttgcccaggctggagtgcagtggcgcgatcttggctaactgcaacctccacctcccgggttcaggcgattcttctgcctcagcctccccagtagttgggattacaggcgcacgctagcccacctggctaatgtttgtatttttagtagagatagggtttcaccatgttggccaggctggtctcaaactcctgacctcaggtaatctgcccgtcccagcctcccaaagtgctgggattata

SEQ ID NO: 1885997 - DNA, 4001 bp, Homo sapiens
aacctaagtgaactagctgaaagcctaactaggaatatactcttatgacaaataactgagtctcagccaagcacatcagctgagcttcagtcaatcacaggtggctgactgggcatggttattcatgcctgtaatcacagtactttgggaggccaaggcaggaggattgcttgagtctaggagttcaagaccagcctcaaaaaaagaaaaaaagagatgatcaactaatccaaataggacaagacaccgagctttgtctctgatcttcaattctgttttctgcccataaacgcttcctgacaacatgacagactggagctcttagtacctgttctggttctcagagctgcccaattcttaaactggtctttgttcaaactctgttaaacttatctaagcattttagttttaacagtaacaatatatgaattaatacacttttgatatcaggtaattgaggaggaagacatccagtgaacagtgtgggacaattagttaactatatggtaaaatattaagttagatccatacctcatactatatataaaaggcataataggcaaaaagtctttaaatgctgttaaacattaaaataaaatacagctgaatattagataactaagtagataattagataaccaattttatagttggaaagaactttctaagcataaatttaatagaaaaataattgcaaaataaaagaggtacagttttaaccaaatgacttttgtaaaaccttctgcatgctagtggtaatgaaaaatagatcgagagaaaagtggcagactaaaaatgtgtatatatatatattacaaagaatttattcctttacattatgaagcacacttacaaattaacaagaaaatacaaacgggaatttaacaaaatagcaaagaacatgaacaatccttaaaagaaactacttaaatcactttaaatttaatcgctatttaaatatagaagacaaaatcaatcttactaatcaaataaattacaatgaagctgaaagtccattgttgcttatcaaatagacaaaatttctttttaaagagcatgcttagagttgatgaactactggaaactggcagccttatataccaatcatgggagtagaaagtgctatcatctttctggaggtcagtttgacagacaatttctaccgagagttttacaaatattcaggcattaacccattaattccatttctagtaattattattattattattattattattttaagacaaagtctcgctcttgtcccccaggctagagtacagtggcgcaatctcagctcgctgcaacctctgcctcccaggttcaagcgattctcctgcttcagcctccccagtacctgggattacagccccctgccaccacgcccggctaatttttgtatttttagtagagacggggtttcaccatgttggccaggctggtctcaaactcctgacatcaggtgatctgcccgcctcggcctctcagagtgctgggattacaagcgtgagccaccgtgcccgtcccatttctagtaattatcttaagaaaataatcaaacatgtatacgaagatatctgtacaagggtgttcatcgtagtattaatgctaacagtgaaacattggtatattattctgttctcccattcctataaagaaaaacctgacactgggtaatttataaagaaaaaggctctcattggctcacggttctgcaggctgtattagaggcttgatgttggcatctacttggcttctaaggcggcctcagaaagcttccaatcatggcggcaggtgaaggcagggagcacgcaggtcacatggctggagcaggagcaagagagagagcgaggggggagatgccacacactttcaaacgaccagatcgagtgagaattcactgaactatcatgagaacagcaccaagaggatggtcctaaagcatctgtgagaaatccacccccctgatccgatcacctcccaccaggccccatctccaacactggggattatatttcaatatgagatttgggcagggacacacatccaaaccataccaactggcaacactgtaaatattcagtggtcaaatgtgaaactatattgtaagttatggcaaatttatgcacggaatatggcacagatattaaaacatcacattttcaaattcattaatggcatacagcattgctgacaatgtattatagaaaagaaaatgacccactttcaattttaaagggatgtgtgtgtgtgtatatagttgcagttttacatatacatggttggccagccgtgatggctcatacctgtaatcccagcactttgggaggccaagacaggtggcttgcttgagcctcaggggtttgagactagcctgagcaatatagcaagacctcatgtctattttttaaataaaaacaataaaaaataaaaaatatgtacacatgattatacatagtaaaaagattggcattaaatatgctaaaatgttaaccttgattatctcttacagctaggaatctgggtgaatactgttattccacacataattttctatattttctaccatgaacaggcattacatctgtaaccataaaaataatgttattttgtttattgaagttcatttatttatattctgtttctaaaatgatttcagtattggaaaaggaattgactcattacttcacaaatataaaaagcaatatcaaaatccataatgtgaatatttgtttgcctggggccaacttaccaaatcaagaactgcacaaatgaatgaagtatgcagcagattcagagcctggtgatgtactttgatttcatacataatattgaaacatttacagttatgtctataatctgaccttagtgcccagcctcatgaaacaatctatttttcccttttttggtcaatgtctttccatacacatgtgttgaggggtgactgtcccctcaaggaagaggaaatctactatactgtgtaccatgcaaatatttttctaggctgagattattacttccagaaaaagggagattactgctttctaatgtttttcagtttaaataattctgctagtgtggtcttttacattcaggtaaaatctgactacctaaaaattcctcatcttgaaattagataagatattggcctttcaattctggaggtcatcatttctatctgtccccagctcttttttacctattttatcagctccttgaacttttctacacacaatgcgatgtccagaactctcttccttactgatacagttatcacatgccatatctgtatgcattttcttgaaatgtggtaacagatgtgtacacatatggtttaatgtgtacagaatgcagagtcactaccctcttcctgaacgggacgaacaccaacaatgcaggttgtcacatcacacactgacacatgcattcaacgtgggccaagaaaacaaaaatattaataaaaacaaattttcccaggggctttttatgtcaggtttttgtattcatctgcttgggatgccataaaaaaataccacagactgggtgacttaaacaatggacatttatttcctcacattccggaggctggaagtccctgatcaaaatgctggctgatttggttgcaggtgagggctctcttcctggcttacagacagctgccttctcactatgccctcacatggcctttcctctgtgtgcctgcagagagcaagagctttggtctctcttcttcttctaaggacaccagtcgtatcagatttaggccccacccttatgacctcatttaaccttaattatctccttaaaggccctgtctccaaacaccacattgggggctaggtctgcaagatataaatttgggggagacacatttcagtacacaacagttttgtcaagtcaagagttacatgtctagcagggcatggtggctcatgcctgtgatcccagcactttggaaggccgagagaggattgcttgaggccaggggtttgagactagcc

SEQ ID NO: 1885998 - DNA, 4001 bp, Homo sapiens
aataagatctggagatgtactgtatagcatggtgactgtaattaataataacatattgttcagttgtctctttatatctaggggagactagttccagctcaccctggagacaacaaaatcagcagatgctcaaccgcctcatataaaatggtgcagtatttgcatataacttacacacatccttccatgtagtttaaataatgtctacatttcttatagtagctaagacaatgtaaatgctacgtaaatagttgttatactatatatttgaattattttttgtcatattgttatttttatttttttctaaatattttccatctgtgattgattgaatctgcagatgcagaaccacagatactaagggccaaaagaatacttgaaaattgctaagagagttgatcttaaatgttctcacaacaataaaatggcaagcatgtgaggtgacagatatgttaatcagtttgatttaatcattttgcaatgtacacatatatcaaaatatcaccttgtataccataaatatgtacaatgttttcaaattaaaccttaattaagctgagggaaaaatgtacacctgccacctgtcacctccaacacacacttcctattgacctgaaccttctaatttttctccatctttactcatcgccccccaagcatgccacatagtttatttaccccgtcttcccccattacaatataacttccacaagtcaggaatttttatccattttgttcactgctgtattcatgagtatttatagtagtgtctggaatgttaacaattattattgttgaattaactaatcaattattaatattttaaaaatataaataaacatgtatattacattttgcatttaaatgccattagagcccaactataaatataagtatagatggaaggggaaaccttaaatggttttatccttatattctttttgccaatatgttttcccacatttctctacaataaacttctacacctttataatattgagagtaaatatttcttaagaaaaattaaccttaagagagagctcaaaaaaataaataattcacaaaaaactgctgtgaaggctatgcatggaaagggcagaagggagatggagggattgcagagacctgtgggctgagtctgagcctcaaggctttttcagcatgaaactcagcaaagacaggtgttaaaaaggcctgcctcccaccgcccctgctgttcactaagcttaggcaatcaaagtgtaccagtgttttttcactgcccagcatatactgatttaaggactcaacactctgacttgagaaaacctaaaacatgaagttatctcaaaggtgggtgagattctaaggaggctcaaatatatagtcctcaattaattctcacctcaacttagttacaatctgatacaacatattaggagacaggaacagcacagtggtaaaaatcaaacctcacctcaaaagatcataaattattgctctcagattagtattaactgacacaatatgtgcagtgagtatcttctcttcctcctcccgaattacagaagagaacgtgaaagactaggagccatacacattaccccagggaaagcagagtgaaagggcagtctgggtgtccttaactgcaccactcacagagggggcctgtcccacaaccagccaggttatttcaacctattcttacctgacaaaaaggatctgggggccttggctccactgtaggtgggtaattttattccaactggttttgggtgctagttttctgcctagtggtcaaattcagaaacccaatcaggacctaggtctccacctggagctcttaggttagctaatcaatgtcttcttggtcctcaaggaagggtttattgtttttgtttgcttgtttgattggttgtttgccattgcattaaaattctttcttacccagcaattgatgagttcaaggctatcctgtcacatttcgtgatgtggcctgagccctcccagagtgttactgactgggaccaactactaactaaagtttagtgaagagaagacaatgagcttgctggaacgtcacagaggcttggttgccatggtagtgattgtcagatgagatcacagagaagggtgtaagagaaaagaaagaaaaacatgcaggaaaagctgaagcataatattatactaaaatatatatatattatatatatatattttatacatatttatactgtctaaacttacagtggagtaatgtgttgaaacttgaggggaaaactactttttgagaaagactgactttccagcatcttcttagagagatgtggtttcatggaagaatggtgtctgagctacattttgtcttattctaaaagtaaaaggaatgggactgatctggaagcacatagattccagatcaatactaataccagactattgtaatgccaatttataaaaggaagctaggtatccattaaaataacagaaaatcaacaggtattttttgtaacagatcattgagttggatgtgaaatggtttaaagctttaactattccaggggctcctgcaaagtgtaaacttagtgttttcttgagttagcactgaaaggagagcaggattgagggacaaaagaagcaatccagtcatctagtaatatgactctggatgatgtttgctctaaattgctcccagcatcagtatgtggaaggtggacagtgtgtgtgaacttcaaagcccccgcagggcttcagttggcttgaataaaatgttactggttatcctgccaccttgtggctatgggccaacatgccagggtgtggagaaggaagggaggaaattaatgaatcacagagttgcctgactgaagaaggaaagctcagaaacacatcctcttctctcttccctatagatgtcaacttgcccatcacttgattagctaaaagtgaatagggcttaaagttcagtccttgaatgagattttgcttatatagccctcctaggacttttgtcctatcagagtagcttgttgcacagtgtgctccttgtgatcaacggttagttaatcttgtctctccaaaatctaaagtttaaatccttattcattaaatcagactgtttatcaagtatagtgctttactaacgagattatttcagaaacaagcgaacaaaacaataagacgtatgctgtttgttttttgagacagggtcttgctctgttttccaggctagagtgcagtgacacaatcacggctcactggagcattgaccttgtggctcaagcaatcctcctacctcagcttcccaagtagctgggaccaaaggtgtataccaacacgcccagctaggtgtttttatgtctgtctgtttgtttgttttattttgcagagatggaggtctccccaggttgtccaggctggtctcaaactcctgggctcaagtgaacctcccgccttggcttctcaaagtgctgggattatgggcgtgagccactacacctgcccaatattgttgatcagagtaaagaaaagacataagcacccagtaacagttagaagccatattcagattagctataattttcactagaaccatcccaatctcttgaaagataaaacatcaaattaaatgtagccaaatctaattgcttcacctctgattttttttaatcacttgaaaagggtaatggttccctcacattttgtatataaaatctactggctaggggaaggctcagaaacttgaatgttaaataggatcccaggtgatttttacacacactgaagtataaaggtcactggaccattctagtggccatgggtcccctctggttggcctgtagttgaaatctatgggaacaactttcaaactaccacatctgaggaatcagtggaggttaggaggttacttttagaaggtgattgggaatgtactcgaatttgagatttgttaaagttcattatagttatcacatatgaaagaagcagcacacatgaggaaaggagagctctggggctcc

SEQ ID NO: 1885999 - DNA, 4001 bp, Homo sapiens
gctagttctgtgaattgttttttcttctcatgtgaatctatatactgtttttgtcaattacatcttagtaaggctgggggtaaaatgcacctctgccagctcccacacacactccctattgacctgacgtttctaatttttctccacgtttcctcatcactccctaatatactatagtttacttatttatttaacacctgttgtctccctttggaatataagttccacataggaatttttgtacattttgttcactgctatgtgcatgagcatttagagtagtccctggaacattcacaatcaattattattattgaattaactaatcagtttttaatattaaaatataaatataaataatataaacatgtatagtaaattttacacttaattacaaacattatgaatataagtgtgatgaaaggaaaaattttaaatgttaaatggttatgttgtattctcatgcatatgtatgttttctcaaatttttctataataaacttgtagttactcttgtaaaatatcaaaagtgagcatttgttaaaataaactcatgtaaataaatttcatgctttctgaaatggccatttcagagatgtagcgtaggtgaagaagagatgaggactccctgccgtctcaatcatgccaggcgtgctcctgcttcgtggcacctacacatgccatctcctctgcctggaaccctctttccccagatgtttatatttgttgcctccacacttccttcaagtctttatccaaatatcacctttatgagatttctgaattttttattcatctataacatacaaaaagtacagtgcacaaatcctaagtatattgctcaatgaattgttatcaactgatactcctgtgtaaaggtacctagttccagaaactgaatgttatcagcatcccaaaatcccaaccttttcattgaggctttccctaactacctattgaaaattgtgcccaggggatatggggagacatttgtcaaagggtacaatgtttcagctaaaagggatgaataagttctggatatctactgtacaccattaaccttaagagagatctcaaaaaggaaaagaactcacaaaaaaaaattgctgtaaaggatacacatgaaaggcacagaagggaagtggagggagtgcagagaactgtgggctgagtctgagcctcaaggctttttcagcataaaatgccacaaagactgttgataagcaagcctgtcccccatttactaaacttaggcaattaaaattttatcactacccaatgtatcaaaattttatcactacccaacactgatttaaggactcaacactctgacttgagaaaacctgaagtacaaaaagttaccacaaaggtgggtgagactctctaaggagctcaaatatatgtcttcaatgtgttctaattgcaaattacttacaatttggcacaacatattgggagaggagtagtggagtggtaaaaatcaaacctaacttcaaaatattgtaaattatggctctaagatcattcttaatgacccaatatgtgcagtgaggctcttctcttcctcctccatgttacagttgagaacacgaaagactaagccattcacattaccccagggaaggcagagggaaagggcagtccaggtgtcctgaactgtactgctcgcaggggaggcctggcccaccactaagtctggatacttccaaacctatccttacatgaaaacaatatctgcggaccatttcattccaattggttttgggtcctagtttctgcccagtggtcaaatccagaaacccaatcaggacctagtttcaatgagtggctctgagcttagctaattaatggcttcctgtcccaagaaaggtttcttgtttttgtttgtttaattaattgtttgctattgcactaaaatactttgccttacctgacaatagtgagctcaggattatcttggcacatttggttatgtggtttgagccctcccagagtgttactgtctactagttacccattaaagtttaataaggcagaagacaatgagcttgctagagatgtcacagagcctttgttgccatggcaataattgttggaccagatcacagagaagtatgtaagagacaagaaagagagaactgcaggaaaagctgaagcataatagttttttaaaatagtctctaaacttatagtggagtaatgtgtttaaacttgtggggaaaactactttatgagaaaggctgattttccaacatcctcttaaggagatatggttttggttttatggaagaatggtttctaagctacatttcttcttctttttttttttttttttttgagacggagtcttgcactgtcacccaggctggagtgcagtggcgcgacttcggctcattgcaacctccaccacctcccaggttcaaacgattctccttgcctcagaatcccaagtagctgggattacaggtgcctgccacgatgcctggctgttttttttttttctatttttagtagagacagggtttcactatgttggccaggctggtcttgaactcctgacctcatgatccacccgccttggcctcccaaagtgctgggattacaggtgtgagccactgtgctctgcctacatttcatcttaaagtaaaagtaaacgaattgggattaatttggaagcacactgactattataataccaagaacttcatatgaaggcagatagccattaaaatggcagaaattcaacaagatttttaatagatgattgggtcagtgagaaatagttttgatgtgcaatatgaaaccccaaatattccaggggctcctgcaaagtgtaaacttggagtttccttgacttagaagtgaaagaacagcaggattggaggagggtgaaagaaagaacctagtgatctaggtaatgtcactttggataacatttgctctaaattgctcccagcatcagagtagagcttgggaggagtgagtctgtatttcaaagcccagggtttcagtcagtgtgaatgagacagtgaggattatcctgccctcttgtgcttctgagccaacatgccagggcttgaagaggagcggaaggaaatgaagaagtcacagaatgtctgactgaagaagcaaagtgcagaaacacatcgcctccctccctccctatagaagtcaaactccccggagactgctcatcactatcagcatgggatggcagtatatttacttaattagctaaaagtgaatagagcttaaagttcagcccttaggtgggattttgccgacatagacttcctaggacttttgtcctatcagagtggcctgttgtactgtgagcttcttgtgtcaaaggttaattaatcttgtctatccagagtctaatgttcaaatgcatgttcatttaatcaggctgtttataaagtatagtggtttagtgacaagattatttaagaaaaagtccccaaaaatatactgttgaccagagtaaattaaaggtgtaaacatttaataatgcctagaagccctaatcagaatagatataatttttaccattctaatcttttgaaagaaacatcacaactagaaatgaaaaaggtcatgttaccactgaccccacagaaataaaaaataaccatcagaaactactacaaccacctctatgcacacaaactagaaaacctgtaagagatgggtaaattcctggacacaccaataacctgctccaaaattgcatcagtaataaatagcctaccaaccaaaatatatatatattttaaaaagctcaggactagatggattcacagccaaattctaccagatatgcaaagaagagccagtaccatttttgctgaaatgattccaaaaaactgagaactgtccaactcattctatgaggccagcatcatcctgataccaaaacctggtagagacacaacaacaagaaaaaacttcaagccaatatcatggatgaacattgatatagggcagcttatgattagtat

SEQ ID NO: 1886000 - DNA, 4001 bp, Homo sapiens
tttaccgtacctttctatgtttagatacacaagtaccattgtgttacaattgcctacagtattcagtacagtaacagactgtacaggtttgtagcctaggagtaattggctattccatacagcctaggtacggagtaggctatgccatctagatctgtgtgagtacattctgtgatgttcacaccattatgaaatcacctgatgcacttctcagaatgtatccccatcattaagctagaataatatatatatatatggatatatatatatatatatcccattatcttttgtctctacgctcattcaacttgaactgtttcaaactttggagacttacaattatgctgattcctttatttaataaaagaaaaaattaagctctcatggctcgtggcttttcttattgccactgcatggactctgaacctctgtctcagccaggcacgaggaagcagagaggtggtgaactgagagctgcagggtctcactgttttgttctagatcagcactttttaaactttagtgggtgcaaatcacatgaggatgtcattaaagtaaagattacaatatagtatgtctggaatgaatcttaagattctgccttttcaacaagttcccagcatatatggtgttgttcttctgcagaccccgctttaagaaaaaaaattagaaagctctagatcttaattcaaaactcttatttttttcaacttgggggtgggaatggtggtaagacaatttggcaagatttggcaatagggactgctagtataatagactatttctctcatctattcccctcttcacccctcttgacacaccctgccagaatgcatgtgaccttccagaaaggaattatgctcagcaaaatgccctgaggtattaaataatgaactaaaatatgactctttttttttttttctgagacagagtctggccctgttgccaggctggagtgcagtggcaccaggaccaggttggagtgcagtggcgtgatctcggctcactgcaaactccgactccctggttcaagcaattctcctgcctcagcctcccaagtagctgagattacagacacatgccaccacgcccagctaatttttgtatttttagtacagacggggtttcaccgtgttggccagaattgtctctatctcctgacctcgtgatcctcccgcctcgacctcccaataaaatatgactcttaacaaatataaaatgaatgtatgtaaagattttctttaagtaatgagtgaaccagtaagatgttacgatcagtatgagggaggattcaaacaacacacacatccgtgcaatcagaaatgctgaaataaacaaacacagaagatgtcaatagttactgggcaataatacatttgattctactggacaaagtttatttgcattcctaggaaaaagtcatttgcattcacataagctttctacacattacagatttataaaatggttcaaaagaagtgcagacccctatagaattaggtaaaatggaaaggcagctaaagaggacacctagtaattattttatccatttcaaagtctttccacaatttttcctgacagagataacactttaggaagaatatcctaagttaattgagaagccatatgagaaataatataactattgcccccaaactagccctgtcctcttatcccctcctaaccacacactagccggcatcaggaaccaggacataatcagacagctcctttcccgtctctcctttcccaatcatacaatgcacatgccacctgttcaccatttttttccacccctcaccatcccatacccacatagatgttctctttcccattctcctaaacttcctcaaatattctttctaggaaggcttatctcaaatatcatctcctcattgaataacaataatgatgataataaaagccactaattgattccttagctctttagctcaccacctcaccttcacaactatcctcagaggtaagctgttatcattgcaattttacagctggggaaaccagagctgagagagcccgagcctttttcataaggtcacaaaactattatgaggtggtaaatgctttactaccatgaaataaaaagatttcctctctcttagagctttagcactctgtccatgtgctcacttagcttttttatcacataccacgtatggctgtttgtcttctagctctcccatttcttctttatcatctttctttgcataaccacaacctccctgcctcaaagttacctgtgcctctgctcctcatgagaaagcagatagcatgtcctatccatgcatgggtccatatacagggtaagcttttactaaatagaactgaaaggtgagttttatgacaatataaacacaaatatatttatgtcattatattctcttttgtacattacctgtagcaaattatcatgtaggtattcaataatattttcttcaaatttgatctccaagggaaattggaaaagaaaatcagaatttctaaaacacaattccacaggaagaaacactttttaaaaatatttaattttaaaattaaagacaggtttagctgcaggcaaagtaatcagcatgacgaatgaggatgggtgatttggtctcctactccaactttgccgtctgagttccctgggctcttagaggctcagagtatcccaggctggacggagtctgataaactccgtgaatgtgtgtgcactgtaagctaacaatggaagcactggcgtggtgtcttagaaagtattcctaatatcagtacctcttaccctcaaaggacttgttcagagccaaacgccagggacttaggtagaggaaacatttgagaggaggagagtttttattaagtttccaaactcactctatgtatgtcaggtaatttgacctcatgtgagaggcagctggctgtgggagaactgaagtttgggctgggcttgaatatgtttccttcatacggtgtgaccttccccaagttatgcaaatctttgagtcccaatcttcatgcttaaatgaaaatgatgcctgcctgttacaattgcttaaggaattaaatggaggttttctctatttgcacgtgtgtgcatgtcacaatacacacagagagaaaccaccaggcaatgaaggctgattccatccctcccctggttagttcatatgatttctgagcctgccagaattccttccagtgaaatgaaactaagggagagaaacatcccaaggcctggatgcctggaaagattttacctaatgaattttcagtttatttgttataaaagtgaatttggtctgattgaaacaaagtattcacagcttttctgtgctttaaaatgtcattacaaaaatgcaattcttttcaaatatctatttttaaactttattttctaacttcaatctcaggccttgataaaaaaaaaaaaaaaaagatgcttagtaatgttttgccttaggaaatattttaaaaagttactaccataggtttatttgacatccaaggacacatatataaataattcagaaggtggaagttatggcagaggtccatttgtgattaataagcctagagccttatcaataacataatttgaagactttcagcaatcttctaccgaatgcctcctattctcaaagtaaacacattgatcatgtaaatagtgctctttttcttttctaacttgagtgtatttttcctcgcattcaatgctttgaagagtaataccttcagccatgtaacaggagttactttctcctcctctccctctctttatcaccctctctatctcagcaggtatctactgcagccccttatatctttaacgtatttatagaatttaacccattttcactatcagtttggccacttattctttcattgatgaatatttattgaatctataccatgttcagccagtctctaagatagttggaatccatcaggaaatgaaacccaaacgcctgctaccatggagtctacatttcagcagagga

SEQ ID NO: 1886001 - DNA, 4001 bp, Homo sapiens
ctagaattgagaaaattgaaaatcgagaccaggatgctgttgaaacatgaattctttccatgatcccctcagtagaatttagtgaaatgaaaggatagcttccatcacgttatgtttaattcttcctcgatttcatttatctttttacttaaaactagtattttccaacaactacttcccttagaatctctgtaagctacagaaatgttagcagcttactttggtcatatcatgggccaatgcagcagcgctgtctcatgattgtgagcctaatttaactaaaaatagcaagggaaatgctgaattctgaagcatttctgtcgttccctatagctgaatgggaacgttttcactcaaagaacagctcctcttgccttattgcagcatggaggactcaatcacattttcccttgaggctgacaacaattaaaaactagctgccataagacagtattcacagatattcacaacaaacacaaattggtgcttttcattgagacaggcagtgtatgccacacagacagcaggactcaaggacaaccatctctttcaatgtccagcatctttgaaatgagcttggctgttaataagactaatgccttcagtgttactcagtttcattctttacagcttttattttctctttaaagaccctaccagtcagttgggcctcttgatcagttgggtagaagttgggagatatacattgtttgggaggagatcataatttaagcaaaaagcctccgaggaatgaaatgccacgtctttccatttgcaagcattcccaccaggctctcttttggagaacttcccttcccttcacctcccccattttactataacattgcgtcagatatttagaaatgttttgttttaataccaagtgactttcttttttttctatatctgttttctaaccaatctgatacttcaaggcaacaaataagaaacggctttgttattgaattgggaacaaaaggtacagtggagaagcatattaaaatgttcagaaaatcctaaactgaaatctgtttactaaagccaccagctgtcacttcctctcctggctgtcgtgcactacctatctggaactgtcgccttgcactcattgccctgaccctactgtatatccgctctgatgttttcttagaaaaacaagtttacccccttccctctcaattacatctaaatgtactctaaatgtgctgtcattctcaattgcattcaatgttcttttcaattttaaaatggatgtttataagaagtagcatgacaatctatttaagaataaaagtcaaagaattaaactaaatgaccacaataggaatcatcaatgtggaactgagaatgttgacttgagtacctagagttcaatcataaattaaaaatcgttaaaatgtggtgtttggggttacaaactctgtttcaaattacaagtagctgtgcctggcatgttaggattgttttctgatcttaatgaatgctaaagttgagatttttcagaaggataaaaagtctttttaggaaaccattacggatcctcgtatttcagtgaccccatccacccactccccgctttgcttcaatgttggcaacatctgacacccttttcggcatgttcaggagagaagccaaggattaaaccggccatgaaaactcttttccttctcaactcaccgctgggaagcgagtgtattctgtaaattcctgtatctggccaggagggcttaggggatagggtgggccgctcagagctgagacgtactcacactgtggatagatagacgtccgtctccaaaaccgccaactttgcttcttccactaccgcttggctccctgtagtcaatctgcatgtgattcctattaaaatcctgtttccttaaagcaacaagggtttcagcctagagaataagatatctgacctctggagcccatgagctatcactgctacatatattcactgaatcaactatcagcacgcaggccctatcagcaaaggagagaaatgtgcaaacttcttgcagcattaatcaaacctgaaacgttatttttaaggtgtcacgaaatccacgttgactgactggtccttttaatcttaattttgaacagttgctactccaattaaattctaccacctagcattttcaaacagctcctggttgtttccacaaactccgttaatggacagctgtttctgacagctccctgatttgccagtgctgtgttggctgccggcacaggaggcccgttctgtattctgctgctggcaccgggggatatgcaaatgaacacatgaatcagttgtcaccaccacagacactgtgcagggagacgatcagaatgtgtggggagcttagttggctgcaagtgaggggaaaagaaggggggtaggaaagcttcggtttcttgaagtgagttttcttttctttttcttttttgaagtgtctccagtttattttcactttgtggcattcattagatttcagttcaggaaagtgcaatctgttcctcgccaatcaccaacagaaaccctgaaagtttgggaatgatagaaacatttcaggtaaacaccattagaactttggtagcacaagcagaatattataggcacttccgtttttcaaatatttccccatccgaagcgggtgagggaacgatggggacaaaacaaaacttttgttccccgtacggatgtgctcgagaacacttggcttgggttccaaagcctggtcataagtgctctgaattatttccagcaagtaatgccgaactgctccacccgccaagctgaatgctcatacacatggtgtgaatgcgttacatgaagaacagagtgagtgagccccagccccgggggcttccgtcccgtccctcagacctagccgacatacgaaacaatggagaaacgttgttgctcttgtgttatttaggattcagtcagggaagtagttccactaagagtgacacagactgtggggattatgatgggctgcatcttatgtaattgtgggatgtggtgaggctccagtcactgtaggtcagcaggacctgtggctgggaagaaaagctggacagaaagtggtgaccgcaaggacaagttgaaatccgtgaggacatactggaacccgtagagacaaatgggaacctgtgagcacaaattggtactgtttctgtctctcactgcctgcaagtttgatggcatgggtgatctgaagaaggagtgacaccttaggccacatttctgaacaggacttggcctaagacttgaagagacaggaggagctggaggagagggggtccaagtggctgcccttcccagcaagaagagccagtgggtcagtgacaatatgccccagctctggtgaggctgggagccctactccaactctctgaaccttaggacgactgttttacttcacctgcccagtcatttacaaattcctctgcaggcaaccttcattcaaaccataacaggaaggcaattctggaaatcatatttccagctctgctaggttgacccttaaaaatcaccacagctgtatacccagttccactttgccttgagaatccaacatgacattgtctactgtgggttccatacatcagtggtagtaccaatcacattacctggaacatggacaaagaagacagggagagctagagttaggcatggagtcaagtgatggaattacaagatggcctggagtgaaatatggttaaaaatgtaccactgttcagggatcaaggagcaaatcagtatcacatattggttttattgaaatactgttagaagtcctacaagatggggaaagctaaccagggccaggtttagcacaggtacaaagaatgagaaagataaaatatgatctcgattacacctggctaacacatattatctgggactttatgtgtcttctatctaaagagaaatgaatacagacttcatttctaagttggtttcacattggtatgtctaagctgatttaaaattgcaaatgttt

SEQ ID NO: 1886002 - DNA, 4001 bp, Homo sapiens
cacactggaagaatcaaatattcaatatgaggatattgacacaaggaagaacacatacaagaattttatgtaaaaggggtctaagaatgaccaggagttaatgcggtaaagagagcatgaaagaacatttcaatccccaggaacagtgcgagcaaaggaatgaagtgaagagaggaaatcaagtctgggttatcggacttactgctgagtgattttacagcttggaagtaacacttctctggtagccaggttctccagaagtgtgcttgtgagctcacaggtttgtcattggttctgtttagggtccaatgttgcatgtcattcattctcttctttcctccagacgggaagttctcaattagtgttacaatgggatgggacccatatattggaaataaagctatagaggaaaaggttggagattgcatttatgtacagatttgggagtgtctgtcaactcagtaatggctaacatgtcatacatacacgtggcaaagatagtaaagacagcaaataacaagtacaacagaagccattgaggtggtcataaaagaacacacacaaatgtatgcagatatttagtaagcgctcatgacaaaacagtatataatttgcggaaatattttcaaatctaggcaacacctctatgtttcactgtcactgaggcatgttaagcaactctcatttacatgtgaactccacagtgcccataatcttaaacttgatttgtaagattgtaatacccatcagcacccttactctaatctaagaaattctgggaatgaagagcaaataggcaatataaagtctatctgaatatttagacaaagaagaagtacttcacttgttgcactagaagtaaagcaacaattaattaacacaggcaataggaatttctcctgccataccacttctacatcttctgggtgacaaggacccactattcttttcaggaaatgtatttgacttttacttcggtataaacatatgtgaaataaataacttatattatttatttattatgatgtataaacatatgtttatacctgaaataaaagtcaaatggctttgggaggccgaggtgggcagatcatgaggtcaggagtttgagacaatcctggccaatatggtgaaaccccatctctgctaaaaatataaaaattagctggacatggtgacacactcctgtagtcccagctacttgggaggctgagtcagaagaatcgcttgaacctgggggttggaggttgcagtgagccgagatcatgccactgcacttcagcctgggcgatggagcgagacttggtttcaaaaagtcaaatggcactggggacataagactgagccctgggggaccaaccttcttgttatctcagactgttcctgaagttttgctccttattttcgtgtgaccacaaattctttttgttcattcagtcttaagttaccttctcctggtaaactcatgacccctcacccactggagtttgttctaacttcctatctatgaccaacttcaaagtgtcgaccatgtggagatttccttcttgacttccattattccagccacttgcatggggccagcaatagtctctccttggtgttagccagcaggactctgtcaggctcaactaaattccgagtgtcccacataaaataaaaatttctggcatgtctttgatcttctaccatattccctgttttcggtaatcaaatgtgtttaacaatttgcttaaccacatgataaatcgaaaaacattgttgccctgttaatattacgttaatgcaaataataactcaaaaggcaaaaatctgtggtgttcaaaatttcttctgtaaaatttccgtacagcgatacttttaaaacttgacaaagaaatctggctctcctttttgcttgccccagccttcctttcttcttccctcttgtccccatttttaagggcccattgtgctccaagcactgtggtctgattaaggatatgttcagcttgataagtacagaacgttattgtcaaggttctgttctttgaatttttatgacgcagaacttagagaccaagaaagtcaaagaagaaagggactgaagaatgtcaaggaaatgacctagcactacaagccataaagtaatgacagtttcaaggggaagaatagagagaaagaggaatcatgtggagaggaagaaggtggggagttaaggagagaatttggtaagtaatgacctgagaaaagacgtgctagagtaactctgggatcaaagaaagatgaacagccagaaaaaggagatttttttttaatgtttctaagtacttcatattctgatgccctgtgagtaaaataaggagtttctttttaattaggctgttccgttaaactttgtcttttgcacatgccgtagctctgagactgactatatagatttatgaatgcagagaaaatataactaaaacaaaacatctggccagtctacgacataatgcctgttatattttataattctgtctgaataaatatatttagaacaaataatatgacttatcttcattaatttcttgaaatagtttgaggacctaaacttttagcatttttaatacttataaattttgtttgtcccatagtatgtaagtatgtacaacaagttttctgagtttcattctctccactttgggcctgttgcatgtgggggtgtgtatgtgtgtgtgtgtgtgtgtgtgtgtgtgtgtgactgtggtctcagaatcaagaactagcttgagtatttaaccaactcaacatgcaaggttatatggtctcaattttactcatgataaacttatgacaaagtactttgttttggctcataataaatatgtgtgtttcagctcccttcttaagagacaatggtgttaaaatttaaatttcaccccctcagtatcattttgcctaaggcttctttgaaaaaaataaaagcaaaaatatctggcttcacctcagccatcttctctgcctctgcccacccccaaccccagcctttttattctcaattctcacttcccttttcaggttatagccaacaggaatagatctgacaactgaaattcttatgggtaaaggcattgtggacaaatacaaactcacacacaatgggttccaaagtaagtacgcctgcaatccaggtgggaaggatttctatggccatgctacttttgctgtctctgcttgacaaacactcgttgttcatttcagataatttatttctgccctgcattagaagatgggtgtctgctcaacctagatgaggctcaacaatatctcagagggtgagcaaggctttcttcccgggggcagctccacacagaaaaccgacaacccacttcctgggaagaggagtggagagcagtttcatgaaaacaaatgtgctcttcaaaggtgcaaaggtctggaagagagagaaagtagatggggaggggggtgaaattgaaaacaatgtatttttccttcattgccaatcattttgcactgatgtttctcactcactggatcaatggcattaattgtttcaggaggatttcagatgccatctaggacaaagaagtcattgctcagctagaatttcaaactaactttgtttttaagttcatgatattaaaagcctagctttgttgaattaataaacgatttctaaatcccaaggaacatctttcagcatatccctagagaagctctggggactgactacagaggtttactgtaagccattgaaacctaaagaacgttgcaacaaacagaatgagaaagcttgctggggctgggaggaacttggagtaatttagaggcacaagtctaaggctaagatgtttttctgagtcctttcaaagaagagcaatcccatgttcagatatggtgacgaggtaattcacctcctatttggggcttagggctctttgcaatagagtagaagttgcaatgggcagatacaggaagaatcagtctgggatagtacatctggctccccactgcct

SEQ ID NO: 1886003 - DNA, 4001 bp, Homo sapiens
cagtaaagtatgtaagaaaggcatttatagtagccctatgaacaagaagaaatttgggctgcaaaataatatatttatgtaggttattttttaattataacttttattttaggttcaagggtacatatgtaggtttgttacataagtaaactgcatgtcatggaggtttggtgtacagattattttgtcacgcaggtaataagcatagtactcaataggtattatttttctgacttaggtaagttcttgatcattaaataagcataatcaaaagtatgaaagttaatccaacagggcctctattagtattctgaaggtatgccatattaagcataatcaaaagtatgaaagttaatccaagagggcctctattagtattctgaaggtatgccatatcacaggttagtaataattagcaccttgcctggcatactctagctttaaaaataccttaaaggttcacatatagagacatcaatacatgattgggtattacaattggaaggaacacacacacacccacccacacacacacacacacacacacatatttttgagacagagtctcgctcttgttgcccaggctggagtgcaatggcatgatctcggctcacggcaatcttcacctcccgggttcaagcgattctcctgcctcagcctcccaagtagctgggattacaggcatgcaccaccacgaccggctaattttgtattttttttttttttttagtagaaatggggtttctccatgttggtcaggctggtctcgaactgccgacctcaggtgatccacccgccttggcctcccaaagtgttgagattataggcgtgagccaccgtgcccacaggtactcaagcacttgcatgtgatcaagatggagaagagctgacttttgcagttcacgtgggaggaaaaaagtaaatctagaaattctagttaactccaaacacagtgagtgtcattagtgtttctccagaagccaatccaatattaggctgcacataaagactgtccaaaacaaggacggagagcacaacaattcaggaagaagaccacctggaatgctcatatggccatcaaagatgacataggctctggaaactatactacagggaaagttggggctaagaagaaccttgagccaggagaagaaaagagtggatggtgggccatagaggcaagcatggcagatgccttctaagaggtgaagggccacaatgtacagatggtttgacttattctaggcgggtttcagaagaggcacaaggcccaagctgaagcctagaaggtagcagtttgagtacaatacaagaaaaaaacatttttctttgcatttctgatgttcatcagaacatatgggacggaagctcaggaaagagatcttaaggtagcatcaagagatagatgtcgtccacaaggaggcggtatatgaagctgtgaaatggcttggggtttccagtgtcttccaccatcatcagcccagaattaccaccttcccagttgcacttcctcctaaatctacatctctggtgccttttgccttgaacagtctcttgccttggagcttctcggccatcaaacagaagggggcaccctgcaccgtcagtcaaggcaaggaccaatctggcaatccccaaccatggaaaaggacctaaggctgggtgggatgtaggagccttccaggacctggaagggagcctcctgtaactactctctactccctttagagtccacagggctggaactctaaatgcagaataaggttaggggtgggcagagaggaagggttgtgatgccacctgacttccaaattgagggtggcacaggatcccccagaagctccctggggtacagaagtcacagcaaccctggacaatccaggggtttggtaaagtgtacttaccaattttgaagaggggaaggggttctcttaaggtgtagaaaggactatccagggagttgcaaactttgttgtaagtggacaatcaccctcgctcctcactgcaccgtcttctccttgcccaacaatgcacgcgggtcctagcaaggtattcgagtccagatctctctctctctctctctctctctctctgtctctgtctctctctctttcctctctctgtctctctgtctctgtctctctctttcctctctctctctctctgtctctgtctctctctttcctctctctctctctctatctctgtcacacacacacacacacacacacacacacacacacacacacaggcaaagtgggcaaagcgggcaaagcgagcaaagcgagagggttggtacccagtctgggcgcgctggagctaagcaactggcctttgtttgtgaattggagcagtttaggggacatcctccggtcgccgcggggcgcgcgcctccgctgagtgtgcggtgcggtacccagcggtgcgggggaggctccaccgcgccagcccagggcccccgcaccgcccccgccagctcgacgcgcccagcgttgcgctctccacggagcgggcggccgcagcgcacttggctggggcgagaggcgagaggggtgggcggactgcttggttggcgttggcgctctgcagtgcagtggagtgttagcccagctccctatatggtcggggattagcttggcgctgctgaggctgaggctgagccaggagctggaggaggaggtggaggacgaggacgaaaaggaggaggagaaagagcgcagcagcagtcagcgcacgccgagcggctgccgggggaagcagaggcgccggaggctggggcaccgccgacgcctcgggagccatggccgaagggggagaaggaggcgaggacgagatccagtttctgaggactgtgagtctccgcggcgggggcgaggccgtgggcaggtggggaggagcgcggagcgcggcgaggaggggctggctgcgctgcgccgcggtgccgggtgcccggtgccgggcgctttctccgcacccgcgggctgcagaggcggaccggccacctacccgcggggccgcgaggggctgcgtgggaaggggcaccatctcctgcctctcccttgttcccctaccgccacccctgccccaggccctccacctaggaccgctcgctctccaggcaacttgctacttggtctgaaacccttgatgcccaaacttcagccggggtttgttcgcggttgtcctgacccataagatcggcgttggaagccctcgccccggggtcggccctctgacacctccatactccaccccagccccattcctcttccagggcgcccccacgcacaggggaacctccgggaaggagccagcggggcaggggggagtgtggggagccgggtcggagaagcgggcgcaggcgcttggtcctagccctgggatcgctcggaggggaattcacccagcgctgcccctctcgtgttaagccccacgccggcaactgctgctggagcctgacttgactgactgcctgtcgtgtgttcgagagctgtggcttctgctcctggctcccgcgagccccgcaggacagggaaaccccagtcagtggctccgcgtcactcaggtcccctccttgacacctgagggcgctgctccgtcccagatttgggggtgagggggcgaagtctgttgcagccacaccagccttgccctgtaggagataatacaaagactttcagggtggacggccacccggaggggtgggggcattggggatgcatcctagcgctgacttcagccaagtgaccttgagcaagtcgcataatccgccctactcagcctcagtttcctcatgtgtaaaataaaatgtaaccagcgtttcagggtgataaggattaaacgttatcgtgaatgtcataatgttttgtaaacggcaaatcgctctgtaaatcttaggtaattttatatgcgctgccttgctctcaggaattagaatgaaattctttctttccctctctcacttccctttaagggtgcccccttctccatgacctggtctt

SEQ ID NO: 1886004 - DNA, 4001 bp, Homo sapiens
agcaccttgcctggcatactctagctttaaaaataccttaaaggttcacatatagagacatcaatacatgattgggtattacaattggaaggaacacacacacacccacccacacacacacacacacacacacatatttttgagacagagtctcgctcttgttgcccaggctggagtgcaatggcatgatctcggctcacggcaatcttcacctcccgggttcaagcgattctcctgcctcagcctcccaagtagctgggattacaggcatgcaccaccacgaccggctaattttgtattttttttttttttttagtagaaatggggtttctccatgttggtcaggctggtctcgaactgccgacctcaggtgatccacccgccttggcctcccaaagtgttgagattataggcgtgagccaccgtgcccacaggtactcaagcacttgcatgtgatcaagatggagaagagctgacttttgcagttcacgtgggaggaaaaaagtaaatctagaaattctagttaactccaaacacagtgagtgtcattagtgtttctccagaagccaatccaatattaggctgcacataaagactgtccaaaacaaggacggagagcacaacaattcaggaagaagaccacctggaatgctcatatggccatcaaagatgacataggctctggaaactatactacagggaaagttggggctaagaagaaccttgagccaggagaagaaaagagtggatggtgggccatagaggcaagcatggcagatgccttctaagaggtgaagggccacaatgtacagatggtttgacttattctaggcgggtttcagaagaggcacaaggcccaagctgaagcctagaaggtagcagtttgagtacaatacaagaaaaaaacatttttctttgcatttctgatgttcatcagaacatatgggacggaagctcaggaaagagatcttaaggtagcatcaagagatagatgtcgtccacaaggaggcggtatatgaagctgtgaaatggcttggggtttccagtgtcttccaccatcatcagcccagaattaccaccttcccagttgcacttcctcctaaatctacatctctggtgccttttgccttgaacagtctcttgccttggagcttctcggccatcaaacagaagggggcaccctgcaccgtcagtcaaggcaaggaccaatctggcaatccccaaccatggaaaaggacctaaggctgggtgggatgtaggagccttccaggacctggaagggagcctcctgtaactactctctactccctttagagtccacagggctggaactctaaatgcagaataaggttaggggtgggcagagaggaagggttgtgatgccacctgacttccaaattgagggtggcacaggatcccccagaagctccctggggtacagaagtcacagcaaccctggacaatccaggggtttggtaaagtgtacttaccaattttgaagaggggaaggggttctcttaaggtgtagaaaggactatccagggagttgcaaactttgttgtaagtggacaatcaccctcgctcctcactgcaccgtcttctccttgcccaacaatgcacgcgggtcctagcaaggtattcgagtccagatctctctctctctctctctctctctctctgtctctgtctctctctctttcctctctctgtctctctgtctctgtctctctctttcctctctctctctctctgtctctgtctctctctttcctctctctctctctctatctctgtcacacacacacacacacacacacacacacacacacacacacaggcaaagtgggcaaagcgggcaaagcgagcaaagcgagagggttggtacccagtctgggcgcgctggagctaagcaactggcctttgtttgtgaattggagcagtttaggggacatcctccggtcgccgcggggcgcgcgcctccgctgagtgtgcggtgcggtacccagcggtgcgggggaggctccaccgcgccagcccagggcccccgcaccgcccccgccagctcgacgcgcccagcgttgcgctctccacggagcgggcggccgcagcgcacttggctggggcgagaggcgagaggggtgggcggactgcttggttggcgttggcgctctgcagtgcagtggagtgttagcccagctccctatatggtcggggattagcttggcgctgctgaggctgaggctgagccaggagctggaggaggaggtggaggacgaggacgaaaaggaggaggagaaagagcgcagcagcagtcagcgcacgccgagcggctgccgggggaagcagaggcgccggaggctggggcaccgccgacgcctcgggagccatggccgaagggggagaaggaggcgaggacgagatccagtttctgaggactgtgagtctccgcggcgggggcgaggccgtgggcaggtggggaggagcgcggagcgcggcgaggaggggctggctgcgctgcgccgcggtgccgggtgcccggtgccgggcgctttctccgcacccgcgggctgcagaggcggaccggccacctacccgcggggccgcgaggggctgcgtgggaaggggcaccatctcctgcctctcccttgttcccctaccgccacccctgccccaggccctccacctaggaccgctcgctctccaggcaacttgctacttggtctgaaacccttgatgcccaaacttcagccggggtttgttcgcggttgtcctgacccataagatcggcgttggaagccctcgccccggggtcggccctctgacacctccatactccaccccagccccattcctcttccagggcgcccccacgcacaggggaacctccgggaaggagccagcggggcaggggggagtgtggggagccgggtcggagaagcgggcgcaggcgcttggtcctagccctgggatcgctcggaggggaattcacccagcgctgcccctctcgtgttaagccccacgccggcaactgctgctggagcctgacttgactgactgcctgtcgtgtgttcgagagctgtggcttctgctcctggctcccgcgagccccgcaggacagggaaaccccagtcagtggctccgcgtcactcaggtcccctccttgacacctgagggcgctgctccgtcccagatttgggggtgagggggcgaagtctgttgcagccacaccagccttgccctgtaggagataatacaaagactttcagggtggacggccacccggaggggtgggggcattggggatgcatcctagcgctgacttcagccaagtgaccttgagcaagtcgcataatccgccctactcagcctcagtttcctcatgtgtaaaataaaatgtaaccagcgtttcagggtgataaggattaaacgttatcgtgaatgtcataatgttttgtaaacggcaaatcgctctgtaaatcttaggtaattttatatgcgctgccttgctctcaggaattagaatgaaattctttctttccctctctcacttccctttaagggtgcccccttctccatgacctggtcttcgaagatcacaacttacctcttgtccatcttttgaaccactctcctcctgttgaagcgcttccttccaatttacttcagtttctcttccaaacatggttcttttgtcaaagctgggacttgggtcttatttggggggggtatggaagtacctatcgccctgctggtactactgagaggctagagtattcatctcttcatccttcgtctgacctgcagacccagactccattctcatctctcacactgcacacaagatggccccacagttgcaactcatgacaaccctattgttataaagctgcctgctcccctcaaagctccatcaaatcctttggttgtccctctgacaggtgtctttagtagtggatgggtggcagctcaggttttttctgccttgtgtcctccatgatcag

SEQ ID NO: 1886005 - DNA, 4001 bp, Homo sapiens
cttgaaggaggaagtacaatgtagtaagtgtgaaatttatgagtggttattaaaaataaaaatggttatttctgaagtgtggtggtgagactaagatttttatttaaaagtagcctacacagtccaactgatgagttttaaaatataggttctatatatatgcgtctttgtgcacttatacacctatgttgtttgcacatgtttatatgtggaatctatatggcatattaaagtatatttcaaaataatacacaaatgatcaacaattcagtcatagcgtagtgtctgataattgcatttcctgcagtctatgttcttaggatcataatctttaacggtttgggaaagccaacacataaaatgacaattttgagttgtgcagcctattttgggacatttaaagatgttaaacagatttccctttggacttactcattcacttcttggctaagatcatttactataagagagtctgccagacaaggagggaatacagggacctagggccaaggggagtagaagggaaacctgggaaaacacaccaagtttgggttaggggatcaccattccatctggaagctaactggataatagggtatccattcgtcctcacccttgaacctcctccgtgttcagaaggaaactaataaatcactttatccctctctccattgttagtggactcttttactcctttgcagtgaaaggctgctttcttggggtaaagatgtcaaccctagcagaggatttcagtgatctttctggcggcgaagcttagaccgtgtgtttaaacatcattttatgaagaagtacactgtgagtggactgagggccatgccctgcacctttcttcccagtccctgggccaccaactacccaaccacctcggttgttccagaagtgaaggctcaccatggtgtggcttatgtaatatacatatgtgctatgatccctgtggataattaaggctaggtccctttatatgcctaggacaagttagcaaccctttcaaggtcgtgttttcgaaaggatgacaattactttcccattggacttttggtacatttacatcaaacactgccagctacagtgtctcctaatactgacccctgggctaattagcagcttagtgaggttgtttcaatttttcagcaaccaattaagtagttgctctagacagaactgacaacacaatgtgaattttaaaaaccgggatctgctggttgaggggagaaagccaaacccagtaaggcaagtgggggcagggcgaggctgtgagtggctctgtttctgctagcagaatactgggtcttaaattcagattaaatcacagtttacctgacgagtaccccgcccccccttcccattagtaaaataatagcaataatttaaaaagagccgagcatctgggttagtgcaaggggaagcgagacctttaaccatggccaccccacttgctctttgcgaggcacctgttagatgcgctcgtgtgccctgacccctataccgagagacagctccacacctgcatttacccttcagcctaaatggattcccatcaagcctttctcacttcactgtcggatccacagaggcaccgaaccgcagccactctgcagaagcactctcagccactctgtcccctaagggagatttaaaagtggtcgcccccactcgccctccctcagccagcatctccatctagggaaggaatttcagttgtctccaggaggcaaaaagcgaaaaggtgagggatgcaccgagagaagagaagatacctactcactcccctccccactcacccacgcgtccgctcccggctccccctccgcctgcttgggtctggcggtcaggtgaggttacctgggctccccgagaagccccgaggggcgctgcagtccttcctttcgaaatcgccccgctccccgccgggcctccaggactcttgcccctctccccccgcgcgcgtccccggcccctcgggctccgacgcgcagcgacagccgcacggcgcgctctgctcccctccgccgacctggcgtgacgcaggcggagactacttaagggcggattagaggcggcggccgcggatccccgagcccagcattcggctccgcgcgctcggccctggcctcgcaggctgccgcgccggagcgccaggtgcccgctgaagtagcaggaacagagccggtgttcggaccctcccctggcccccaacctgcggcggagagcggcgctgagacttctcctgggcgggcgagcgctggaggacctgcaggctgccaccccgccccgcccctcgtcccggcgtccgcgggatccagacccgaaccccggacggcgcccgaggttcgtgccctctctctagaccgcgccaactgccccatcggtcgggacgcgcttggatttctttccccatttcttctcttttaagtacaataaaaggaaagggggattcgaggattttttaaaaaattgcttctttaattgggaggcaattcactcccattctggaagtgcggcccggggaggggccaggagcgggaacgtgcccggtgctgcccagtctttgtctgctgcctccggatgcacagcgatgggggaatggaccatcttggagaggctgctagaagccgcggtgcagcagcactccactatgatcgggaggtaagggcgccaagccggcggtcagggggccccgtcgggcggcccccgggagtcccttctcacacctggactgagtctcccgctccaatccccagtccgtcctctgcctcctccccatcgtcctaggtcaaggctccggtgttcccggcgatgagggattacccgacgccccgcgatgcccccctcctctagctactcctaaccagctgcccatcccttccccatcaagcaccactggggcttcactcttcccacatcagaaaaggagccgctggctcagtcttggtccctccactctccagagtcagagccaatctccatttggttccctaaatagaatctacaaagaaggcaggattgcatttggacagaaaagggcaaatggggagatggatttgctcttcagagcagatgcctcttttctcaacaaataattactaaaccaaacttatttggcggtgtaaacttaccgagcctacacacccaattgccatttttgggtctgtatctatatctatgtctctatctacctagctttatatatatatgagttcaatatatatgaatatatattcatagccatctgcttatataaagcattaaatttaatattcatgttgagaataaactaaatatacacatggagtagttatttacacaccctgtgtgtagacctcgaagcatgcaccatctgtaaaggtattctgtgtgcatttgccatatccagagtgaaggtgtgttttgtgtttctatacattctatatagagagatgaaatctatctgttgcaagtagactatgtccagtgtatggagatgtgtgtacctgggatctctataatatgaaatattcccagcctaccagcactcagcagaaaaggaagagacaaaaagctttcccagattcctagttcagtaccagcccgggatggacagctccccagtcaaaagactggtaaacaccagcaaagggaagggaggagcaggggtttcctgtcagtgacgcagcccgtgagaacctctctccctccctcttcctccgttcaggatcctgttgactgtggtggtgatcttccggatcctcattgtggccattgtgggggagacggtgtacgatgatgagcagaccatgtttgtgtgcaacaccctgcagcccggctgtaaccaggcctgctatgaccgcgccttccccatctcccacatacgttactgggtcttccagatcataatggtgtgtacccccagtctttgcttcatcacctactctgtgcaccagtccgccaagcagcgagaacgccgctactctacagtcttcctagccctggacagagacccc

SEQ ID NO: 1886006 - DNA, 4001 bp, Homo sapiens
ttcactttacatttttctcaagactagctaggagtgaaaggagactttgcatacattcaagggatggtgccaaagagcttgagcttgattgagaatggtcactgcacagatagtatcctggggatgtggttggagaagccctctttaccatagatttcttagaaatttggtcaaaacacgtcagagctggctaaggtgcagtccttgctcaaggggacagaatggcttacccttttacttttcaccaaagggctatgaaaatggatgaagttcctagtttagatgactgctgggagccatgaagcagtgggaccttcactttagcttaaccggctccctggacctctgggaatgaatgtgcctaaaatggtgattttttttttttaaaaggatattctgcagctaagaaaaaggcctatctttttctctggtgaaaccttaggaagtcacccagatattaggtaacagcactgaatgaaaaggtgtattgttgtatttgaaatccctagattgcttcgagggatataatgcacttttatttttttccttcttccattaagtgataagggatgggaacagagcaggcatcaactagaacactaaagaagttacaggaaataccactgccttgtaaaactgtagcacgtctgcagcagttaaatgactcagatatgtaaagcctctggttagttactgtttctcaggataaaacctttccatgtgggtctgggcagtagggtatatggaagtgccaggtaggttggatggaaagggaacttataaatgggcatgtcaatcaatgtgtaaaatacatctctatattagtatcagtttaaacttacctgtaaactggtattagcaggtgtctttgtctggctaagatttctggctctattagctctctagatccctgctgaacctcaccttaaaaagccggtatgcttttgcttaaaggtatctggagctgttgcctgttaaactacacaggagaggatagccttagtgctgtctgttaaactttcatattctaaaacacagagtaattttggaaattattgttttatcaaaccataccagtacctatttaatatttgaattaatgagggaaaaggaagagatcttcatcaaaaaatgtggaaatggattctggcacatgttatggcaaaactaaattatttttgctgggcccttgggaaaaccacttgtcatctatgtacagtacctggtttttgcctctccgtgtgtgtactatgaagagatcttactgcagcatagattttctgagatgatcctaattttggatatttatagttcttacacatcatttaaatgccagagaaatgtgaatatttcaatattttagtatctaagcaatatgttttagatttaatttttcatgacaaaacttgtgggtcttttttgttttttaataaaaaaagatttactgagatataattcacatgccataatagtcgcccattaaaaattgttagtattttcacagaattgtgcaactatcaccacaatctaaatttggaacattttattatcccataaagaaagctcttacccattagcattgttccccacttttcccttcccacagcccttggcaatccctgttctacttccagtctgtagatctgcctattctggacattttgtataaatggaatcatgcaagctgtggtcctttgtgaccggcttctttcttttagcataatgtacttgaggttcatccatgttgttgcatgtctcagcattccatttctttttattcctgtttaatgttccattgtatggttataccacattttatttctccattcatcagttgacaaacatttggcttgtttccaccttttggctattatgaataacactgctacgaacactcacatacatgtttttgcacggacatatatttttatttctctagggaatgtacctaagagtaaacttactgggtcatatggcgactccgtttgcctgcagaagaatgggactgtgattcctagagaatgcctccaagacttgcagcctgggtgaccgcttcagtgtctgtggagccctcatggtcaagacgccattgtggaagttgtagcaggatggaccttaagtatccccattgtcccagcctcctgatgtttacttctttgtcatatctcctccctctgacctgggtggggactgtaacttgcttctgaccaattgaatatgaatgggacgtcactttgttgattatgttacattacatagggctctggtagactggagactctccttgtgccttgatgaagtacacagctatgctggagaaatccatgtggcaaggaactgcaggtggcccctggaacctgaggacagtcagtgaagagctgaggctccagttatgtagctgcaaagagatgaattctgtcaacaactgggatgaacttggaagtggatttttccctagttgaacctttgatgagaatgtggcccagctaatgccttgattgcagcctttgaaactgagcagaggaccagctaattcgtgcccagacttctgacccacgaagactgagataataatatgtggtgtttgtgtagctaagtttgtggcaatttgttatgcaacattaagaacagtcgagaatttggttccattatataatctgggctggatgccactgagtttacttgtcaaggcaaatattctgtttacttatcagtatgattatcacaaaagataaactgccatggaagttcaagtatgtgcttggttgctatagagtaatctatacctgtggggtatactctagaatgagaaaatagggatggcagaagtaagaaacagagttccactctgtctgcttgactcatataggagtctctacaaatcctgttccaaaaagagtcactaaaagatcagaacacaagaggaacgataacttatgtaatgagagctactatttattagggactatgggactgagaggatatgcatgaaattgaggccatgccctaatatagcttatgttatactgtagttataatttacttagctcactgtgaagctataatcttgaacttaacattcgttttctcttacacttctttagccaaataatagcaaaacaagcccagcctggtgaacaccacttctatttttggaatttacttaggatgattccatttttcttagtcatccatatctatatttaacagccctacactcagaattttaacttatagcttatttaaatctattaaattaaatctattctattaaaacctgcattttttccacctgcctctagacagatggaaacagctgatgatgtgaatctcttgactgtccttgtcatatcattttgtcttgttacatttaattcctgactgacttaagtgaggagagtaaggtggatcttatcctgtagcagagggatacatgtggaatgtcctccacttccttggtgatctgactttaatttcaagcactgtagagatgactcagtgtgcagtaactaatatgaaaagtcgtgctgcttataacatacagtgagtaactattaccagactcacctcagatgacttggaagtttcctagttgggagaatgaagcaatttaaaattgatgggaaatgaatgtctgaaacccagtagagtaaaagtttcaagcatcactgaaattttcatcttccgaggccgggtgttgtggcttatgcctgtaatcccagcactttgggaggccgaggtgggcagatcatgaggtcaggagatcgagaccattcctggttaacatggtgtaaccccatctctactacaaatataaaaaattagccgggcgtggtggtgggtgcctgtagtcccagctactcgggaggctgaggcaggagaatggtatgaacccgggaggcagaggttgcagtgagccgagatcgcagccactgcactccagcctgggcgacaaagcgagactccgtctcaaaaaaaaaaaaaaaagaaattttcatctt

SEQ ID NO: 1886007 - DNA, 4001 bp, Homo sapiens
ttattatattaatattatagccttaaggaagggtttcaaaaggatacaggagttcctcaaaaagttaaacacagaattaccatagagccccacaattccactcctacatacacattcaaaagaatcaaaactaagttctcaaacaagtacatgtacatgcatgttcacagtagcactattcaaaatagccaaaaattggaaacagtctaaatgtccatcaatggataaattgtgttacatacacacaatggaattttattcacccattaaaaaaagaagtactgatttatgctatgtagaggcaccccgaaaacatgctaaacgaaagaagctagacacaaaagtcttattattgcatgattccatttagatgaaatattcagaatatataaatccatagagacagaagggagatggtggttgccagggcctggggaaggagggattagagagtgactccttaacgagtttggggttttcctttggggtgatgggaatgttttggaacgagatagaggtggtggttgtgcaacattgtgaatattatgtcactgaattgttcactttaaaatggctgtttatgttatgtgaatttcacctcaataaaaaaaatttttagaaggattcaggtacttggctgaggcaggagaatggcgtgaacccgggaggcggagcttgcagtgagccgagatcccgccactgcactccagcctgggcgacagagcgagactccgtctcaaaaaaaaaaaaaaaaaaaaaaaaaagaaggattcaggtacttgtatcttcccttagctaatctacctccttcaatttcccaattctctcagctcagaaccacttggtcgtcttctcagtctcgattcctatcttctctcccgttttccaaacttgacagaaaaaggaagcttcaataaattgtttcttgaactacagatgaattttactctatgcctggtttatttctgagaggcagcagaatgcaatggttactggtattggacatgacgccagattacttgaattctgattcaagctctgccagttatcactaaggtgattttggacaagttccttaacttctctgtgccttggcatcctcatctataaaataaagatagtgagacccaccttataggtaaagacagtgacactgctgtaaggggattatctgttttctgttgctcataacggaatacgtgaaactgggtaatttataaagaaaaggagtttatgtcttaggaggctgagaagtccaaggtcaagaggccacacccggtgagagcttcttgccagtggggactctgcggagtgcaggggcagtgtaaggcatcgcatggtgagggggctcagtgtgctagctcaggtctcctcttataaagccaccagtccctctccgtgataacccattaactcatgaatggattggtccattccggacggcagagccctcatgacccaatcacctcttcaagaccccattctcaatattgccacactggggaacaggtttcaacatgagtttccgaggaggcattcaaatcacagcagggaacaaaacagtgactgctcgctccaagtctaatgtaaggttagctattactattagctgttactaatagcattactatacttactataataccatagttaatagtattatagattatagtagtaataataccattactatcatttaggaacctgagttcatggctatcgatttgttgagtaatgtatgaaattcagttcacacaaggaagcatgagagaaggggactctatctccctccagggcgggggccaactttttaattcggtttttaaattctcaggttcctacttaaagtaaacctggcctaaactctccctcttagagggcttcgctgtaaatgcgggaagcatgccaatctcaacaccagtgtctgcagaacactgtcaaatgcaggagggaacaggaaaaacaggaactcactgtctcctcgataaacgcgacggggcgagaggcgctcccaggcgagggcggaagtgatgtgagagggtgtagaccgccctggttgggtggaagggccagtcaatcctgggaggcccaaaacggggaccaatcgctcttgggctccgccctggaggcggggaaaacacgcccaccacgcgttgtgggcggtgccacggcgcacgcgcattcctcccacagctagtctatccgggtcctgatccgggactctgagatgaagagctgttggagcagaagagtcctgagagaaaaagacggaaaatcgtggaaaggcgctgtggaaaggagtagtgtggaaaggagaccgcggggatgaggagaggagagaggcaggctgcatcaccgaatgggcagcatgtcttaaagtacactgtttgtcttaaagtacaccgtaaagcctctcttgtgcctgttgtttagagcctgccctttttgcttaatgtgtatggacatctttctaggccagtacttatagagctacctcattcattttatttatttatttgtttgtttgagacagggtctggctctgttgcctaggctggagtgcagtagcacgatctgggctcactgcagcctccacatcccaggttcaagcaatccccctgccttagcctcccgagttgctgggaccacagacatgtgctaatttttttatgttttgtagagacagggtctcgctatgaacgtttgtgtctcctgaagttcatatgttgaaattctactcccccaggaggctgaacaagagggtaaagctcttataggagggattaggttattagggtgaaaccctcatgagtggaattagtgctcttattcaaaaggcctgagagaggtcccttgtcccttctgccatgtgaggttacagtgagatgatggctgtgagatgatgatgaggaactggccctcatcaaacaccagatcttctagtgccttgatcttggacttcctatttccacaactgtgagaaatgaatttcttttgtttaaaagacgcctagtcaaaggtattttatcacagtagcctgcacagactaagacaaatagtttctccatatctctaccataaatttcttatatttcttttcagtggcacctggctccatgtcctgtgtatgtctgactcccagaggccagaggtaggctcagaagggtggggttaggggatgggttaggtccagctggtagttgatgagggtggcctgagggatccagacaggaagctccatgccatgtttctggtataaggccaaagatcagaactgatggagccaaatctgttctcaggtaatggaagtgaggtaaatccaggaacggggggaactaggtaatcaaatcatgttgtttttgtttttgtttttgagatggggactcactctgttacccaggctggagtgcagtggtgccatctcagctcactgtaacctccaccttccaggctcaagtggtcctcccacctcagcctcctgagtagctgggaccacaggtgcatgccaccatgcctggctaatttttgtatttttggtagagacggaatttcgccatgttgcccaggctggtcttgaactcctgagctcaagcgatccatctgccttggccttccaaggccaccgcgtccggccatgtcatcaaatagtttcaacacaattgccagacactcatgataaatatctgtcatcaacaggaaagcatagttcaggaaattgattcaaaattacctaaataaaatatgttaccacttatattttcattagactgattaactttgatcagtttctgtttttaaaaactcagctcttgcttccagacaagcaaatggtgtatttctttcaagccccaaatttactttgtcactgtctcaaggttcatgcctctcacattcatcagtagatttcccttgactataaaaatcctttccataaattcgaagcaggaatcaaaacataatattgaagcagtttaacaaatatagagtgggaactttttttg

SEQ ID NO: 1886008 - DNA, 4001 bp, Homo sapiens
tccccctcaaaaaaaaaaaaaaaaattaagatggagtctccctctgtcacccaggctggagtgcagtggttcaatctctccagggattacaggtctgcgccactgcacccggctcatttttgtatttttagtagagatagggtttcactatgttggccaggctggtctccaacccctgacctcaggttatccacccgcctcagcctcccaaagtgctgggattacaggcataagccaccgcgcccggcccttttaaagtaaatcttgattgatggacatgatgaagtccgtgaggtacaaatgcactgccttttacaaaagtaactggttccttggaggtgtccattgggaagatggcagtagttagagctgccactgaggaagacataataggcagctctcattccaaggcagctgagccacgaagaaggctggcctgagtggtcagtgtgcagtaaatccaaatctttaaatgcagttcatgcttcacccccgaccgaatgacaaatggctcccccgtcagagcaagctggcaggtgatgcaccactcctcccctcccctgccacccgtggtgggacaatctgtcagcagccactaattctcaggaatggatggggaagtgggggaagtcaggctgtgtttattgggcaaggagaaggggtctctgagcccaaagaccttcttgggaaatgcagctcctgccctccacagcaaataatgctcaatgaccagtcagggagagcttgtctgggctctcttcaagctatggggagcatctagaaaatgccttgaaaccgtcagatggaaacatcctctcatcttcctccctcctggaagcaatgtgctccgccgctcttccaaacccttcctgtctctactggtacacctctccaaagccctctggatacctcccatgatatgcctttcccaggctccaggtcagcacaatgctctccccactctattccccaaatgcatacctgtctccatcgcagacaccttcacatgcctggctggcaggagctcagccctgcccatctgcctgtctttgttgtgcgaccaccttcagggtcctcccttgggctcagcagtgagctgacttgccatggagccaatggagcttaggtgtcaagatccttcacttgcacaagcccctttcaacctcctctcccccaacacacaattatgtattcatgatgtattttttttcttaaagaggacctccaaattatatctaagattcaggctctgtagaacctggctctttccggccaaaatatgatctttacagagctcaacatgccttgcacacactaggtgtttaataagagctgaaggatcaaagagaatggatcctgaccatgattacaattaattaagaaagtgattaacaggaaagggaagattggtgtttctctcaggcgagctttcctaattcttcctctaccatcaaactgaaaaaagccaatagtctcccctatctcaaatccaggatcctcggaagggtttgttaagtcacagccagctggaccccacctcgcaaggatgtggttcaataggtctagagcgggacttacaatctgcatttctaacaaattcctggtgatgttgccgctgctggtccgaggccctcactctgagaatcactttgagcccctgcgttatcaataggggccatattgcccccaagagggtgaaattgtatcttgaggtgggtgatgaaaaaagtttttattataaagcagatatatatatatacacacacacatatatatacagtacacaaacagggtgcagtatatccctggtgctaaaacttcacgggtagacaattagggggtaaaaatgtctagaaagactctttaggggggcaatcatgataaaacattgagaaacactgacctggcccaagtgcctacttggtgcttactccccagcagctgagccagaagccctcacctgcagagacctgcagcccacaccatctgatactgtggaagaagcattagactgggagtcacaaaacccaggttcaaatcctagctctgcagtaacttcaggccttcccagccacacccacttcagcttctgtactgaaagagacaaagttacaaccaaaactgccagggaaagaatgctgtgcgtgcttggaagagatacatgagggggttgtttatacaaataggagtgagcaatactccacagggcattgttgagtagcaaaagcaacacattaaaccatctcccaaggaggctgggcctgtcaacggccttgcttcgctgagcatggaaaagcacgtgtcaggcagagcaggattactcggcacaagagaggccaggctggggtgggaagaatggagagacagtgcctgccagtgacaggctggggcagggcgagaacaccagggaacatgcacatcgatcctgatttgagcaagtgttctcagaggcagctctataaattccttcaccacccctaagaattttgtactttgtcgcctgcctctaaacaatgcctttggggacagcagattctttgggggtagagccaaaagaggctgagtctactttaatgttatgctggctcaaaaacagactcacacatagtgggaaccaccagactcctgggttacaagtcttgtgtctctgttaactatgtgtccaatctcccaggccctaaactaggattctttaggaatgagtatgtaacaggaaagggaagatctgtgtttccctgaagcagctttcataattcttctaccatcaacctgaaaagaaccaatagtctcctctatctctaaaccagattcccatttcttccttagaaactatgtccagtcagccaccgaaccctataagttgatcccagtggatcaactcttccgctccggtttctctgagcacctaggaactggtccctgtgtctctcctggggggatccatttcttatccaggccccagctctgcctgtccagcccaggagccacccgaaatgctaaatctgtcttcttgctaaacaagttggattgtcataactgtatagccctggtctaagtgaggttggataacagaagtggtctaggaaaactgtgtcctggggaggaggtaaagtgataaataggatgtggtcacggtgtcctaggcagtagcccctcacaatgccagtggatgtcaggatcacgaatcagggaggtctgtttcggtagaagacatgagttggggaggtctgatttggtacaagagatccagaacttgtgtccagctggagtaaggagagtaaggtatagcagagacaggacaaagtaaattggacctcagagacagggcacggggcagagtctgattccaactgaaacgtaaggatccccacatccctcaacagtccctcagatggtgaggtttaggacacagtaaggaggggtggaaagagcatgggtttgggtatgtcttccctcatgaaaaccgtggagccagaagcagtagtgttacagtgatgtcatcccctgaggctcagtttcctcgtaggtaaggtgggaatggaaatgactgctgcataggctgtgagatgattttgtgagatgtaagcgcccaacagatggtggtgatgacgatgttggaatcaggtgactctagcctcttcactgtcacgcttgctctcgtctgaacgtgcttccatgtctccatgttgctcttgtgtccacaagcaaaagcaataatccattgccatttaaccagcacaaaactgaatgaggctgtcaccttccttttctgaaacacatgcttcagacagcgcagtctacagtcacttgagggctgggagaagatgctgtacaatatttactcctgttgaaaattataatcaataagtccctgactgttttcatatgtgctgctactaagctaccactccctgaccttgagcagatagatttgggatccacgtgtagccctgttaaattttgtcttttcagatttagtctctccctctctcttctccccc

SEQ ID NO: 1886009 - DNA, 4001 bp, Homo sapiens
gctcccccgatgtgttagacctgtggccagggcagctggaggtctctaggcctggacctgaggccagttagctcctggccaggtcagagctttgtcaggaatggaggagcaagaggagaggcaagggggaggcgcagactcacccgtgggcctgccccagctggggttaaatataatagtaacagtagctcgctcagtcagccaaccaagtcatcactgaaagtccatgagttctgggcactgtgctgggcctgtggatactgcagggattagtcctctgcacagatgggactcgtttcatttggacgctgctttatagttggccaagcacctttgttacctggttttctaaaatcctgccaacagtcctgtgaggtagttatcattatcctcattttacaaggggggaagggctccgaggtggtaagggacttacctaaatcacacagcctgcaagtgcaggagtctgatcttgaacttgggtcttcggactcagggttcagagctcgatgactccaaacacaccccgggctgctgctgaagagcaggatggagatgggtgtggagcatgagacggcatccagggtctgctgtggaggaggcaagtgacctcttccccttagatccatgagggtgtcccttgctggtcggggatgggacccaggtggccctgacttgactgttctttattttgcaggagcataggcgtcatcacctacatcctgtgagtatccctgatccaggggctctggctcagcttagatctgggggaaccagaaggaatgagagaggggcaggctgatagactgacatttactaagcacccaccataatccagatgtgttaagtccacacagcaagcctgaggctaagtgctgtaggtccatttcatccatctgaccctggcattgaggttgaataggcatccaggggagcagcctcaggctctccactctgcacaacctgtgtctgcattcctcctatggaatgccagggctcccctgctcaccctcccccagactgaggtatactggagaatgtcacttttcactcagaactcttttttttttttttttgagacagagtcttgctctgtcacccagtctggagtgcagtggcgtgatcttggctcactgcaacctccacctcccaggttaagcaattctcctgcctcagcctcccgagtaaccgggattacaggcacccaccaccacacctggctaattttgtatttttagtagagacagggtttcaccatgttggccagactggtcttgaactcctaacctcgtggtccatccacctcagcctcccaaagtgctgggattacaggtatgagccactgtgcccagcccttcactcagaactcttgggacagccctgtgaagctacttatgccctccccaatcttgcctcttctttctttccccttttccccagatccccttttcttcctctcactgtctctctcctcctttctccttcctctttgcctgtccctgaagtactcagttgcttagacagagatttcctgcatagctccagtgtgtagtgagttacctctggggctggagtcccatgatactatcactttccatctctgtggccttgggtagggacttaacctctgggcttgtttttctcatgagaaaaataggaatcacaaacttcctgccatgggtgtgttgtgaaagctaaataagtcaacatgcgcaagtctcctagccctgactctggaacatgcacagtgggctagtgagtattcattccatcagcccttcccaacctttttgccttcatggcacacatggaaaatgctatttttatagcaccctggagtaagagtcaaccagatggggcagggggcaccagtgctcagcagctgagaggattattctctcaatgatccctatgagccaggtccctgattctcccagcagctcttggactaggagccctgtgtgacgtggtggatccccctgagctgcagctgaagatctcaaccctggctgcacagcagagcttttaatacccaccatggcccaggccccaccccagatctattatatcacaattgctaggggtagggacttagtatctgtatcttttaaaactccagctgaatttgatgcaaagagaaggctgagaaccatggatctatagtttcagatcagagccagaacggtctgatgttggctcttgaaactttgatttcttcaggactctgatttgaactatgaagggatcccatgtaatcccagcattttggaaggctgaggtgggcagatgcttaagtccaggagttcaagaccagcctgggcaacatgacaaaaccccatctctacaaaaaacaaaacaaaaaactagctaggtgtggtggcacacatctgtagtcccagctacttgggaggctgaggcaggaggatcgctggaggatcgcttgagcccagaagttgcagtgagctgtagtagcaccactgcactccgtcctgggcaacagagcaagaccctgtctcaaaaaaaaaaaaaaatggaatcccagtgtctactgagcacatagtcttcttgtggctcatttgaatttaacagctttgttgaggtctgctccatggcaggcactgtaccaggcactaggatactgacatgaaggagggtcttccctgcttgctggggctccctgtctgtgggagacacaccatacacctaactcacacccagtggaaccaaggttaggctggaggaatgaacatgcctctttgagacacagatggggagccactggtttgctggactgctgaaggtttattgagagagaaatagagacagcacatgattgatggatcaatttgaactgggatgtagggaacgaagttaattctgtgggtggaggagggaagggctgtgctggctgaggaaatggcatgagaaaaggaacggtaaaccttaagtgtggctgaagtgtaccaagcgtggggtaaggaccaactcttgatgccttgctcaagagtttagatgtgatcctgtagaagatgggaagtcatagagggcttttgtgttctcacaatgacaataataatggccattaattccagagcccttagtgtgggccaggattgcatgaaggcttttgtatgcatgtattcttcacagcaatcacatgaggtgggaattttattttcttcattttgcagatgaggaaactacacaaggggttctagcttcacacagctaatgagtggctgagctgggattcaaacccaggattgcaacaccaaaatttgtacagtgcaccttgctgccaccatgctaagaaagtggctgtggaaatggggatgactttcaagagatatttagtaaatggaaccaacaaggaagcttttggccagtcagatgtggcaagggaatagaaagaagagtccaaggtgactcctgtgcttctagctcgggtacatttgtgaagtaatgtgattcatcaagggagtgcttggaatgggtttggacacaatgagtttgggacaatggcacatctgatccagacactgctggatcatacctctaccaaggcatcccatgaacaactgaaatctgagtcaggagatagtagatgtaggagtcattatttgtatgacatccttgacaaaccctgttggggaaccacacagacccttcttgtccctaatggcccatctatttccaaactttgtgggctctgctcaagttgctcctgtaacccagaaggcctttccgtctccttctctgactgctgacaacctctttattcttcaagacacaaatgatgcaaatatctgtgccaccgtgaagctgcactgggcctccctctttcctgtgctcccctatcctttggctggccttccattatattctgcttgtcttgctggggatcacaaagagacatgtctctgtgtttctctcccctccgcttttgagtccgttgaagacacaatttctctctgtcgggtgcttaggaggagctccatgaa

SEQ ID NO: 1886010 - DNA, 4001 bp, Homo sapiens
aagttggagccgccgttggagacagcatcaagtgggtttatttttcacccccacgggagaaagcagtaagtcccttcccatctccatttcctctgcaaatcagggtaacctgtgtgcaaaagcaccacttagaagaccccttaactcctggagcacaggtgactctgtgttctagtggcactcggttcatgaggctagcagggcactcacctccctttgttattcttggttgtaagtgtctgttgccctaagactgaaagtaagtccacagcaggggtcacaccttgcttttccttgcaatcttcaacacagggcccagggctccacaggcacacaacacatgtgtagatgaaaggcttccaactttgcggttcatctaggtgctgaaaatgtctgagggaaggaatccctaggtgcttctggacaacagccactgataagcaattaagctcatttgcataaggttaattaaacacaggtttactgctcagaaagaagatccttcatcaataggattcgttttgggagcaggtatcaggtaagtgattgttaacctagaaaaggaaaactttgttcctgttccaactgtgtcctaaagggggtattccttcactccgtcatacttttccaggtcactggcacacaggtccacccattcgtagctaccctgctctaaagccttgatccgttgcaaacatgtgactcctgccttgaattcagaacaccaacaaaagcagaactggatctgcatgctcttcccatgaattctaaacagcctcatctcctctctccatcctcagatgcttggctaagagcacaaactctggagccagatttactgaggtctcaatgctgccctgtcattgatgagtgacattgggcaagttgttgaatctctctgtgccttagcttcctcatctataacatagggagattaacagtacctacttcatagaactgttttctgttaatatatgtaaagcactgagaacagctcctggcatacaagaagtgctattgtattggtgtttgcaaagattacaactccctctgaattcactttcctgagactcaagccaggaatgcttttagagtcccaaaatgtaccccagtccatcaccctcctctcctccaggggcccagaaagggggcccagaaaggaggacaaaccggtgctttttcaagcctggactattgagctttctgaagacacattcataagaatctacaagcacagaggttggaagggcatcctgcaacgccaatgcatggactattgagtttctggagacacattcataagaatctagaagcacagaggttggaagggcatcctgcaacgccaatgcattgactctatgtgtccaaagaggcgaagacttgcccaagttccctcagcaggttagtgcagaggaaaggaagtcagccaggtctctggattttctggggctaggaactgcctgtctttttcctaatttctgttctaatcttttcttttcttttaagtagcgacagggcttcaccttgttggccagactggtctcgaacccctgacctcggtatcctcccagctcagcctcccaaagtactaggattacaggcgtgagccactgcgcccgaccagtttctttagaacaatctcaacagtcctttttgggccaagtccttcactcttggattctattttactccccataacacccccttccacatacgtagactaataatattccagtctgatgggttgtctgtgctgaaagagagggagccacatcgacattggtcgttttcttatttggcatcccaagggagacatttaaaactactcacccaattgcccaagtggcctccaaagaaccagatatctctaggggaagaacagaaatccagccaacaaagattgtcctctaacgccttacatcgaaggcccagagccaaggaagaggcggagatgtcccgcagtcccctatgctcggctgttacctggaaaggatcatttcacttccactgaagagaaaaggaatgagtcctgaatggaatgctgcccggcagctcccagcgcccgctggtagagtacccgccgctgtccctgggtggctccggggcttcgagcctaacagtcctcctgcggcgcgcctggaggctgggagctgtgcggccgctcccggcagatcgactgaggtcccagtggccgcagggcccacgtgcatgctgaagcactagcaaagcagttgcaccatttttctgttggaaagatatttcagaaaacattgcctaagtcatcgcaggaaatctgaacgtggttggactttgtttcctctttgtcttaccactcgggactgtgtttttgtaactcaattacctgagacctgggtcccgatcttttcagggtctgtgcctctgtaagtcttatcaggctttacctctcagtgattggtgtaaaatgatgacagtaaaacagtaaaacccacagggtggggctgtcaggaattttttaaacattattttatttttctgccccctcccccttttctttttttcttttattatttatttatttggtctggaatatttcaatgaaatattggtgaagcccttgacatatggtagatactcattaagtggtggctttttttttttttttgattcaaaggattctgtcactcttattgcaagttcctcatacgtttatcgttgcactagttcctgttatgtttcggagctgaaatggatcaactttggcaagacgaaatttccttaagtgtaaggtactgcaatactcaggattgtgcagagggaagcagaggcaagatgggaaagatcgcaaactagggcccgagggccagaggcaaaatgcaccgcagagatgaatctgcctaggccccacctccttctattccgtctcctaggactactacattttatttgtgttaaaagatatcacctgtagatgaaaggtgttttcagtggtaaaccgtgcaccggcgtataaacgtggtgtaaaaaaaaaaccaaacagaaaaacaacctgatgtaaaaacagaaaaacaacctgatgtaaaaatatggaacgcttcacgaatttgcgtgtcatccttgcgcaggggccatgctaatcttctctgtatcgttccaattttagtatatgtgctgccgaagcgagcacggtgtttcgtcctttccacaagatatataaagccaagaaatcgaaatactttcaagttacggtaagcatatgatagtccattttaaaacataattttaaaactgcaaactacccaagaaattattactttctacgtcacgtattttgtactaatatctttgtgtttacagtcaaattaattctaattatctctctaacagccttgtatcgtatatgcaaatatgaaggaatcatgggaaataggccctcttcctgcccgaccttggcgcgcgctcggcgcgcggtcacgctccgtcacgtggtgcgttttgcctgcgcgtctttccactggggccggggcggcgcggagggttcagacgcgggctcttactcaaacgctgatccccgaaactaccgagcagtgtctgcgcgacgcgaaagcatttttggagcgaggggccatggtgcccatgggattcccacgggtgttggactcgggaccccgaaaaggttgcgagtcgctggttggacccttccctgcgcggggacccgagagacgtgaccctagcgaggcctggggccacccactgtgggctggaaggggccgacaggggttgcggcgggggatcgtggggagggttggccagggcgcgccttcagcttcccctcggcttctcggaactagctctctgcattcggagccaaggcgatgagggtgtctgctttgggacgcaaacttccagtagtggtggaagtctgggaagggtcaccaccgtttgagccaacatttagaaagagccaggcgcttaacctaaatggtatcatttcccccattttgcagtttagcaaacaggct

SEQ ID NO: 1886011 - DNA, 4001 bp, Homo sapiens
actgttcttttccagcccatcacgttgagcctcctttttcctactcatggcacttagcactcagcaaaaacattgatcagattatgcatggggtattttatactgcaggcacagacctggctcccctcagctgtctcaatggcagcccccaaccccgttccaggacagtctagtattccttgtgacaaactcttgctgtctccttgctggaattctcagagtataatgaagacatttccaaactgaattcacatatgctgcctgaaaaattgacatttaccaatgaaatgtgttagggtcccagtttaaatacaacacctggcctggcgcgatggctcacacctgtaatcccagtgctctggaaggctgaggcaggaggactgcttgaggccagaagtttgaggctgcagtgagctgtaatgacaccactgcactccagcctgggccacagagcaagactgtctctaaaacaaaacaaaacaaaacaaaacaaaacgcttttcactcccttgctctcttgctggggtgtgtttgtacaactatttcaactatttgccacaacttcacccagctctttttaaaaaaataaactttattttttagaacagttttatattgaccaaaaaatagtgaagcaggtgcagagttccctgtatcccttgtgcctggctgcccatcattaacatcatacactagtatcatttgttacaatgaacaaacccacattgatacggtactcaggttttcttagtatttaatctgttatgtcctctgtttgctccacgtcgcattcagtaggcttaggctcctcctggctgtggcaatttctcagactttgtttctgatgacctgaagggttttggggagcactggtcgggtgtttttgttttacaggatgcccctctgttgggattcgtctgatgtttttcccagggtaagcctggggttgtgggttttgggaggaagactgcagaaggaaagtgccattcttattgtctcacatcaagaggacacactggccacgtgacttctcactgtgatgcggcctggatcacccggctggggcagcgtgggtcaggtgtctccactgcacagttactctctgtttcttcatcttaagcttttttttttttttttttttttttggaacagagtctcactctgtcacccaggctggagtgtagtggcgccatcttggctcactgcaacctccacctcctgggttcaagagattctcctgcctcagcttcccgggtagctgggattacaggcacctgccaccatgcccagctaatttttgtatttttagtagagacggggtttcaccatgttgaccaggctggtctcaaactcctgacctcaggtgatccacccgcctcaccctcccaaagtgctgtgattacaggcatgagccaccgcacccagcccatcttaactttttaagaaagattacattgcttcttaccgtgaccctgtggagactctcaggtgagcctgttggccagtttcttgcatgaatatctgattcatttcaccttctgtgctacatggcagttcatttcttgtcacaggcccacatgcaaggtgctccagaatcaccttatataacagatgaaaggtccctggggagggcagctggcccaatccaggatttggcagatggggcatctgaggctcagagaaagggagaggtgggcccaacgtggcacagcagttatgaggccaggacgaaaacaggtctcttgttgctcattccagtgccttccctcctggatcacactggccctctggctttgacagggaaacaggcttcactgcttccctcattcctatgatctcttctggttgtggacacacctcatgcttaacagattcctacttggggaggggtgcctagaggatcccgggaggggaggaggtctctctgctggtcagtcataccattccaaagccctggccatgccttctgcagtcccttccagactccccgctgctgtgatagaagcacatggcttctgacccctgaattcagcaattcctcaattccttaggtggaagttcttttccattctttttgtttgtttgtttgtttttggtgaggggtggatcttggccagaatttcatgacgagttaggctcgctggtacacagatggagtccaaagtcacgatgctagaggctgcccttcagagagacggtgtggatgccttgtctctctctctgtcttggctgcttcagaaaccaaagccattttagatgcagcagttaaatcaatgcaacgatatactcttctgactcatctcacgaaaccacctctgaggttttatgtacctccatgcgtgggatctcgctctagttccgaaacacattctgaagtctccgttacacccgctctttcatgtttaagcctggtaacagcttttggtacaaaatagtatgatctgacctggcccactgtggaagttagtttctcttctctgacgttctgcttcctcagcaccattcaccctgagatcattggcaaaatactgagggatatgaggctcaatccggggtgactcaaggtccagcctccaaggagaccagtgggacctgtgagccccttaggacatccttagaccttgggaaaggtgagtcccttgtcggggagcttggaggagtggaaagaatcctcttattcggggagccagcaagccagattcaaacctcagccccaccagtgaccagtcatcttccctttaacccctgagcctcagcttctcattggggaaattggaggtaacaaggcctacatcgtgtggatgccatatgcatcaaattaaatctggcctgctggaggctttcagtaagggttaaaaaaaagagagaggtcgggtgcggtggctcacacctgtaatcctagcactttgggaggccgaggcgggcagatcacgaggtcaggaggtcgagaccatcctggctaacacggtgaaaccccgtctctactaaaaaaaaatatatataaaaaattagcccggtgtggtggcgggtgcctgtggtcccagctactcaggaggctgaggcaggagaatggcatgaacctgggaggcagagcttaaagtgagccgagatcatgccactgcactccagcctgggtgacagagcgagactcagtcacaaaaaaacaaaacaaaacaaaacaaaaaaaactactaaatgtatctatatgatggttgctcattcacaaatgcactgtcatgttttagctcatttttcctttgctggtgaaagttggcaggctgggtactattaatcccttcacatggaaagactgaggctcagagaggctattctttggccagatcctgtagtttttcatggagggactaggaaagaaacccagggcttcagtgtccatttccctgcgccagaaagaggcatctgcctgagtcactgatagttagggtgagtaacaccagttgttgcatccagcaaatccagaaatctgagtcctgacacaggaggagtacatttgtcactctcatcatactccaatgcaggttgcaatggggcagggtggagggaccctctgttccacacaagtcactcaggcctccaggctgcttccattttgtggcttttttttttttttttttttttttttttttgagatggagtctcgctctgtggcccaggctggagtgcagtgacatgatctcggctcactgcaacctctgcctcctgggttcaagcgattctcctgcctcaacctcccgagtagctgggattacaggcatgtgtcaccacccctggctaatttttgtatttttagtagagatggggtttcaccatgttggccaggctggtctcgaactcctgacctcaagtgatccacccacctcggcctcccaaagtgcagggattacaggtgggagccaccaagcccggccgatccttcttcctccaagtcctcggagtcttctccagtcagtggataggaaagtgaggctggggaattgggc

SEQ ID NO: 1886012 - DNA, 4001 bp, Homo sapiens
ggctcagatcttgtctggcttcccctagggacagtgtggagggaggatggccagccccagccgtggggccagcacaccattgagtccctgcgggaagtgtgctctgagagcctgctccttgcaggtcttgaggatagagatggggtattcacaggtgaccaagatgtccctgtccccatgctgcatgcagtctggccaagacgacagacaccaccgaagaatagaccacaagtgtggcgggtgtgaggaatgggtgagtcagaccttccctgatcacagggaccaagtccccattctaatctatggtcacattgtgatctctcagttggcaaacccgactgccatggcccagagatttaccagccctgatctggggtctgcacatgcctgtggaggggagaactcctgctcactgtattttgtgccaggggtgtaatcacacccaggcctagccccaccagtcatttatatcccttcttccatttgtgccttgaccatgagaaccacacccgaatgctaccttctgcacatatgcgtgcgtatttccgtgtctggtttgctgtgtgtgcatacaatgtatacagcagtcccccttatctgccgtgttgctttggacaatttcagttaccagcagtcaaccacagtccaaaaatattaaatggaaaattccagaaagaactcatcagttttaaattgtgtgctgttcagagtagcatgatgaaatcttgtgccttcccactctgcccagcctggaatgtgaatcctccctttggccagtgtatacacactatgttcactacctgcccagtagtctcttagccacctcagttatgagatcaacagtatcttaagacttgcattcaagtagcccttatttacttaataatagccccaaagtgcaagaatagtgatgctggcatattggtacaattgttctattttattatgagttgctgttaatctcttactgtttctaatttataaactttatcataggtgtgtatatataggaaacagcatagcatctatagggtttggtactattcacaattccaagcatccactgggggttttggattgtagcccccttggataagggggcactgctatatattttatttattcttcttccttctttttttttttttgagactgagtctcactccatcacccaggctggagtgcagtgacgcaatgtctgctcactgtaacctctgcctcctggattcaagcgattctcatgcctcagcctcccaagtagctgggattacaggcatggggcctggctggttttcgtatttttagtagagacggggttttgccatgttggccaggctggagcatattttcaatagaacaaaggggagatctgtatagccagagggacaatcttgtgatttggaaatgagatcttgcttcctgtcccagcttttccaccaaagttgtctgatcttggatgacttatttaatttctctgagtctcagtattatcagctgtaaataataaaactcatcttaccaaactcttatgaggctctttctgaagcaatacatttgaaatcatattacaacatcaaagtgtcatacatagaaacttataaataaataaataatccatagaaagtgatcatttcattacgtctcctaccagagtctactgactccattttacaacgttaagcagggttaagcatcttgtatgttgccgtaccaagaaataaatcaatgaatacaatgtagctacatacctgagtgagataacttgggggtgagtggagagcaccaaacccagagtaccctagcaaccgaggcaaaaagaaaaacgctctggcttgcagagttttcatgatctcatttgtaaaagctaaattaaaagttctgctataaagcaggcattgagtggttgctttctcataccgtggttacagaatgacccagatgcagcaccccatttcaccagaaggtagacggaggagttcccattgcaaaactgctctccctctcttactgtcttttagccacaatgcccctattctgaggtcctgctggcccctgccgcaaccccactgcctgcagcttctccctcctcccgtttggcaccatccttcctcctgctgacttccttctccaaatgttttctcaggtggttaagctgaaaggccaagtcctgtcggtcatgtatcgatttcgcaccaagaaccgggagtggatgttgatccgcaccagcagcttcacattccagaatccctattctgatgagattgagtacatcatctgcaccaacaccaacgtcaagtacgtacactgccatttccctctcctggaatccacatgcgcttgcttgggtccagagctggcaattttatttggagttctttctccctgccggctctccctgcagctggaaatccctgtaggattaagaatagaggagactgtaggtccccatcactgtctccctcccatgttcctccttctcatttccctcctgatttgtgagaaacaaaagaatgagtgataatcatgacactcccttcccttcggtgcaaggtgctccagtttctgctcctcttttcttccccctgagcatggacctcagccaactggagctctgctgggccccgccttgttgctccctgttgcagcagctgcttgtgcctggtttcttggtcctaccgaagccgggggtggaggaagggaggctgagcctcttggcagctctagggaatgggacaggtggcctgggtgtaggcacctcaaggacacatgatttccctgctgcccagccgtggaagcattcctccctgcccagggtccgaggatcccaagatctctgctggaatcaccactcctgtgttccatgcatgttagcagacctcacaccacttcctggctgtgcgtccttgaacaagtcacttcctctcttcacctccctcataaggttgctgtaaagattaaatgaagtcaagctacaggccagacacttggttcaacttccagcacagtgagcatgaccttgaacaggtcatgcctcctctgcatttaatctcaaggaaatacaaggccaaggaaccaacacaaagacatttggacaaaaggatgtccaagcaaacgcaagcatgtggaagccatggccagtgtgtcgggaggactgtagcatgcaagggtatgagatgaggctggcatccggagaactgtccccatgtctcaccatcgtagtcagtggcaccagcatccatcattttccccagttcagcactcagtcgggggacctgtttccaaccctaccacctcttcttcctcatctgctgacatcccttctcggtagcctccctgggattctgaagcctccaggcggtcaccacagcctactggcactctcagaacttgcctggctctgccctctgttgccgtctctgagccccttggatttgggagttcccatctgggccccacaaagtaaccttctttccaggcaacaccaccctctgagtcctcagcctctgccctgctcctgggccagaagtcacagagctggacagacaagcccatgagagaaccctcagagggccaatgacctggatttttttttttaattttagattcaggggttacatatgcaggtttgttacatggatatattgcatgatgctgaggcttggacttcagctgaatccatcacccaaagggtgaacatagctcccaataggtgatttttcaccccttccctccctcccaccctccctctctagtagtcctcccagtgtctattgttcccatctttatgtctgtgagtacccaatgtttagttcccacttaaaggtgagaacacgcggtatttggttttttgattctgcattcattcacttagggtaatggattccagctgcatccatgttgctgcaaaggacgtggttttgttctttttaatggctgcatattttgtgtcatttatgtaccacattttcttcttcttctcctttttttttttttaaattgag

SEQ ID NO: 1886013 - DNA, 4001 bp, Homo sapiens
atgcaagtttcttgctctgcgaaatatccccccagtgatgatccagaagaaccaaggctctttccaagctgtgctcattagacaactgcttctgaagaagttgcttctttccccactatgattctacagccttcggtgttgagcaagggatggttgccacacacccttggggtggatgactctgggctcattcttgtcaattcctgaccaaagaaatgtcctttgaaggcagggagacctggctgagcagccaggtggaggaggcagttggctaccctctccttgcccttggcaacttgacagtccccccaggcaggctctcaggatgccaaagcctccaagatggcccgttttctttcctgcatcaggcacaacccaggaaagctccactggccatcttgggaccgaggtttccagggagaccttgccccatcactgatggggaaggcgccttctcccttccccaagccccatcccagactcagtctgacccctgggaggccaaggaacatggagctaggcctgctgggcaatgactggaagcaacactgctcccagcccccagcccccacaatgtagcatatggcttggtttcaaatcccagttccactgctgtaatgtggcggccattctccccctgtaaagggctatctgggcattggtcctggtgtttagtgctttatagaatttgacctcaacttttaaccctactatcattaagtctgtatcagagaatcaagtggtttaaccaagcttgcacatacatgagagccacacgtgagagcttgaacccaaactcaggtgggcctagctccaaatccacattctgtcagttgcaaccgtgttttttcctcctcctcctcctcctctttccagcatgagacattgggcaagttactgtgacctgtggacccatttcttcatcagcaagaagaggacaagaatgtctacctccgggggtcactgtgagggttaaaggaggtagttatgcaaagcactggccagtgggcttgacaactgcttgacaagaagggtttgacaagagccaggatcttggcagatgacggctctgcatgctcccagagaagcgggaggcagggcggtgtgcccaggttccttccaacccctgacccagcatgtagaggaagaggctgctacctgtctaatatctacgctccctttacttggcgttggagtcctggagtttcctcggggcactttccagtcccgctcgcagtcaggcgtggatgtgactgagttctagctgttgggaaaatggagaagttatggtgcaacttctgggacatgcccttaaaacaggcttgcccatcactttctctcctcccctttccactggctggaatgcagatgggatggccggggctgcgaaggccagggtggaccaggaaaccgctgccttgcatggaagacggcagggcagggagagagggggtgggagttggagagagagggagagagggggagagagttggagccctgtgggccacagctggctcacactcaccctgtgactgtgtgacagggaacttcacctctgctgctgtctggactctagctggagccaactcctggctttggatgcccagagtgaagcgctcaggcctgtgtggaagtggtagcgttcacctgtggtccccaccactgctacaggagcagacagtgcgaggcagagtcccaggatgcccctcccagggctgcacctctgggcagggggagggacgaggccctctgtgctcttggctcttctacacgcaccatactcacctctgagacacacccgctcaagatcattccattttctaaggaatctggcgtcatgcccctacgccagcatcagaagcacttcttacactgtgaaggcgctatttggattttgtgggccagcacaccactgagcaccacggaagccactgctgagagccaccgtgctggggcacctccgggttcctgttcacagcagagccaccctgcacgcaggctgcgccacggcatgaccttctcgggctgcccgctgtctgaggggcgcctgaaggtgagatcacaaaacacagaacacgatgtttacccgtgagcatacgcttgagctcatgaggttcatggtgactatgaaaacgcacaaggagggcaggtagcccagggcccacggtgcaaccagtgggcgcaacggtgccgtgagctggcgctgcggccgtgaagctgcctcctggagccatttcgcccctctgaatggcgctcgggttattttcagacaaaggagcatcaactggaggttctgccttttcgaatggatggaattacattcccaacttctatttaccagagtttccaggagagaatcactctcaggaggggcagacaggatcaggactctccacggaatcaacttcatggcttctaaagcaacttcaggaggcacaggaatggggagacctctcatctgggtgggttcccccttcccagctcatgagaggggcagatgccagcaggcaggccttgagccttggctggtgggacaagaccaaagtcagccaccagcaatgtctccaagactgatcccagcacacaaggcaggcaaagaattttctcaactctttttattaagttagaaaactgataaaagcaacacaacttttggggaaagcaccatggcacgtcctttgtgctatgtgataagtgtgctttatctcaatgaagcaaccccacgggtccaggcaccctccctgcagtccccgcggccaggctcctgagtgtgccagcagagccgtcccctgggaccacagccaagtgccttcgggcagctggcctgacacaggcggggtctgctgggtctacagggtccaaggagccccatgcagccagtgccccatggcgggcgtgtcagtgggcaaaccctgcccaaaggtcccacccccaagaggcctccaggacccgcaccaaggcatgggggacactcgtggctgcttaagtaactggtatgtgcacagccccctccgcggccctaatcttgagccagccaagcagtgttcacactgcaggtgcctgggaagccccaagtttggacaccctgcccagtccctgtcagggcaccaacacccctccctctcaaatggtggcttgggagtgagcgagaggcattaggatggtcactgacaggcgccaacctctccatagcccaggtgtcagggaggtgctggtgagggaccccagtgactcaggaggtgacagcaatgaacaaatgttcagcagttctctcggggccattcttatcttggagctcagggagcaaatgggggccaaaacgcaagaggatggtgagggtcccgtcactgtcctccacactgagatggatgcggccctggtgggatctgcaggggacaccctggggtccctctgctgtctccagctcacagctgctcctggtcttggagggcagcgtggtctcctggggagaagcccccagtgctgttggcaggtgtgtgccatgggggtcactgctgcctctcagggtgggctctgaggaggggaggggaggggtgacccccagggcactcggagccttgagtctgctgcaggcccagctccactgagtggccacgagcaactgtgtccccaccgggccacagcactgagcaaggccctgagtaggtgggctgggacttacagctttgtggaaggggcccacaaaccttggaggtctgggtgtcctttgctaataaggcctcatggatgtcactgaggcccccctgcagtttctgcaccttaaaaaatctgtcttggtcacctttctggtctcaacccctgggaacctagtttcccaggcccaggacaccatctatagatggcagtagagccccagcagggcaggccaggagggaaaggatgtgtggcagtgccgcagccccaaagcccacccggggcgcctccctgcccctgcctgcccggccccagtccaggacctgccaaacaggtgatctcaaggc

SEQ ID NO: 1886014 - DNA, 4001 bp, Homo sapiens
gagagcaaaagagagccaggagtgagtgggaggaggatggttggcagctgctggaagtgggacaaggagttaaatgtcctttgtgtccagctcccacaactcccccacctttcccttggtcttgatcatggcttttgatctcttttgggagctccaaggtgcagaagcttcttcagagagtctgctgatgaagcactgttcagcatgtggatctagaatgaagcctccttgaccgccgctatggcagcttctgctcttggctatgggcttggacccattctagtgggctcccttccccagcatgtctggccctgtgggtatactcgcctcctgttattgtccccgttaagccatcaagccactgacttaccaacagtctacctattgtcatatgtatctggatccttcaagttggagctttgctgctcttctaggagttccctgaacttctagaggaagtcacttaagaaatttgactccctgttttagatcactaatctttccgggcttcatgacttcttggaacttgtcttaagattttatcaatgttaaaataattaagactatgtagaaatgttggaaagtgtttataatccaatgttagtttttaaaaaagtagtatatacaatagggtatcttttctccatagtaaccaggtatatttctttgctgacatggacaagaagaagggaacatgtaagaatgaagagtcattatctggtaggttggattatcacttttttttttcttttaaaagttccctgttaataactctttataaaaatcacttggctgagatgtttccctgtttcagttcaatgtttaaagttatgtttccaggctgagtgcagtggctcatgcctgtaatcccaacactttgggaggccgaggcaggtggatcgctgggggccaggagttcgaggctagaatttgaggccagccaggccaacatggcaaaatccccatctctactaaaaatacaaaaattagctgggcgtgatggcaagcacctgtaatcctagctacttgggaggctgaggcatgagaatcagttgaacctgggaggcagaggttgcagtgagctgagatcgtgccactacactccagcctgggtgacagagccagactcagactcaaaaaaaaaaaaaaaaaagttctgtttccagtcttggccagacatgctttgcccagcatcagactctgggtggaatcttcacaaaagcactatgctgctcatcgccctggaagaggccacagagttatctttcatttccctgcaccttccttcttgttgggacaattgcagcaagttagcactgctccttccataacttttctgtgccctttcccccagtttttagcagttcccttctgctgacggctagttatataagacctattatgatgggacttctctcattcactgcctctgaattgacttctttcctacgaactggaatatctcaggggtgatatgaacccagggagccttcttatcacagacaggtctgattcccccactaaaaacaaacatctctacagttacaagcaccaatacactttgtaattatggactatgatgtcgttcctaaacgtctcaaaataattttacaaatattcactgggattaagtggcataatccctatcataaaaatggagttatggaggtatttttccttctccactgtcctcaggggaaacagaatttctaaagagaagccaagtttctggggtttgaactttctgattctttgaacattctttaagaactccaactatatcttgctatcatttctactttccacaaaatcctggacagtaaagaaaacagagacatgtaagatcaaaaagttttgcatagctgtgtcaaaaaacagagatgctagcataaataatccagttttaatcacagtaaaaggagccccaaactcttatttcaagtggggcaggcataaagaagtaactcaccagctaagatttctttatgcgtctcagcagtcttgccacgctgtgtcttcttggggaagtgtctctagtttgctagctgaattgccgtgggtgagaactatgaagccttggctgactacctgctctgccggccaccagatacacctgagccctttctcagtgcttgagaggaagttggatccctgccagggctggcttctggccagagaggcaactcagatcaattggtctactgggaagcttgctgactttcacctgtccaagctacaaagccatcagtgttaactgcactaggcttccagcccactgagctctttgtcaggcactagagcctaaacaaggtggcctggctcagtctacagactccagctggaagagaagcacaattgtgctgcatgctcctagtaccctacacccagtggagatgaatgcaaactaaaatgtaggcaactgggtgttgcttgtcagttttgtttggaagcacctgaaataaaggagtcagctcatgaattcctgcaatggtagagagcttgagtgcccaagcaagaggaaattaccaataattttaatagtatgtggcatctctgagctcaggaataccttctagctacaaaattccagtgatcaggcatttcctgtggaaaagaggttctaagcctacttgtttagaaggcttcaacttatttcagtaataagactgggtttgttatgaccaaagttacattctatgagaggccaatgtgtgggggaaagggatatctggaaatctctactcgttcttccctgagggttcatggaagttgatggagttgcccaaaccagggttggaactttgggagaagcagccccacttcatccagtaaggatgtttccacagaggacaaagatcattgacatagtactcattatgtgccgccgtgctaagttcttcatatgcctagctgattaaatgtattcctccctttctccctttggggtatacttactctaggaccctcatctctatttttctctttctcttcttctttttttttttttgagatggagtttcactcttgttgcccagcttggagtgcaatggtgtgatctcagctcactgcagcctacacctcccgggtttaagcaattctcccatctcaactttctgagtagctgggattacaggcatgcgccaccacgcctggctaatttttgcatttttagtagagatggggtttcaccatgttggccatgctggtctcgaactcctgacctcaggtgatccgcccgcctcagcttcccaaagtgctgggattacaggcatgagccaccgtgcctggctggactctcatccctttaaccaggaagaaatcaagattcaaagaggttgaatgactggcccagagtcacacagggtggtgaatggtggagtttcaaaacccaggttcgtatgatgccaaagctctgccccctataccattctgcctgcctgactccgaacggaagttgtcagatttgatattagcactactcacgtcaggctggcacttgtgagcttgctggaatgtggcctgtgaatacactatggtttagaagacgggtaggagaggacagtgcttcagactgagaacaagaagaacaggaaggatatggaccaaatccctgaggctagaggagagtgggttccccagcaggtgtgaaaaatgagaaggctgtgagaaaccttaagctattacagtctaactatatctcctaaatgtctgagtgtcagctaaccatgacattgtgaataatgcacctggaaagaggtgacactattgcaccaaggtttacttcacgtaaaatgctaagtttccccatgcatagaaatttgaattattatgatgtttaaattaatcacacagagtgctttataaaagtctcagtgaagagctgttattccccactcaacagaagtaggagctgaaggactcagggatcaagtaaccagacaagagtcatcatggtaactggtgtcaggtatgcagtgagaatttacaatcccttgttggaa

SEQ ID NO: 1886015 - DNA, 4001 bp, Homo sapiens
gggggacacacgcacacgccagattgtgcacacacatgctgtgaggccccacggcccacatgcacacgctaacacacatgcccacaaacaacacgcatacgtcgccctccccgccacctcccaatgcccagcaccctcaccggccggcacgtgccacatggatctggggcgtgcagccacacggcacgctgaagcacatgcgtgggcagagtcacaacacagatgctcacccgcacacagaggcatttgcaccagctccctgcacactcgtgcctggcgtgctcagaggaccacccatgctgctcacggagacagggcttgctcactaatgtccggctgtcatttctccacctcagagccttccatggctccctactgcctacagcgttgaatcccaacaagtcatactctttggactttgaaggttctccaccctgtgccccaccctccccacagagctcttcctcattctgtctctgttccctgctttggccagtggctatccgcgatgtgacccacactacacctctgcccacactgcagctctttacccagttaccctccagttcctcaccatgtatgcctacctcagtcatgccccagactgcattgaagccaggctgccttgaagaagctctcccagactgcccttttccccaaggcagggtcatgatttaccaaaggtttcgtgtgtgttagcaagactggagtcggagcaggcatcaaactttacatcccatatgtcacacctcaccatagatctgggtgccaaatagcctgaagagtctgaactcacgctggaagttagcaaagtgctcctacagccgcatctgcagttaacatagtatccctatggccactgtctcccttgatccccacagccatcctaggagaaaggcagaacgtcatttgctagaagggatgctgaggctctgggagggaaagggacttgcctaaagccccagggtgaagcagcatctctggactctcatagacagcctagagctgccagcattcccttaggatctgtgccctcgggcctggcttaattttttcctctgcaaagagccatctgtagggccagaggctggcaaagcctgactcattactggacgccagttcctttgcctgactttcagtgatttctaccttaccctggggttttatgttgcttgtctcaacactgtcacttctcattcctccacaagttgaattgctcactccagccacttgaagcatgctcttcttaacacagttagctctaggcacatggttggtgctaaaaaggaaaaaaaaaagaagagcattatgtcaatttcattgattaacaaaagcgatggctccactgcaaagcaaagttgatactcctgggcctctgagttcaagagccttttagacaaatggctctgagctaaaacatgatcatgcatgcatatgcatctgtcttggtctgatgagataatctggatacttgcttgttatccttgagcattttcctgcctcattaatgtatgtgtagccaccacaataataatcatagctaataatggctacagctgagggctttcctgaaccaggcagtggttttaaaaactttaacccctaaagctgaggactttcctaagctagatagtggctttgaaaactttaaagttttcacatagactgtcattgaataatttctgtttttcagatcaagaaactgagacttactatcatatttgggattaagctaaaaaaaaaaaagaaaagaaaagaaacagaggctgaacgctgtcaagtatttcacagccagcaggaaatcggaacttgaacccaggcagtctagccctgggatcctttccccttacccattatccagtgttggctacacaaaactaatgagtacatattttcaactatagtttaagtgggtgacatatttttcactatattttatgtaggtgactttcagtttgggggtattctacttacacaatctattgagctggatattaactgagagcaaacagaaactaatgaactctgaaaaacataaaacatgagcaacatgacgtcactgcaagagacaaaacagcacatagccttcttgtgactgtattttgctgacagtccatgagctgatagcctgaactcagcagtgctgttcccttgggagacacacacacacacacacacacacacacacacacacacacacacacacgagttggtggttttctgccccccacccccaccccaacacacacacgagttggtggttgtgctgcccggagcctccagtccgcgagtgtgaagaacggaccagatgggtccagcagtgctgggtcaaggcgaggagggggcagccggaagcgcgcgcatgctctggactcctgcagccgccgaaacgggtgcgcagggggcgcgcgggttgaggggtgaggggcgacgggtgtgaggggcgagagggacgggagcggggtaggggcagccctttcccaggcggtagcggggactgtggtgctgttgcccttttaagctgcggcttgacaggagcagcgtctcctgtcggtggagtctgttacaaggggagcagccgcccaggccgccacacagctccccgcagaggcctcggtgccccttgccattttccagccctactccgaatagagttgaggcagcagggagaggcggagctgggagagcgccgccgagaggtcccgcgggtggttgcggccgtgacagcggctcccgacgggctcaccttccgcgcccctcccgccagaggtgagagtaaaatgtccgtgtgagggttcaaggccaagctgaggttgttggcctctatcttccacaagaaccaggagcccccgccgcagctcacgctccactgcaacatcacggtgaggcgcccagtggcggcctcacggggcagggcgagggcggagaggaggcgcccagagtcccgggacaaaggggagcctgcccgggagaggccccggttccccaggcggggcgagcgcgcccctttctcccgcgtctggcccgccccgctgtgtgaggcttgcgtgggaggagggggagggcgcgtctctctggctccttgccgcggggctggcttgggggctgccggcacctctcgccccagtcgctgcgccctgaggtgggagcccgcgtcgcccgcagaccttttggggcccatgatcgccctcagtcagctagcctgctcccctggaccgcgacggggcgtggcagggcggctcccgctgttgtttgagcccagtgagggaaggggaaaggcctttaagattttcggttttttggccgggcgcagtgctcattcctgtaatcccagcactatgggagactgaggcagctggatctcctgaggtcaggagttctagaccagcctggccaacatggtaaaaccctgtctctactaaaaatacaaaaattagccgggcatggtggcaggcgcttcttgagatggagtctcactctgtcgcccaggctggagtgcagtggagcgatctcggcatactgcagcctccatctcttgacagtctgtgggttcaagcgattctcctgcctcagcctcccgagtagctgggattacgggcgcccgccaccacgcctggctaagttttgtgttgtttagtagagatggggtttcatcatgttggccaggctggtctcgaactcctgacctcaaatgacccatctctgtctcccagagttctgggattacaggcctgagccaccgcgcccagatccaaggcccttaagcttaaatgcctcgttcttcagtcaggttttccttgttcccgcatgttcagccaatcgtgtttaaggagaaactaacaatgaaaacggactcgttgatggaggaaaagttggaatgcagcctctggtgctgtttgagcgatccctctaccccgggtcgctgctgtgttctggaaaggcgcattgtaccctggatgcagcaggtaagagtcctgtccaggtgctctgcccgcttttcc

SEQ ID NO: 1886016 - DNA, 4001 bp, Homo sapiens
cacacacacgcacatgccggagtgtgcacacacatgctgtgaggccccacggcccacatgcacacgctaacacacatgcccacaaacaacacgcatacgtcgccctccccgccacctcccaatgcccagcaccctcaccggccggcacgtgccacatggatctggggcgtgcagccacacggcacactgaagcacatgggtgggcagagtcacaacacagatgctcacccgcacacagaggcatttgcaccagctccctgcacactcgtgcctggcgtgctcagaggaccacccatgctgctcacggagacagggcttgctcactaatgtccggctgtcatttctccacctcagagccttccatggctccctactgcctacagcgttgaatcccaacaagtcatactctttggactttgaaggttctccaccctgtgccccaccctccccacagagctcttcctcattctgtctctgttccctgctttggccagtggctatccgcgatgtgacccacactacacctctgcccacactgcagctctttacccagttaccctccagttcctcaccatgtatgcctacctcagtcatgccccagactgcattgaagccaggctgccttgaagaagctctcccagactgcccttttccccaaggcagggtcatgatttaccaaaggtttcgtgtgtgttagcaagactggagtcggagcaggcatcaaactttacatcccatatgtcacacctcaccatagatctgggtgccaaatagcctgaagggtctgaactcacgctggaagttagcaaagtgctcctacagccgcatctgcagttaacatagtatccctatggccactgtctcccttgatccccacagccatcctaggagaaaggcagaacgtcatttgctagaagggatgctgaggctctgggagggaaagggacttgcctaaagccccagggtgaagcagcatctctggactctcatagacagcctagagctgccagcattcccttaggatctgtgccctcgggcctggcttaattttttcctctgcaaagagccatctgtagggccagaggctggcaaagcctgactcattactggacgccagttcctttgcctgactttcagtgatttctaccttaccctggggttttatgttgcttgtctcaacactgtcacttctcattcctccacaagttgaattgctcactccagccacttgaagcatgctcttcttaacacagttagctctaggcacatggttggtgctaaaaaggaaaaaaaaaagaagagcattatgtcaatttcattgattaacaaaagcgatggctccactgcaaagcaaagttgatactcctgggcctctgagttcaagagccttttagacaaatggctctgagctaaaacatgatcatgcatgcatatgcatctgtcttggtctgatgagataatctggatacttgcttgttatccttgagcattttcctgcctcattaatgtatgtgtagccaccacaataataatcatagctaataatggctacagctgagggctttcctgaaccaggcagtggttttaaaaactttaacccctaaagctgaggactttcctaagctagatagtggctttgaaaactttaaagttttcacatagactgtcattgaataatttctgtttttcagatcaagaaactgagacttactatcatatttgggattaagctaaaaaaaaaaaaaaaaaaaagaaaagaaacagaggctgaacgctgtcaagtatttcacagccagcaggaaatcggaacttgaacccaggcagtctagccctgggatcctttccccttacccattatccagtgttggctacacaaaactaatgagtacatattttcaactatagtttaagtgggtgacatatttttcactatattttatgtaggtgactttcagtttgggggtattctacttacacaatctattgagctggatattaactgagagcaaacagaaactaatgaactctgaaaaacataaaacatgagcaacatgacgtcactgcaagagacaaaacagcacatagccttcttgtgactgtattttgctgacagtccatgagctgatagcctgaactcagcagtgctgttcccttgggagacacacacacacacacacacacacacacacacacacacacacacacacgagttggtggttttctgccccccacccccaccccaacacacacacgagttggtggttgtgctgcccggagcctccagtccgcgagtgtgaagaacggaccagatgggtccagcagtgctgggtcaaggcgaggagggggcagccggaagcgcgcgcatgctctggactcctgcagccgccgaaacgggtgcgcagggggcgcgcgggttgaggggtgaggggcgacgggtgtgaggggcgagagggacgggagcggggtaggggcagccctttcccaggcggtagcggggactgtggtgctgttgcccttttaagctgcggcttgacaggagcagcgtctcctgtcggtggagtctgttacaaggggagcagccgcccaggccgccacacagctccccgcagaggcctcggtgccccttgccatcttccagccctactccgactagagttgaggcatcagggagaggcggagctgggagagcgccgccgagaggtcccgcgggtggttgcggccgtgacagcggctcccgacgggctcaccttccgcgcccctcccgccagaggtgagagtaaaatgtccgtgtgagggttcaaggccaagctgaggttgttggcctctatcttccacaagaaccaggagccgccgccgcagctcacgctccactgcaacatcacggtgaggcgcccagtggcggcctcacggggcagggcgagggcggagaggaggcgcccagagtcccgagacaaaggggagcctgcccgggagaggccccggttccccaggcggggcgagcgcgcccctttctcccgcgtctggcccgccccgctgtgtgaggcttgcgtgggaggagggggagggcgcgtctctctggctccttgccgcggggctggcttgggggctgccggcacctctcgccccagtcgctgcgccctgaggtgggagcccgcgtcgcccgcagaccttttggggcccatgatcgccctcagtcagctagcctgctcccctggaccgcgacggggcgtggcagggcggctcccgctgttgtttgagcccagtgagggaaggggaaaggcctttaagattttcggttttttggccgggcgcagtgctcattcctgtaatcccagcactatgggagactgaggcagctggatctcctgaggtcaggagttctagaccagcctggccaacatggtaaaaccctgtctctactaaaaatacaaaaattagccgggcatggtggcaggcgcttcttgagatggagtctcactctgtcgcccaggctggagtgcagtggagcgatctcggcatactgcagcctccatctcttgacagtctgtgggttcaagcgattctcctgcctcagcctcccgagtagctgggattacgggcgcccgccaccacgcctggctaagttttgtgttgtttagtagagatggggtttcatcatgttggccaggctggtctcgaactcctgacctcaaatgacccatctctgcctcccagagttctgggattacaggcctgagccaccgcgcccagatccaaggcccttaagcttaaatgcctcgttcttcagtcaggttttccttgttcccgcatgttcagccaatcgtgtttaaggagaaactaacaatgaaaacggactcgttgatggaggaaaagttggaatgcagcctctggtgctgtttgagcgatccctctaccccgggtcgctgctgtgttctggaaaggcgcattgtaccctggatgcagcaggtaagagtcctgtccaggtgctctgcccgcttttc

SEQ ID NO: 1886017 - DNA, 4001 bp, Homo sapiens
tcgccctccccgccacctcccaatgcccagcaccctcaccggccggcacgtgccacatggatctggggcgtgcagccacacggcacactgaagcacatgggtgggcagagtcacaacacagatgctcacccgcacacagaggcatttgcaccagctccctgcacactcgtgcctggcgtgctcagaggaccacccatgctgctcacggagacagggcttgctcactaatgtccggctgtcatttctccacctcagagccttccatggctccctactgcctacagcgttgaatcccaacaagtcatactctttggactttgaaggttctccaccctgtgccccaccctccccacagagctcttcctcattctgtctctgttccctgctttggccagtggctatccgcgatgtgacccacactacacctctgcccacactgcagctctttacccagttaccctccagttcctcaccatgtatgcctacctcagtcatgccccagactgcattgaagccaggctgccttgaagaagctctcccagactgcccttttccccaaggcagggtcatgatttaccaaaggtttcgtgtgtgttagcaagactggagtcggagcaggcatcaaactttacatcccatatgtcacacctcaccatagatctgggtgccaaatagcctgaagggtctgaactcacgctggaagttagcaaagtgctcctacagccgcatctgcagttaacatagtatccctatggccactgtctcccttgatccccacagccatcctaggagaaaggcagaacgtcatttgctagaagggatgctgaggctctgggagggaaagggacttgcctaaagccccagggtgaagcagcatctctggactctcatagacagcctagagctgccagcattcccttaggatctgtgccctcgggcctggcttaattttttcctctgcaaagagccatctgtagggccagaggctggcaaagcctgactcattactggacgccagttcctttgcctgactttcagtgatttctaccttaccctggggttttatgttgcttgtctcaacactgtcacttctcattcctccacaagttgaattgctcactccagccacttgaagcatgctcttcttaacacagttagctctaggcacatggttggtgctaaaaaggaaaaaaaaaagaagagcattatgtcaatttcattgattaacaaaagcgatggctccactgcaaagcaaagttgatactcctgggcctctgagttcaagagccttttagacaaatggctctgagctaaaacatgatcatgcatgcatatgcatctgtcttggtctgatgagataatctggatacttgcttgttatccttgagcattttcctgcctcattaatgtatgtgtagccaccacaataataatcatagctaataatggctacagctgagggctttcctgaaccaggcagtggttttaaaaactttaacccctaaagctgaggactttcctaagctagatagtggctttgaaaactttaaagttttcacatagactgtcattgaataatttctgtttttcagatcaagaaactgagacttactatcatatttgggattaagctaaaaaaaaaaaaaaaaaaaagaaaagaaacagaggctgaacgctgtcaagtatttcacagccagcaggaaatcggaacttgaacccaggcagtctagccctgggatcctttccccttacccattatccagtgttggctacacaaaactaatgagtacatattttcaactatagtttaagtgggtgacatatttttcactatattttatgtaggtgactttcagtttgggggtattctacttacacaatctattgagctggatattaactgagagcaaacagaaactaatgaactctgaaaaacataaaacatgagcaacatgacgtcactgcaagagacaaaacagcacatagccttcttgtgactgtattttgctgacagtccatgagctgatagcctgaactcagcagtgctgttcccttgggagacacacacacacacacacacacacacacacacacacacacacacacacgagttggtggttttctgccccccacccccaccccaacacacacacgagttggtggttgtgctgcccggagcctccagtccgcgagtgtgaagaacggaccagatgggtccagcagtgctgggtcaaggcgaggagggggcagccggaagcgcgcgcatgctctggactcctgcagccgccgaaacgggtgcgcagggggcgcgcgggttgaggggtgaggggcgacgggtgtgaggggcgagagggacgggagcggggtaggggcagccctttcccaggcggtagcggggactgtggtgctgttgcccttttaagctgcggcttgacaggagcagcgtctcctgtcggtggagtctgttacaaggggagcagccgcccaggccgccacacagctccccgcagaggcctcggtgccccttgccatcttccagccctactccgactagagttgaggcatcagggagaggcggagctgggagagcgccgccgagaggtcccgcgggtggttgcggccgtgacagcggctcccgacgggctcaccttccgcgcccctcccgccagaggtgagagtaaaatgtccgtgtgagggttcaaggccaagctgaggttgttggcctctatcttccacaagaaccaggagccgccgccgcagctcacgctccactgcaacatcacggtgaggcgcccagtggcggcctcacggggcagggcgagggcggagaggaggcgcccagagtcccgagacaaaggggagcctgcccgggagaggccccggttccccaggcggggcgagcgcgcccctttctcccgcgtctggcccgccccgctgtgtgaggcttgcgtgggaggagggggagggcgcgtctctctggctccttgccgcggggctggcttgggggctgccggcacctctcgccccagtcgctgcgccctgaggtgggagcccgcgtcgcccgcagaccttttggggcccatgatcgccctcagtcagctagcctgctcccctggaccgcgacggggcgtggcagggcggctcccgctgttgtttgagcccagtgagggaaggggaaaggcctttaagattttcggttttttggccgggcgcagtgctcattcctgtaatcccagcactatgggagactgaggcagctggatctcctgaggtcaggagttctagaccagcctggccaacatggtaaaaccctgtctctactaaaaatacaaaaattagccgggcatggtggcaggcgcttcttgagatggagtctcactctgtcgcccaggctggagtgcagtggagcgatctcggcatactgcagcctccatctcttgacagtctgtgggttcaagcgattctcctgcctcagcctcccgagtagctgggattacgggcgcccgccaccacgcctggctaagttttgtgttgtttagtagagatggggtttcatcatgttggccaggctggtctcgaactcctgacctcaaatgacccatctctgcctcccagagttctgggattacaggcctgagccaccgcgcccagatccaaggcccttaagcttaaatgcctcgttcttcagtcaggttttccttgttcccgcatgttcagccaatcgtgtttaaggagaaactaacaatgaaaacggactcgttgatggaggaaaagttggaatgcagcctctggtgctgtttgagcgatccctctaccccgggtcgctgctgtgttctggaaaggcgcattgtaccctggatgcagcaggtaagagtcctgtccaggtgctctgcccgcttttcctttcaggcttctgtatcagctgtttttcccctgtagaatgtgcccctgacagccaccccctaaccctacccaatttgtctttacgtgtctgaccatca

SEQ ID NO: 1886018 - DNA, 4001 bp, Homo sapiens
aggaggggagtgtggagtggggagcactatatgccactcctcatggaagcagaaaaaaacaggcttttgttctggtggcaggtcatccacaacaatgggatgtttccatggttaccatctagaagcaatatcttagttgtttggggctttatgatgggggtaatgtaatttctgttcttagcaatccaggtgacagggcaatttccatatatagtccactgagccatccagccccagatcatagtttctctagaatcgtcctagctgtctgcagccaaagcccaatagaaccacccaacaaagagcactaaaggtcccttgtggcctttctcagtcttcctcaccatttcctcagccacctttccctagaacctgggggatgggaaatggggctactgtgggcttccaagaaccatgccaacaaagacctcaagttctccagtcatgacaacatttttaaatatttaaaagcattctccaaaactgacccagaaccagctatgagcggccatcccttaaggaattaatagaaaatgaggatccaatggccaaaaagtggaggactgccatgcaacccacatggaccctagagtgatgggtccaggcagtcatggggggagtgcagccctccattcagcatgctgaggcaagtcaaatggggttggtgcaggaaaacgccctttcaatttgtttccaagtgtctttattttctaaaatgagactgtaatggtggagctgctggacaaagtcaatgaagggatgactggcccgtcagaatcatgaatgcttaacagaagctgtgtgttccagggaagaccactctgaggcaagctgttttactgcattctcattccagtggcctaggtgggcaagaatataactcactgtaataacaacagcgggacaggttgcttggctgtatcttgtgttcacaaatgccccatctctggtcaggagctctggaaggagtaccagatgatctgaaagcctgccactcaagaacctagagggcatgaatgagacttggctctggtatttttccatctgtaaaatggagaagacacctaccgacctcctttatgcagttattgcaaaaatgcaaatacaggacaaggtagatagagaaattgggtagagggagtggggatgctcagtggtataaagcaagtgaaatgtatgcagctgtgagttttcaggattctgcttgtccaacatcagatcacaccattgccctgcttaaaccctcagtggctttccttcatccttgcaagaaaattccaagcatcttaccatggcttacaagaccttgagccctcctccctctggctccctgttattctagtgtcagggcctttgcacttgttgcgccctctgcctggaaatctgcttcccagctccttgccttccctctctgtctcatctttcatgcttcaaattgaatgtcacctcctggggagcctgctccttgtctccctcagctaattactttctattacacgacacattatcctgctaggtggtcttcataaactaaattatctcatttattttgtagttctcaaccccaaggaccctcctaaaagatcccagtgctcaggccacactccacacaagtttaaacatctctggaagctgatcacggacatcttcctggctcacggtcagaactgagaaacaatgacatatctgctcactagtttatggtccacctccacttctaggatgttccaggggtacttgttttccacaggggtcacctatgccctggaaggtggaagtggccctcctccaaagtaattgttgatgactctgcctggggtgctggcaacaggcttgcaatgtgaccatatccctggtgctctcagcaggtacaggccagctttgaatttcccaaggatgacactttaccccctgcagctccagataaatgtccagcatttttacccattagctgagctagtgggtggaatttttccagtccccatttgacccactcagagaatttcatgagccttgccttacccaggaggctctttcctggcttgtgcaggctttagaactccaccccctagccccaccccaaagacctttatgagctcagctggacattggaaccactggaggagctttaaaacctcctgaaacctaggtctggccttcagggaatctgattccttggtctggggtatggcccgggcatctcctgaagctcaccaggtcacacagaggtgtagccccagctgggaaccactgacccagactcagttcctgaatttctgtgaccgcttccatggcagcccctctcaggcccctggtgtgaggtctttcttttgcttctggcttctgagagtttcctttcctgattccaggctgggctcggttttgtctggtgggtttttttgccactgccgttgtgttagtggcatccaggtctccggattactgcatgcttgcagtgggaggaaaggcctgtctaccatgttctctgcctccccttcatgttctgtgaggagaggggccttgtctggcatgttcaccgaggcattcctgaccactagaactgtgcttggcacagagtaggcacttaataaactcctgctgcatgaacaaaagaacaagtgtggatgcttcaaaggaagacttgcacccggctgacccccagagtggggaaggggtcccacctaataggaagaacaccaagacttccccaagaggagaaggaacggctccccctttctcggcgaggccatgtgtctggaccctgtgtgagatgctttctatactagcccttgttggggtgttgcacccattttacagatcaaacaaccaagtttatcagaaattaaagactcatttaagatgccaaagctcacgagtggatggtttgatgctgaagccaacattgttaacaccatctcagctcaaaagccctgaaggccacttaattctaccaaccttcaaccatcttgtcataaggtgagcctgcactcaggagtgacaggaagacagaactcaccttcctatagcccagactcctcacaggctactgctccaccctggctcttcccactggcaaagcagatacagacccagagcacacctgtatagcaatgtcaattgttcaaatgcttccttgccaggtggtcaagagccacagctctgagcaccccctgtgccctgtgctccagcactgtggccaaggtccattctgattggtcaggggccctctgtattggtaaatactttgcatatcacccctgctcccaggttctccaggcaagaaactaggggccaggtggccgatttgggcgtttagaccactgggcaagacaccagagcctcactgcactgctgtttctgtggcagctactttgggtgactggctttcctctcttgttttccacagacacatcctcgacccaaagcagatattctgtgtagctgatgtgtgtacagattgcaaattcaattgcggaagcatagagaggcaccagaagaggcatcttatgagagtcagccaggactggtaatgagcaaaccatcaccttgaatagcctctgagaggtacacagtgaagggccagaggatgacagaaacagaaagagggtctgaggaccagaaaagaacaggaaatgttcactgagcactaactagacgctttacatgggctagatcatttaattctcatagctacccatttgaggttgacattattattattctcactctgcagaggaggaaactgaaccaagaggttgataaacttccccaaggccaaaaaactgggaaatggttgagcaggaatttaaactgaagccctcaggttccagagtggtgcaggaagcctctaagcttgaccttgatctgcagccactgaagctgatgaaggtcataaaatggggataaataacaccagcttcagagggggtgatggaggaaggagcagtctagtcaaagtgctcagtgcagtggctgacacacggcagacactcagctaatgg

SEQ ID NO: 1886019 - DNA, 4001 bp, Homo sapiens
aaccacgactctactaaaaaaataaaaaattagttgggcatggtggcgcgcacctgtaatccctgctatttgggaggctgaggcaggagaatcgcttgaacctgggaggcggaggttgcagtgagccgagatcctgccaccacactccagcctggtgacagagccagactacatctcaaaaaaaaaaaaaaaaaaagtcaccaaagatcagatctctatgcatgtttgttttcttgatgtcttctttattttaacccggctagacttgtatttggaagatggctacccaccatccaggggacccgtttttttgaggacatgcagaaagaatgggttacctctgaagcgctctcagaaaatgaaagaaaaacttttcccaacaaagaccaggaaattgctcctctcattggcccaaatatgttacgctcattgccagccaataactgtggcagggaatgggattctgctgatttaggttggaattatgctacgttgcttagattgggaccacatgcccctgtaagtaggcagagcagggatgtgactcagaactgggcttgtttaccaagataaggaagagtggatactggggagtctaggccaccataagtttcaggtacagccaatgcaaagccttggaaatccacctgacagctccggttgtaccgtccgccctccgtatctggggtttccaaattccgggattcaatcaactgaaaacaaaaaatgtagttaggcttaccaggcctgaaaatacatgaaaatatagagcctaaaatatagcctgaaaatgtactgaaaatatagagatttctttggatgattatttcctaaatacaccttaacaactattcacatagcatttgcattgtattaggttttataagtaatctagatatgatttaaagtatatggggaaacacaccatttttatgtaagagacttgaacatcttagaaaatccagagtctgggaaccaatcccacggatatagagacaactgtactaactacagtaatggcatatggtagctgaatctacctctctttccatcccagtccggaatccaaaggctccttcttgccatgttgtcctcgggcgttggctgcttcctcccatttgttactttggaagtgtcttctttcctcagtgtttcttctgcgtgggccttaccggtctttactgcactcacttacctaagaggcaaaacaatggctgccattcaagaaaatctcacttcagcccagaatcgaagaactggggcttattttgtcttctttctactctggggcttctctgaggccaagttcagaacttgtgcacaagacagtggctgtgtgacagagccacccagggctgtctccgttagatgaagagactggcttgatccattcccaagaactagtcccacgtgcagttcggttgctccgaatgggatttgggtgcgaggggctgactggagatgtggggtctgggtgagtggggtatttgagaacctgaagctcacaaggctttgtctggtttgaggtacgttttgccctttctcccgcattcggctctgcatcgaatctgaccggccgcgcctactctcggaacggccgaggaggatgggtctcccgtctccacacgcgcggtgtctgcgccgactgcagccctcctggacgggagcctctgggcccagcttagggtggcgtccagcgtgacctactcgggaatggcagccttcagtgtcctgcggcctcgggttccgggaagctcggggacctgggcagcggatccagatgcttccacagctgtgtctccgtcgctccgcttcgggggccgagaaccagcaagaccaacgcgaggaggcgccacggtacctgccaccccgctcccaggaggcccggacgaggcttcgtcggcgagcggtcggggcctgcttctcgaggtgcctgcgagcgcctcatgcccctccccaccggccccaactccgtcccgcctcacccgaccgcgggctttgtccacccgccgcggtgcggctcctcccagtccccgacagctcctccccgccccctctgccggccccacttcctaggcggcggagcgggtcggggagggaagggttaacccgcggctcttcccggcgcggagggatccggaggcgagccgagcgcggtggtgaggccgcctcagcgaaaaaaatgtccgcctgaagagacccacaagttctattcggggggaccgacagcccgccccgggaggaaggggcggccaggcccgaaagccgcctccccctcccagacccgagagctcgtgcggggcaaagtgaaccgagccgctgggcggtgcaaggggaagcccaagcccgttctcccggccaaagtgaactttaatcggggtggttggatgcggagacggggcggcaggtaattgcgggctagcgagcgggagtggggcggcgcggcggggctgggggctgcggggcgccgccgcgtccctgccggagtgggggcgcccccgtcccccgcctcaactccgcgcccctttgtacagcgcgaaacccggggtcccctccaagttggggagcggagtgggggcggaggctcgagtcgcgggcgctcaggcccgctggcggcgcgctcggcctgtgcgccccgttcggtgcccgactcgggccggcgcccaggctccggggcgcgcgggagatcgggcggcttcggccgcggagccaggctcattgttcggcaggtccggggcagggcagcaaaagtgggaggaggccgagcctggggaggaggacgccggccgagagcgagactagttgtcggggtttctgttttctgtttaaaaacgccccttggatgagctgggggtgctttccgacctcctgggcccgccggggacgtccgggcggcggcggccgcagacgcgggcctgcgagcggcgcgttccctgcaacttgtcagttctattgttgccgagcgagtgagtcacttcgcatctccgctcgccgccgctccgctcgctggacgccgaattgcccctcaccccgctcctcgagaccccagccgcggccgggcccggcgcgcggagcacccggcggcggcgcggagcagggggcgccgaggaggtggcagagactggctcggaaacttgggggagaggcggcgagttgcgggagccgccgcgtcgatctcgggccgcggcgaggaacgcgtggattccgggacccggcgcgggcactgagccctcccgccccttgctcgcgccgcggtgggagcgagtcggggtcctggaagtcatcccggcgcccccagcgctcttgcgtaatcttccccagtacctctctctgttccctcacacactttgggcctcggtggtctctcgctgagcccgtttcctctgccctaggacctgctagaagtggccgaagatgaatccccagcaacaacgcatggccgctatagggaccgacaaggagctgagcgacctactggacttcagtgcggtatgagagctttccatggcatcttggggttctgctgaggtttttgtttgtttgtttgtttgtttcttttaaataaagggtgaggggaagcaacgtggagactaggcagcgtgaactccatctgctttctgcttaagcagtagttctcagggctggagtccagctcccccaagttggacacctgaactttgatgtaatgtctagacttgcacatttaaaactttaatgccagaggggtcatttgatttaaccagttaaaaggagaacaatgtaattatgacctttggttgagtcaccctcccaccgcgatgattattggggatcttgtactttatatgaaaaagtgttgtttttttcttcagtactcctcaccattttcctctccagtatcagatgtagtttatggtacctgaaagatgtcagcgacaagaaaagtagtccagagctagaatttcgagccttctgaaacagagtacttttattttatacacacacacacgtgtgtgtgtgtg

SEQ ID NO: 1886020 - DNA, 4001 bp, Homo sapiens
tcgttttggaacacagagccatagattttcatttctgcactcagctctgttctgagaccggggccataggggttcttggagagacagggcagatggaagaagtggaaggcatctgcacactgtagagtgccctgcaatcatagagggtgattactcctgtccctacctccctggcccagcttcccaccagccagaaccctggcaaaacagggagacctttggcagtctcttagccctcttccttactaatccctgttccctcctctccccttatgccaaatacaactagaggtcacctcacagccaagcgcccctcccaaagacaccaacttcctttaccctgcaacaaccaaccctcaccccactcccaaaaggctctctggccagaggtctgatcgagccccttgagggtactcactttaagccacccccattgcctgagttgttttccttttttacaaatgaagcttgttcttttctgggtctctccaaggtggagtgtaggagggcagtgttttccgtagcctctggctcgtgccgcgctctcagactcttcagttctcctcacccacacgagcccaatgaggtaggcctttttattccatcttgcagacaaagaaacgattactcagggttgataaacaccacccaagatctcatgggaggaaggaacagagatgaaaataaaatgcaaggctgtgtaagtccaacaaatatgccacatccatgtcacctctggggtctgatccagcctctcaacaaccaccgtcacccctcaacaggcaggtgacagtggcgagatggcccagcccagcaacaggctcccccattgcagtgccattgctatgccagaggacacaaaccccagaccttgactcctcctcacagaccctgaacagctagaatcttctggcttcactgatacttccagctgcctgagctttggcccggacagtcgccacagcaaacacaggtaggtctctgcagctgcagctgaatgagccagcaaatatttatcaagcactgtgctaggaacagtaggagatggagtgactttactcagtggtccagttttaaaacacttttagtaataaatacccttaaaaaaaagaaggggagagaacatattttaaaaccctattgctttctttcccatcctgaaagccatgaggtagacaaaatagtatcgctttacaagcacagactttggagccagagacttttgggtttgaattctggcagtgctgccactagctacgtgacactgtgcaagccacactcctctcaaagccttagtttcccctttacaacacgagaatgcttacccctgcccacctcagaggattctttaaaaatgaaatgagctaatgtataacaaagagctttgttgactgtgcaaatgttaggttgttctttcaataaacatttattaagcatttactctgagccaaaccctgagttaggcattagagcttctgaaatgtaaacgacccgggttcattgggattcaccctttttattttttttttttcgatgaaattcacacaacataaaattaaccattttaaagtgaacgattctttggcatttagtccattcacgatgctgcacaaccaacacctctcacaagttctaaaacatttttttcctcatcccaaaagaaaagcccgtacccactgaacatcagcctcttttgaagataccttttctctcgctctgctgcgtccttctcaggagttgagttcacgggcttcataatatcctaatgtccctctcatcgcctatgactccaagccaattcccacatccaacctcaagcttcacaagtcgaaacccaggtttctctgccagagccgggggaaacagagcccctagcctgccatttttaattacatcagggctgggtgagcaggtaatcgctgtgcatttcagtaaattacctctcataaaggggccatcatgtttgctcatgtgcccttctttcctggaaccagctccctgtttgccaacattgtatcttcccagcagcccatgcgcctggtgatcgtccttttagtcaagctgggggacagtcaggtgcagggggaggaggcagtgtttgggcaaatattggacttggccacacttgctgttcgtatcaggaacccaattggtgttattgattgacagattcggggaccaactgtttagaaagctgagccccctcggattgggctaggtgtttcaacaaacagccctaatgctgggcaaacagggctgttggaagaagtgcccagcgtgttagcagagcaaaccaagcactgagcaaacagcttaaaagaatgtggccacctccacgtaacctcaaccgaggtattgatcccaccggaggaaagagaggggccgagtggggaacagagagatacaaaccccggcagaatgtaaatgttatctttaagctgcggctgtcacggccctaatgggcatctgtttggaatttgtcttcttgcaaatctttaaatccaggtcagggccaggcacagaatttaataacaacttttcagagagatcggggcttgggactgatttcattccccataagcccaactgggactcttctgttcttcttaaaggcagctgccttgcatggaaacttgctgggtgcaagtcccaagctagaaagagataaatcttctgaacactggtcataaggctacaggagagaagaaggaaattcagaaataaaggtgctttctctgacccctgagctgtccatacaagagagctggtggagtggaaagaatcctggactcagaatcaagaaatctgggtcctgctgcagctgctggctctgactggctgccccttctgtcttcacctccctgaccttcaacctctgtatctatgaactgagggatgcagtccctgctgggcatattcagggtcaggccagacaagcccattccaaggtgggagcacactctgcagacagaaaacactgtcccagtttaaggaatcgggatatttgctgagagaccctgggagatgcccctcctgagcctgagaccttctgacatcaccaagtcgcaatggaatggaccatggctgtggttatctatttttctaggtaggtgactgttggaatttgggtgtcctttcccaaaagctagatgggcaaagggaatacatgttgtttgcaaattccttgaaaagtcaaaaaatcatgattgcttacttgctgttatttttgagacagggtctcactctgttacccagtctaacagaatcgtgctctgtcacacaggctggagtgcagtgggacgatcataactcactgcagctttaagctcctggattcaagcaatcctcctgcctcagtctctcaagtagctgggactacaggtgtgcactaccacacttgactatatatatattttttttttgtagagatggggtctcaccatgttgtccaggctgatctcgaattcctggcctcaagtggtcctcccacctcagcttcccataaacaatgggattacagcatgagccaccatgtccagttgcttgccttttaatatttttgtaaaataatagggttaaaaaaatacttgccctctgtgtctcaaatgaggccagaggactgtgattggatatcacccctggtccacaatttcttgccaagaaaaaaaccacagcactcctatcttcaactagaggccatagcagtgtgagtaaccccagggtattacttggcactgcattgtacaagagaatagagggaacttaaaaccttttggccatctctacctcttggtatctgctctcatgatgataaggagaatcagagaaggctgcaactcagaggaggcatctactttgatagatctttaaacaggggcttaacagggaacagccgcagcttaaagattacatttatgaaaggatacaggcaaagtggtcaggagctcgggcttcagagctaagtgcctggggtagaatcccagctctgccactcgtggtgc

SEQ ID NO: 1886021 - DNA, 4001 bp, Homo sapiens
aatatttcaagtggtccaaatctggatgatcatttcttacatggtaaatattaggcctttaagcaatatgatttaactaattagaaaatttacatcattaagtctcagggagagaaaaaaaaagagaaacaaatctgccagtcattttaaaggagacaggcactattgaagtgtgaagaaatcggctctaattcaaaaaggcaatcgggcagaaaaagccctcaacattaccctgctagttattaatcagaaagggctctctcctccccacacctcctcccttctaagcactgagtttaagttcgtttttttgtcagtggcccatgtcatatttatattgaggttttgtctgctaaaggattaaaatttgaaaatgtttcaataagaggcaaacagaatcctcaaagcgaaaaatatccacagaatcacctctcttccagacaagtaaacttgtaataaacaattctcacgcccctcttattttttttaattctttcgtctttcttcccattaagttcctattttgaaacctgcttggtgagaactagataaagtctttgtgttctgcccccctccccctcctttcttgcatctcctccctcctccaaagcgagaaacttagactgaaagcagaaaagtacaaatacattaacaaagccccactcacttgataaaaaggccatggtctaggcttacatgtcaggaatctaagggaagggggctccgttggtgggtctacagacagaaggtgatgaactagaaatttcccccacctatgtgtactattcaatatagtgtgtggttagagaaaaaggaaggcaggtgggtgagaattattttaaagtgtattgtggtgttgtgtggctttttctttcttctcctcttttctattcagcttaaaacagcagcctcattatatctaggtgccccttcccatcatactcttacttaagcccttggtacaccacacacatcgccttttccctagtcttctcattcccagcaaattaacagaagaaggaactgcaaaaggaactttgtgagtagttccatttggaaacccaggcccttcctggcatctctgaggatttgttcttaaacggatattggcctcaaaaaatgtaatagcaagccttagatattcaatttcccttcattattatttcttcttaaattataaagaggtcccaaaggctcatttttctgccttgtcctattcttctctaattatgttccctcctggcctcattttcttctcctcctctctgccttactttcttaaagtttcactaccttgcttcccatcaagtctctgggccttagaattctcaagtctttgggcttctgctgaccttgaacagctcccagcattaattcaatgccatattcctggttaccagatttcaactttgcaggagagagcagtagcagacctgggctattaacacaccacagttaattctctgcgggaacttttactaggtgggacttgtggaaggagaaaacgtctgtaaacagtgcatgctcctgagggtggggaatgatttctgatatagaagccagaacacataaaatatggccatattggtgaaagagccagttccgagttagcatttggttaaataaggagagggaagagaacagggggaccctgggaagagtttagaatgctccccaaatgcagctccttttctgaccattaaagagcagatgtgagtcgaacgtgctcccctttgagaaagattagagtaaaatggacccctccgtcactttcaggaggcaggacacagggaggtgaaaatatacaagacaatggcctctggcgctggtgggcttccttggcgggctccccaccttttgccccgtccctcttacaacccttcttacctttgttgcttcaatttgatatgaaaccatgggatgttcctgggctaggttcctcgagaggaaaaagaccacgagaatcaacccgtctcctgcatctactccgaagtcaagagcattacaatacaatttacagcgcctttaacaactcgcaagtaaagcattaaaattcgctttaattgagaaaatattgatttttaagtctagaaaaagcgaaatcgtaatttagcttcaaactttcaggcgagaatatagcgtattatgtcgccgtataatggatccaccctttccgcccatgcaacatcacatctttaattgctctactttatgaagtgataaagacaaaagataacccgacttaggcaaacgctttttaaaaagaggacctagaggaatttcttttaccagatacttgtagaaagaattatctccttttttgaagcagaaaaaaaaaaaatgcccaaaggggaggaaagaaataaaaaagaaaaaccacagactagtctgaaagcaactcacattagcaaatccgttgacatgctctaccaaaggagggatgaagccaacatttagagaaaatgcattcacggacagaattgcatcctcctttaaacgaaacaaacctgggtctattttcttactttactcctccgtccttttttggggtggggtggggggcgaggggagtcagagggggcagaatccattggtggacagggaagggaaagaaaatcaggctttctatgttatttctgtatcggtttttggtattatagaggagtaaagaagtttttgtgtgatggtttttcattgatcagtcactctgagctaatgtaattatcctcatcaataggaggctgcagagagaatcattatgtgggtgacattgataaatgatcgcccaggaacggccctctcgcgggcaacccccacgtctgaccctcccacacacacaatgtagtcatagaaacacctagagaacctcgagccccgccgcggaagaggcaggagagggaagaaaagcctcgggcggccgaggtgggggtgggggcgaaaggggacggccagccccagatccaaaccagttccaacgacaaaaacagccagcggcggggggcgaggggagagggacggtctccccacccggcggccaaccctcccgcgcacagttgctcacaacaaagtgaaaatccgccctccagacggacccattcctccacaccttttcccatgtgtgacctcactaccaacaacatctgatgtttgacgagacacatattcaaaggggtctctccaaaggagttaaataattaggtcacaaaacttgtaggcatctaattctcacgcgagtttaccccgctccccaaacaccaaacaaaccaaccaaccaaacccatctgaaagaaaacaaaggcagcatctgggcgacaccccccttcctgcgttccccccagttatttactgggtgaccccgtcctttctcttcacctcctcacccagcgcctcggattatgagataatggattttgcgattgttcttgtcagggaaaaaaatctccacagaaccccacgttttcatctttcaactgttttatttaagccaatgggaaggtattgagggcagtaattgattcataatgatccataaatcgatgtcggaaagcggggggagagggtggaggtgtactaagagtatgggggggtggcgatgctgtttatttctaaagcttcaactaaagtagctttgacactgttggggctggggggggaggagctgttgggctctgccggatcatccatcattcctgtcacccagagtctgcccggaggagccgtagacgcaatctcccttctgtctctacaccgaaactattaatattaaaacctcccttcaaacactgccccgacggtctccattctcatcacaatctgaccggcctcccccatcagaccagcatttcccccgcgcggcactttctcccagccccggccccgacggagggggcccgccccggcgcgcgacgccctgagttgatgactgcaactgtaactgggacgggccccccgtgcccccatagtttgcaatacgttggtctaactctaacacacgcgcccag

SEQ ID NO: 1886022 - DNA, 4001 bp, Homo sapiens
agcctgagagacagagcaagactccctctcaagaggaaaaaacaaaaacaaaaattcatgaaatgtaataaataaaatatacactttggatttttccatgtacttagcttttctagagcatcttttagaattattgtttcacaaaaaacactttgggaaacgttttaatttattaacaaatactggagggctaggaagaagaggttaaaacttttcaaaatatagagaatgaattactgatacgtgtaaaaaaaaaaaaaaaaaggttgctgactccagtcatggaaggcactgtcatatggacactcctagcctcagcatctggaggtccggaaagggaaaatttcaagtcagagagaattctatacataccatttatttggaaccttcagcccttaagatcccaacattatgacctcagtttcaacataattgtcctcagtccttgtattggttacaaatacaaaacaaacagctcaactgaactaactcttttctctccagaaacacaaacaaaagacctcataaaaggagtgagtttctagcggccataattactgcaacttacttctccaattttgccctccacagttaactcaacagctcaaaaactatcagtaacaaacaacagtcaccatgatatggttaggagtgtagcagatttctcaaccagtaataataattaagaaaaaaattttgcctattaataaatctcgtttcctgcacttgcaagaaactaattaaaaggcagccctgcacgatctacaaaaacagccatgaagactgttacattttaagttacaggaaacaaacctgatcctctaatatagcaagatacaactgacttccccttacataccctaaaaaaaagccttacacgagaaatttaaacatggaagcagaaatacaccaagaaaaacacatgtcaaaccccacctgtatatctgttttcaaccattcggtgtcaaggcgagcctgggcagccaaacacaaagattcagagggcatcttttctccagcttcctcccagttctcaggcctgcaagtaaacatacatgttgaagacctaacgctttttactattttacaaagacactccggaaaggtttaatgcagaaaaaaaacaaaagagagagacagagaacaaaaagatgggagagaagagctgggggaccggagtgaagtgcagagagggaaagagggaacagatggagggagagggaggtggggaagggaaagcctccttccaaggtaggcagggtgtgcctggtttctcaggaggccagatcacaatgtcatccccctgccctcaaatccaaaaggtacacacacacatgacagaaagcccatcgttttttgttttgttttgagatggagtctccctctgtcacccagtcttgagtgcagtggcggaatctcagctcactgcaagctccacctcccgggttcacaccattgtcctgcctcagcctcccgagtagctgggactgcaggcgcccgccaccacgcccagctaattttttgtatttttagtagagacagggtttcgccgtgttagccaggatgatctccatctcctgacctcgtgatccgcccgcctcggcctcccaaagtgctgggattacaggcttgagccaccgcgcctggtcaagaagcccacagtttgaacgacaaatgacagcagcacgaatctgccgctttaccctacagcagggcgcctgcgtgaaacaaattactcaaaaggatcacctgcagaaaaacccacagccaccaccacttagacatggagacagacccaaggctgcgccgcgggcggtccgcgcaggccccccgttcggccgcccgtcaacccagcgcccgcacctcctccgacgctggcagccccggtgccccaggccgggacctgacgcgcagggcccagccgcctcgccccgctggcttgcggacacagcctcctagcagccgctggctcaggcggcgccagggatcctgacgcctctcccgacccccgccacccgcgcttagggccaatcgcaaggcggctccgtgggcgcagccaatggggaagaggagcgcttcgccgctcctccggactctcccgcttcctgcaatgcggtttatcttcctacttgggagcccaccggctgaggccagggggcaaccgcaggtgccagaaggcgggatttccgcggcacgcacgcacacccgcactcctacggaagtcagtttctcaccacctgaattatttgaacttagcaccactaaacgtggagcaatcacgtacagagtgcttccagacctcatgtaatagaaatcactgacatcatctattttttttttttttgagacagagtctcattgcgtcgccgagactggagtgcagtggcatggtagcggctcactacaacctccacctccccggtttaggtgcctcagccttccgagtagctgggattacaggcatctgctaccacacctggctaatttttgtattttcagtagtgacggggtttcatcatgttggccaggctggtcacgaactcctgacctctggtgatctgcccgcctcagcctcccaaagttctgggattacaggtgtgagccaccgtgcccggcctatttcatattttaaatattagaaaagtagaacttggccaggtgtggtggctcacacctgtagtcttggcactttgggaggctgaagtgggaggatcgcttgagcccgggagttcaagaccagcctgggcaacataacaagaccctgtctattcaaaaaataaaattagccaggtgaggtggcacgtgcctgtggtcccagctactcgggaggctgaggcaggagaatcgcttgaaccccagaggcggaggttgcagtgagccgagatcgtgctactgcactccagcctgggaggcagagccagactccatctcaaaataataataatagtaataataataagcttgggcggtggagggccatccccgggcattggccacatgtggagtgacctggcttggctccctagcagccagcttctgggtcaggcatcttcgttggtgactttcagctctcctggtgtggccgtgagtggtgtggcactgccgtgacccatctttttgtcttaaagatgcatcctgacttacctccacacttgcacactcaagaatgcaacatcgtgattaacttgctaaaagaatatcacaaaaatcatagcatccgaacattttttggtcattgcaatgatctggatcaggcaatgagaaaataaatgcttgaagaatgagtacatggaaaagaggaccaagagcagagagtatggcaatttgatgcaaaagagacttttttttttttttttttttttttgagacggagtcttgctctttcaccagagcaagtgcagtggctcaatcttggcccactgcaacctccgtctcctgggttcaagcaattctcctgcctcagcctcccacgtagctgggacaacaggcctgtgccaccacacccagctaatttctgtatttttagtagagacaggtttcaccattttggccatggccaggatggtctcgatctcctgaccttgtgatctgcctgcctcagcctcccagagtgctgggattacaggagttgctgtgtccagccgcaaaagagactttttaattctccagaggaatctgaaaaataaattgcattttcactggatgccttggctgagagaagaccaaaaggctatgggttggcccgggcatggtggctcacacctgtaatcccagcactttcggatgccgaggtgggtggatgacctgaggtcaggagttcaagaccagcctgaccaatatggtgaaacgctgtctttactaaaaatacaaaaattagccaggcgtggtggcaagggcctgtagtcccagctactcgaaggctgagacaggagaatctcttgaacccaggaggcagagtttgcaatgagccaagatcacgccactgcactccagcctgggtg

SEQ ID NO: 1886023 - DNA, 4001 bp, Homo sapiens
ccatctagaaggaaagccacagaatacatagttcaggaccggctgggcgcggtggctcacgcctgtaatcccagcactttgggaggctgaggcgggcggctcacgtgatcaggagattgaggccatcctggctaagacggtgaaaccccgtctctactaaaaatacaaaaacaaaattagccgggcgtggtggcaggtgcctgtagtcccagctacttaggaggctgaggcaggagaatggtgtgaacccaggaggcagatcttgcagtgatctgagatcatgccactgctttccagcctgggagacagagcaagactccgcctcaaaaaaaaaaaaaaagaatacatactccaggacctccattttacagtcaggatgactcagcctcatatagaaacctcactccataatcttctgcaaaattagcaccaaattcaggcagaccaggtttttgttgctagggagaacagttgccagagaaacacactagagggtaaacaccaatagatatataaaaagtatcaacgtcaatcactctgtatttattactttcacctgcatttctaacccatctgtcatggtctattattattaccccccttttatttctcataagactctcaggccccacgaagaatgctaataacaaaattgtacatcttagttagcttagactgctataacaaagtaccatgtactgggtgtcttaaacgacagacatttatttctcaccgttctggaggctgagaagttcaagatcaaggtgctggcagatgtggttcctggtgagggtcctcttcccagtttgctgatggcctccttcttgctgtgtgcttgcatggcagggagagagagagagaagcaagttctctggtgtctcttaagggcactaaaactattatgagaccccacctttatgatctcatctaaacataatgacctcccaaaggtttcatcttcatataccatcatattgggggttagggcttcgacacatgaatttggggggtcacaattcattgcatagcattgtacctattcagcagtatccctttgagagttatgtcccagccctgtgtcatgtttttatatgcagaggttgacttagtcctcattatatagctgagggaactgggtctagttcattaactacactaaggttataatcagtaagttgtcacagagctaggatttgagcccaggcagtctgactgtaaatccccaaatcctaattccctccctatattgtctcaaccacaggaaaaatcactttgaaacctgattaactgagttcaggagttgtcacacttttatggactgggtatagaagtactccaaacattaattaaactgattcttttgataactgcttataagaagataaaccagacagacaataaacgttcacaatagaaagagctaaaaacaaaactttggagaatatggacagccagtttgaaaggaggaatttcttgaatgctgatcacatgagacatgactcgtcagaagcaaccacaggtgttaactgatcaaactggctaaggatttaaaaagttccagtgagggcctagggaagtggcattgtccaacatgctggtaaatatgtatttgcacttcttctgaagaggaaatttgaaaataggtatgtaaagtttcaaaaaaatttattcttttaactaaataagttaaacctgggtactaattctaaggaagtcaagatgtatgcaaaattgtatgtacaaggctagtcattatattacttcaaaaatagatttatatatattctgattattaaaaacatgctacttataaaagagtcaagaagacacagcgatgtccatagaaataaaaacaaagaccttaggattttatctcttagaacttgccattgttacaactggacccccctaccccttagtcatgtatatatatctaatttgaatttttataactcattggttttaaaaatgcacttctcttacctagttattgatgctcaaaatacaaatacatgcttccatcttttttatttttgagatggagtctcactcttgttgcccaggctggagtgcaatggtgtgatctcagctcaccgcaacctctgcctcctgggttcaagcaattttcctgcctcagcctcccaagtagctgggattacaggcgtgcgccaccatgcctggctaattttctgtatttttactagggatggggtttctccatgttggccaggctggtctcaaactcccgacctcaagtgatctgcccaccttggcctcccaaagtgctgggattacaggtgtgagccaccgtgcgtggccttttttttttttttttttgagagggagtcttgctctgtcacccaggctggagtgcaatggcgtgatctcggctcactgcaacctctgcctcccgggttcaagcgagtctcctgtctcagcctcctaagtagctaggattacagatgcacaacgccacacccggctaattttttgtatttttaatagagaccgggtttcaccatgttccctagggtggtctcgaacttctgagctcaggcaatccacctgccttggcctcccaaagtgctaggattacaggtgtgagccactgtgcccagctgcttgcatcattttatttattttatttatttttttgagacagagtttcacttttgttgcccaggctggagtgcaatggcacaatctcggctcaccgcaacctctgcctcttgggttcaagcaattctcctgcctcagcctcccgagtagctgggattacaggcatgcgtcaccacccctggctaattttgtatttttaatagagatggcgtttctccatgttggtcaggctggtctcgaactcctgacctctggtgatccacctgcctcggcctcccaaagtgctgggattacaggtgtaagcctccgcgcccagcctgcttgcatcattttaaatgaatgtctagtattctactgtatgaatagaccataatttaatcagtgaactcttttcttttttttttttttttttgagacagtctcactctgacacccaggctggagcgcagtggtgcgatctaggctcactgcaacctccacctcccgggttcaagcattctccctgcctcagcctcccgagtagctgggattacaggcgcccaacaccacacctggctaatttttgtatttttagtagagatggggtttcaccatcttggccaggctggtcttgaactcctgagctcaggcaatctgccctacctcagcctcccaaagtgctgggattacaggcgtgagccaccacgcctggctaatttttgtatttttagtagagatggggtttcaccatgttggccaggctagtcttgaactactgagctcaggcaatctgccctacctcggcctcccaaagtgctgagattacaggtgtgagccacagcgcccaaccagtgaatgcttgatgagcttgtttttgccttgttaaaattgaaaacatgatttatcatctcaccctcctaagtttcattaaaatcatacttaagaaataaaaagagacataaagatataaataagagaatgggaaaagaaacataaagatctaaacaagagaatggggaaaagatcattagtagatcagagatttcaaagaaattttggaagatagctgatgaaggaatgatactgatgcgggggggaagcagaagaaactgcagagggtggaagatataccccaggaaaaaaacaattcacactacggaatgctagaagggtccagaaccaggaaatatcagagacaactgagtacaggaatgagatataaggccaagattccacatatgaaacagttttccttcccttccacctctgcatgcagaatgccttacagccaagaatctacccccagggtgaaggtgtgataggaggaacacagaccatccagaatttcccatacattcacacatcacgctgaaacgttattctggaaataaatctaagggctc

SEQ ID NO: 1886024 - DNA, 4001 bp, Homo sapiens
tgttagcgccaacagatttttttttccagatctcagacatttattttaataggcccctgacaaagtcataagactcagagagaagggagagtgggagaggtgtataggaaggttttgtgccagggactagtcgctcaagaattaggagacgccctgggcactggaaactacgcagcgcgaagtagggacagcgcctgtgttgtgtagtggaccagaggttgctgatacctgggacatagactgggtgggcacgggaagtaaagcctcgggactttggttaagcgcgccccactggcgtatcgcgccgcgggactgcagagccgtgagcagcggtcgccttggtgcagggttccagccacatcttcctcgcccagccagcaccctctgccgttgacccgcctctgcgcccggcaagcggcttccagcagggggcgcgcgcggaccaggcttgggccctagaacagcgcggatggagtcgctggagcaagtccccagatccaaccggtttcaaccctccccaccctcccgacgctccgggttcgcgacgttgaagttaagggtcgatccgcagaaagcggccaggggctccagctctccattcctgggtctgtctggggtcggctccagcctggttagaagccttagtctggattcggcagattctgaatctgggaccctctgcgctagcggcttggaaccttgtcaccctcccctcccccacccctacttccacacacctgattagttgtctgtttctttaatgatcaaagacgtgggcggcggcgggatgaggtcttggttcccggctccacagccctccctaactgtcattattaacgttataaacattagacccgcttctgcgcgccggacggcgccggacgaggtgcgcgcagtcttctagctgagctcggaggcagatccagaagtcgcggctcccaccccaggcctcggcggactctgcctggggcgactcgggctccagccctgcccgggcgggcactgggctctccagggtcgaaggcaggggtaaggggcgtctttcccccagggcagcctccgggaacaaaagcatttgctgtagagtgagctagagcctccgggcccgcgggagtcagctcccgcccaggggtggtcaccgcgtccttaaccaccccaggagccccgtctccctgccgaactccttggcttctgcaaccctgtcaagacagcaaggaaagggggtcttccctggtcctcgggccccgaagtttcggggttgcttataggacgggttcctgcagtccagggaagctctgggcagatagcgagcccattctcccttccattacccagattctgcctccctgcggaaggcaaaaaagaaagaaagaaaataggtaaaaaccggcggagggccttgagcctccccgcctggcgcccctcactcagtcccgaaaagtcccctggacacgccatgccggaccggactcagctcccgctgctgggcccctgcctccaaatatccttcccaggcacaggctcccaagaccgccccctcagggttcccaacacccggacaactgcccaagacgccgctccccgcccccacccccaccttgttcggcagacaaagaagggtgtgctggccccgccgtctgcctccttctcccgaccccacaaggcctagaaacctcagggactcaccccgggctagggacccaatcctggctgtcccaccacaggatccccggcagggacgggtcacagtgctctcacccctcgaccattttcgaagacaccttccctgaaaggcgccttgcgccctccccatgggtcggcggggggggactccaggcccgagcaggcggtgtgaagttctgtgttctgaactggggctgagcaagatgcgatggtctcagcccgctgggccgcccgtagcgacggcaggagtaggggagagggagggacgcttggagtgtgagcgcaccagtctgttcatatttaatttacaaagcagcctcggaaccccgggccgggtggtctctttagacgctgcgctcttagcctgtctctcttccccaccccctcccctagctcattaagatgctcaacactcaaatcggggtattgatctccacggaagccccaaaccctcgccatcgagagacccccatggcccggggtgatggctgtggggcttggtgctcccagagagctcagtggctacagaatgggtggggattctgcgtgtctcccggagcctgaacccctttcctggttatggccggtagctgtctccagggctaacgtgggcagcgcaggggggcggaaaccgggttttagccaaatgcctcgacatcgccgcgcctccgcctcctcgtcgctgaaagaaatgtcggggtttcatcagagctagggagcgacagtcgggaacagcgagtctgccgaagccggctgttgtgtgagggtgtgagacggcggggcggtgaggggccaccgcggcttgggggatagtgcgtgtggggttgaccgtgtgtctgcttgagaggctgtgaagatatggggggcagatatgggagaaatgctcgggcctgaagtccccagcccaccgtgctcaagagtagcggacgttttgccaccatccttgtctgtgctactgtctgctgcagcttccgtgccccgttctcctggagcaggcaagacctggagtgaggtgcttgggtgcgctcgagagagcttccccctgctccacctgtcccgcggtgcgcgcaggccaacgcgtcgggcagtgggcttcaagcgctggtttagccacaaaagaccagaagtaaagagttccggcttaagaggctgggcagggctgcggtgggctggggaggggggtgtcccttcccagcacgccctgcagggctgtgcgttctggtgtcgggttagactagcaggcggggcgggggggttggggcggcggggcgggggagactagggcttatatcagcccagatccaggcaaaaatggtagggagggtgcggcgctctgctaacactatcaattatgcatcatgttgaacgtggcttcggggaggaggcggctagcagcggggggtgcgggagggaagggtccgcgcgagctcggctgcgcgcagctcagcgggtcccgctcgaagtctgtcggtgccaccgcctgcatttgcaaaaagagtttaaaggcaaagacacgccttccccccccacttcagccgcgcgcctttccttcccccaaattcctcaaagatggtttgtctcacgtgttgcagggcgtaaaagcggcttgcattcaattagcagcgaagctcgcgggcgctggcgggacaggcgcgtgagggtgagttcgcgtgaatgtgtgtatgcgtgtgcgagaggagaacggtaagtgtcccgggtgcaggtgtgcccgtgaaaatgcgtgtgaatgtagcaggggctgaacacattgatgcgattattacctgaccatggatgattgtaaactgtgaaggtcggctatggggagggtgtgagggactgtgtgcgcgaatgtgtttgaacgtggggtgggggaggtggtgtgatcagggacagtaacaatgccagcggctgtgtaaatgtgggggtacgtgggttatgggggtgcagtaggctgcgaagagcccagccaggacagtgggcgtgggatgccccttatgaccgacgtgtcttggccttggggagggtctccgtggctttaacaaaagtagaccaagcaggaggcgggagaggctatgcgcgtccccgccaggcccgggagtgcgcaaggactttctccaacctgcagccagagaggtgggggaaacggacgcaaaaggaaaaattgaagtggtactttggggccaccaagtccccaaacttacctgtccctttctttgccccccgccccccgttttccccacagccacaacacatgcgtgtatcttgcttgggctatcttccctgctctgccacgccgggtctggagaaggggtttc

SEQ ID NO: 1886025 - DNA, 4001 bp, Homo sapiens
tcttgggcttgggcccaaggcagaatgtcttcactgccacacacttgcctccttgtgcttaagggactccagaggtccagatatcacagatacatcctgcctcgagcccctactgagaacccttcagttccagcaaatggtgcctcctccccatccaactgtcttctcatctcaaagtccagccattccattctctcctcctcccccctgcgctaggatccccttccccaaccagctcccatcttgccactgctcctgaaggcaacaccagggactgggtgggtgtcagctggtacctgagttgagcagaagacctgaaaaaatcgggaaacctggatgagatttggacctaggacaagcatctcctcccaagtctgtgtggagaaggacctctccagaaacctctgttgagcagctgctcatttgatccttaatacaatcacaagataggaacaatgtccccattttcaggataaggaaacaggtttacagaggctatgtatcactggagtgcacgcagctaatgtattcctgcatgtttctgtgccctgtgccctttgtactaaaatcagtcacctctcttagctcttcttcctccataaggaagtgagaaacctgcttagttcaggcttctcccatctctactggaaacagaaggcttttgggacttgggaggatggccccattgcctgcactgtgcctgatgtttgatctaagagcctgggaaagtgggtgaaggtaagacctgtgggcatggagctctccaggggtgttagaggagctgggagcaggaagtaacacactaccgccaggtgtctgggcatctttgttggaaggaagcagaattggctccagcagatttgactggggtgggaaagacccatatgcaaatgaagagccaggctgcccaggcccaccatgcagaatgccagctactgtgtggctcactgtgtctctcccatccctgatccttcctttttctcctggcccattccatagtatcttctgcatttttttttttaagatggagccttgctctgtcttcaggctggagtgcagtggcacgatctcggctcactgcaacctccgcttcccgggttcaagtgattttcctgcctcagcctcccgagtagctgggactacaggcacccaccaccacgcccggctaatttttatatctttagtagagatggggtttcaccatcttggccaggctggtctcaaactcctgaccttgtgatctgcctgtctcggcctcccaaagtgctgggattacaggcatgagccacctcacccagccaaatcttctgcttattactgggtgagtctcattttctcagactgggagctatggaagacccaggtgaccaactcatcccagtctgcctacaacttcccatgtcttaaaattggaaatcttgcatctcaggaacccaggaaaacctgaatattgggttcccctaggatccggtctccccctttccatctcctgcaatctcagaaggccacagggagaacccagtcatgtaaacagctctttggcttttggttatgctctcctaccatctactaggtagcgagggcaccttgagccctactcccctctaccctcactcctgctgggccaagcagaggtttacagctatggaagagggcagactgttctggcccctgttgaagcagtgggcaccccacctgtggagaggacaagacaagctgaagacttctccagttacctgagatgtgaagctcatctagggagaaaaaaataaaaaacccagccgtcaccacatggccactgaggaggtgaggacagaggctgtccaggctctctcctctcccctctggttgtgcactcctcctgtggagctgcttgtctgtcattgcatggttgtgcatttgatgtgcatgtgagtctgcactaaaatgctggacacgacacgggactgggatacccagccctggctgtgccacctctctatatgggacatcaaaccagccccttcctctctctgggcctcaacttcctgtgaactagggacaataagctccaagggctggacatcacagggccattgtgaggcagtaagagctctctgtgagctgggtaaggctagctggcaaggtttgtttatctaaagtctgcccctaagcatgcagatgtggttgtggagaggaagggtggggagaatacatctttcccagctcagagaagaagaacaatgggccctcagaggctggcggcctccctgtgacccctgccccagagctctcagggaatcacctagatggaaaggccctggggagcagggccccaccccgactctccctctgaaagtaccccagtgctggtgggggtggggaggcacttcagccaccatcagctaggcgctagactttgagtcaaggtctgatgaggacatgctccttcagataggggatgtaggtccacacatggtgctccatccataatgattgattgccaaaagctgtgctaaagcatcatttagccctaacaataatgacttgaagtagatgatgttatacttcccattttacagatggggaaactgaggcttggagaggttacaagctggtaagcggcacaaccagtattcaggccaagtggtctggctccagtgcccgtgtccttcaccactgtacagtatcatctttctcacgctgctggcatgtgaggtcccccttccccagactcaactgccaggaagtgctgacccccgtatccttcctgacctggagaaacagctacccttcttagtttttgctgagtcaagccaccgttttctttgtaagaaagaaaagggggcaaggccctggagctgtaagagcccagggaacagagactcccactcctggggcacctggcctgatcatgccacccaccccatggggacttcttgctgggggcctgagctcttcctcccctcaccctgactaaggctttcaacagagcaaagtaatgagggtggtcctgcagctgggtgtgagggtgacaggcagtctttctgaagcccagggcctttccccagaaccgggcccctgcaggaccccaaccagtggggtcaacccaatttagtgacaaacctaaattatcagctcctctcctcacccttcagtttaaccttggacaaagtgtgcctctgtggaaggcagggctttgggatcactgctcctagccgcccaccttcagcgggaacaagcatcagggagtaggcagttccatagcacagcttgcttcagcccgtcttccttcccatacagagcctttggttatcccttccctcttggcacagagcaatcccacttgaatctgagcccccagcccaattagctcaccttgcagtggccacactcacaccttgctagatgttcttcttctgtggctagagaaggaaggacaagctgtccatccttcaggcagataaagggaccaagagggaagccctggggccctgttcatcatcattgcccaggccagtctgacagcagcactccttcctcctagcagctctgaggctggggtccaggtgggtaattggtgcccccaccaccccctcctcaatcctcctggtgttcagtcctacccagacctgcttgtgcctcctctctgacctggctcttctccttccactgacctccaatgtgctcagatgcctgccacatccccagactgtggtcagagaacagtgaatgatttaaatccctttaaatttactgaggcttgctttatggagtaacatatggtctactctcgtgaacataccatatgtaattgaaaatgtttattttgcagagtagggtatactataaatatcaattaggtcacggtagttgataatgttcagatcatctatgacttcactgattttttgcacagtttctctgtcagttgttaaaagagggatggtggccgtgtgccatggctcacgcctgtaatctcagcactttgggaggccgaggcaggtggatcacaaggtcag

SEQ ID NO: 1886026 - DNA, 4001 bp, Homo sapiens
acgcagcaccatcaccaggtagccggcactcggtgggctcttcactgagaaaacgatgtctgctggcggcactgcctcctgggctacctggttaacagaggtcatgaggactcacaagggaatgcgcagaggggtctcagaggggcccactgtggccctaagcagccagaacagccttgatcttgctccacttatttccccagataccactgctcatttagtgacacacacacatgtgggttcacacacacagcagccagacatgcagctggtcatattttttgtttttttgagacagggtctcactctgtcacccaggctggagtgctgtggtgtgatcacagctccctgcagcctcaacgtcctaggctcaagggctcagcctcccaagtagctgggaccacagtcatgtgccaccatgcctggctaatttttaaatgttttgtgtagagatggggtttcactgggttgccccagctggtcacatgttaatacccaccccacacatggttacggggtgtcggtcacacagcttgagatgcactccctcagggaagtgcataatcacatgtccccagactcagtgacacagacatatgagttcatcagatgccgatgcagtcacacaggtacaggtacacatgcgtgtgtgcacacgcacacaggccccctgctcaggatctgttcaggcctgtggctggtttgctggcagcatcctccccaacccctgctattaccacccaggaccatcagagggtgccctgccccaccccaccccacccctcctagaggcacaggcacccccagcacaggccctacagagctcacaccccaaaggccacatgggctccctcacctgatgggccatccacaagaggctaaactgcctccaaactcacattcctgttttgtgccttcggccggaatgttccttttgcatggaataccactccccattctctgctcctaatggcctgtactcttcagagcccggcccaaacactgcctcctcccatgaggccttcctgatgccagatctgctggctcaccatgggccccaagctccagatgcagaccagaagggtctccgaaataagcagtgtggaagagtaaggctgagagcgggcaaggactggcctgaggtcacagggcatgtcagatctctggaaggcccgtggctgctctgtgaggttcctgggtaagcagaagcccttgacagaccctcctggtcctggtctgggctctgagaagagagcaggctacacaggggtctgagaggcagcggcctgtctccacggccagcaatcccaaaagttcaggacccgtgatgccctcccagggaactgactgcaatgcagattctcgggctccacttcagagattctgtagggctgggtggcgtccaggaatctgcatgctcagccatgccatggacatgagtgggcaccagctctagaggcacacaccactcccaggaggatgggtgtacagcaagctccccagaaactcttgggaacacaacatatatgggagcatatctgaggcacgtgcacacacgcaagctgggaccaccacaggtacagcccaagtcacatgtgttcccggcatggaggctgggaggaaggccctctacctggtccacaccccgctcaccacctccagctcctcacctccagctggtcccttctgatctcagctgcctctccctggaagatgtagatcttcttgtgctgggccagcttcagtggggctactgggccctctagggcaatggtcacttgtagggtggcatctgtgtgcactggtcccacatccattgagaaggccagggtgttgcaggagctgaggctgccattgtggccatagggaacagccccaaccagcaggtcctgctgagagaaggctgtggctggctgagtggcttggagcaactgtccccagtgagggctgtctgtgacgtggtagtgggcctcatccctactgcagatgttgaggttggtgcccaggtggagctcggccatgttgatggtaccctggcctccttgaggaaccatgaggccggagccattggccacacagaggtaaggctccaaggcctgcacctccagcaccgtgatggcctggtgctgcccatcggacacctgcagcgggatccagccgtggtcagcctgagtgtgtgaacaggactcgcctcttcctgaggcccctcctggatgaagcggcagatgggctgcatgggctcatccgtggccatgatactgccagagaggaggtcctggtgggtcagcaccagctgggcctcagcaaagcccgaatcagcattgctgaaggccatgttgtctgtagtcagcagccgccacctaccccaggccacatggaagacgcagctgatggtctgcataggggcgtggtcattcacaggctggatggccactcagaagacaccccatacctcctcccaggccacgtcaccactgctctggtcctggtggcagcaggaaatgggatatcatcttctgtgatctcggagtcatcatgctgctagaccagctggccatgcatcaggtctccattggtgaaggatgtcaccatagtgatcttgtcctgtgtcccacgccaagtcaacctcccatggcggggctgctccatgacctcatagaggtacctggcactgttgagactcttgatgaagagctggtcagcagagaggacacactcaccaccctcgggcaccatgaggacaggcatgtctgggtcaccgccaatatggatggagaaggtacagagtggggagaaatatggtggagctgtgacatggaaacagaaggtgtcctccactgccactgaggcacgtgccatggccccataggtcacctctgcagcctgtacgtcatcctgggtgaagccctgaccgtctgacatcatcgtgccctgtagttgaaggttgcctttcctgggagcctgaaccacctcacagtggaaggttggggggcttgggcctgcctcctccagggtggcctccaggtgggctgtggtgagggcctcctgctgggtgttctgagtgtgcagtggctccagctgcagcatccacacagtggctctctggatggtcactaggaaggacagattgctcaggatttcccagctcacctgcacctgcagatccaggttctccacggtgtcctcggtgtagtgctgtgggtcagtgctcaggtatctcacgtggccctgctccacatcctgctggtggaacgcctgtgtgacccaccactcagcatcctccaccccaccagccccctgcttctgcagctccctgaacggcaggcctccggtgacatggaacagcacggtcacatcctgccccacggcgctggtctccaccaacaggttggtaggcaagatgggcatggcagagccctgggccagatgcagccctgtgctgcggtggatttgtatggccagctggacagccaccaccttcagcatggccggggggctggcctgcagtccattgctgacccggaatgtcaagtcctgtgtagggccaccgcagtggacatagactaggctgccggcctccaactcccagcaggagaactcagtcaccggctccccaggctggtctcggtgctccacggggaggccagagggggtgccaaggagctggaaggtgaggccctcacaggtagagtccaggtcataggcctggagaacctcaggccccagaggcttgtgtgtgtgttccaggatcaccataaggctgccatgtgggaagatgatgtggggtgggtcattgacagggttgacctggatgggcaggaggtctgtttggcccctccgcaggcatgagggcataggcacccaagccatcactgacacctccagcaccagctggtcagaggtgtcctcagggccatcgtggatgaagtgggccttgcagttcaccacgtccagaagggtgaacatttttcatgcctgggcacccaggacatccagctcga

SEQ ID NO: 1886027 - DNA, 4001 bp, Homo sapiens
atctacaggttttccaacatgttctattcttatattctaggcgtctaacttgttctctgcctctcctgccttatttttctctgtgattctctttactttgttttctattgataattcctcaatctcaccaattctacctatctgtataactggacagcagggttatactgcatctaaaattggattttattagtttatatttgtttctgccacttaaccatttaatccagaaaagttgcctaacttttctctctgagcctcagtttcctcatgtgaatgaagccaataatagtattattttcgaaggtttactgtgaatacatatgtaaagcacttagaactatgcctgccattttatttgcaattcttcctcctctttttttttttttttttttttagctagaagggactttttattgaaaggcgaggctccggcctctgatgggagctacaactggatctcgcggaacgcccgcttctcccccagcttcaccttgtacctgggtttgaacttggctctctgtcgaggctggatcatattcctcctctggaagctcttgaaccggcctcgaaggatgtcgccctcgggcttcagggtcctgagcgagtctgccagctccgagctcagctgcacgtcgatgtcaggtgcctggtacttgagccgccccagccttcggggcttgtcagcctcggccttccgccgtgcctgccgctgcctccgccgccgcgccagctccgccagcctcagggccacctgggccttgatcccgcgcagcaggaacacctcccggtgccggggccggagcctggcagtccgcaacgcggcctgctgtacccgcagcctgcgcgcagccttctcccgccgccgctgctgctccgtctccttctctgtggcggccaggcgggtgggcgtgggacagacctcggcatccccagcctccggcccctcgccctggcctggctcccccggaccctctgactcctccagcagcccctcgcacggctacctggaacgtggactcctgggtggcggcctgctctgtggcgggcagggccagctgccgctccagcttctccgcctccttctgccgctgcaactccacctcgtgggccgctgagagcagggtctggtggtcttcaaagtacgggttgtaggaagctccggcaggcgccacctccacggcgggtgcctgggacggcttggtgtgcaggcgtggtggccgcttcactcctttcttcttggtctgctccaggaaaaactcatcctggccaaacaatggccagtccagggggttgtctgatgcccagagttcgtagaagggccgctccacggtgtcctggggcccgggcttggccccggctgtgggagggttgaggagccgggcctgggccctgcgcacctcccggggcagctcgccctgcttggccagattctcccatagctgctccttccgcctgagcttcttggcgttcgggacctggtgggcgaggacgtctttgggggcagggactttggatgtgtctcgaggatgaggtcaacccgaaggggtttcttgagaagcagtgacttcttctggactttggttctcttcttagccctttttccttggagccggtgtccacgaagaagagtttttcatttggggcctctctcaacaagccaccgctcatgcgcccctgtagccgcacgtcttccaggaactggtcaacctccagccccagcggctcctgcgcaagcctccgccagtcccacttcttatttcttgggcctcgccgccgccgccgcctcagcgctgggtccgccgaaatgggccgcagccccaggaaaccagaatcgttatcgcttttcgagctgtgcttcccaccaacgccactgcctcctgccgccatcttgtcaaaggccctcctctatcttatttcttactgcttccttttctcttttgaaatatatacattttaatctattatatcaagttacttaaaaatatctaccagaaacatgaaaaatgtgctatgaatagtaaaatttggcataacactgagttcattaattcacaatgtggatctcctttatataacaaataaatacaagaatatgtaacaaataagatataacaagatacaagactaagagatgagcagccatggtgggaaagaggtatctcatatgtattcacgggaaggcgagattttgaaggattagaaaagttgttgaaatggaactgataacgtaagaaaggagtcacattccaagcaaaaatcccacttacaaatttccatttaatataaaatacaaaggttatggtatttatccaatgctgtttgtcagtcccttcagtttacataattgacgtaattcttttgagaactaaccgttcaatgacgtctgtcagtcttcgaaaataaaatatgaagacagacacaagacaagatggcgactagatgcagccagaaagtgctgctcccattaaaagagatcaaattgtcaaacaaaccaacgtaatttgggcaggtcttttgagaaaacattgagagtggatagaggtaatgctgaagcccatgctggaaagggagggagatgggaaccctgtgtggggtacgcttaacactagggttagtagttcctggcccttaacagctcctgggcaagagatgagttagggaactgaggggtacctcactcttgctgaagacctctggaatcctagatacagggggcctcacaccccccatagttgtgtgagctggtattaggatgtccctgaggagcaaacagagacaggtgtttggacagtgtggagcttgggagctttcgtatactgaaaagctctggcagagtgtagtcatagacatcaatcccccagggtaccccatctgcctctggaaggctgtcaccccagctgaccactgagccaacggggagtatggccagttctcctgtgggactggggcacatctgttctgaaaacccttctgcctgctggtccatctcaaggcccatgcccagccaccctgtaggagcgggtgcatagagcagcctcacagcccagtctggacgcatagctccaccagagtactttttgggtaaccagggaacacattggttttcccagtgcaattggagcctgattccaagtcacaggacatcctgttgcccacaggattgtgattcatagctcaggagtactgagcccaaatctgtggccagcatttgagcagaggaggagcctctcagagcactgaaggggtgagatgtgcaggttcctgggccaggatgttcatggagcatgcctccctccacagggctggtccacaaagggtgtggcctgtctccctgccacagcctcagccctagggaaccctgcagcctgggacttctcacaaaagaaatgcagatggggcaccagtgaccagagaagttcccctcaaggcccaggagcaggcctggcagggccatctgtctctccaccccaccacagaacacgcctatgaacacaagaaagtacaaaagaggcatgcagctgtgtattagcctagctgctggccattgctcttaattgccatctactgcctcacagcccaaactaaaataccaaaaattatgctgctaatatatacacctgtgaaactaagcacaataattcacccacaaataaagatcatatacagagtcctggcctcctgaaagcatgcagaaatgaagccaaccgactatacgcaatttataccacagttgaaggagcaccagcactcccagatgagaaagaatcagcaagaactctggcaattaaaaaagccagagtgtcctgttaccttctcatgagttcactagctcctcagcaatagttcttaaccagtctgaaatgattgaaatgacagacatataattcagaatctggatgtcaagaaagctcatcaagattcagcaaaaagttgaaacccagtttaagaaattcaagaaatctggaaaaatgatccaacagctgaaagacaaaatagtc

SEQ ID NO: 1886028 - DNA, 4001 bp, Homo sapiens
cccaggaaagccgggaagaggctacatgggctacctggcccactcagggaggagggcaggactgggtattgtcttgacagcaaccctgtcccacaacactgaactgggtagggaaggggtcaggtgtcctcatttttcagataagaaaactgaagctcccagagggcaggtaaatgtattcagagcacatggcaagtaagaggcaaaacttctgccagcaagtccaggatttttttcaccagaggacattgcttggtccccagacctcaggaccctgtgttttgcctcactcccacccacagagctcctgtatccaggtatcaactccaactcccactcctggaggccgaggcaggaggatcacttgagcccaggagttcgagaccagcctgggccacatagtgagaccttgtctccacacaaaaattttaaaaatagctgggcttggtggtggcatgtgcctgtagtcctagctactcgagaggctgacgttggaggatcactttgagcccaggaggtggaggctgcagtgagcagtcatcactgtactccagcctggtgacagagcgagaccctatcaccgccccccgccccaccaaaaaaaaactgagtagacaggtgtcctcttggcatgataggtcttaagtcccctcccagatctgtgacatttgacaggtgtcttttcctctggacctcggtgtccccatctgagtgagaaaaggcagtggggaggtggatcttccagtcgaagcggtatagaagcccgtgtgaaaagccatactccaaggggctccaagtccagcgcacagtcccagaagggcccagcaaggcagccagggcggcacaggcaccaggtcccaaccttcttccctgtttgcccactctcagaccccggagttcatcatctcggagccgctggccaatatgtactcatgtgggaaccagaacacactgatggaggagttggcagagcaggcacagcagcacgacgagatgctgcacatgcaccacgcgctgaaggaggcgctcagcatcatcggtgacatcaacaggaccactgttaccatgcccccgcccgtggacgacacctggttgcaggtgcagagcatccctgacgcacacaggtaccagagactgccccccacggccccaaaatcccccacccgggatgcccagaggagtgccctggggacaagtggcacaccccctcaccggggtggctcccacctggagtgacggggggagcttgacaaggagcactggctgcgggggggggggggggaggggtgggatgttctcgctgctgggggcggggcttaagctccggcaaccgccttggggtgtggcagggaggagcttcagtgcatgggtgtggccggcactgcgctggggcggggccgcccatctctcccctccctgtgcctcccaggtcgcccaagtccagcgccaggatgcccaggccctgccatgtccctagcccggcctgggtggcagggcccagctcctgggcggcaggacccagctcctgggcttcctcctgctgggtccgcccttggggaagtgtgccccataccctccaggccagaggcttcccctgatccctttgggccctacccccctggtgctcttgtgccccagccggggtccccaggtaagtaggggctgaatgcagccaaagaggccgctggacaggcgtggccaggaaggaaatgggactggattccagagcaccacatctggccgccagaactggccgtctccatccaaggcactgggaccatgggtgccggagccacgtgtggccgagggctggcagagcctgccccccagggatcactgagtcctggaggtggtcgtttttgaggagggggctgtggggctcgtcccacctgccgccttctgtccagcacttgcatgacacttccctctattttcactcttggcggctgcccacactttgcatttctcttcctttcttctcgctgtcctccatcctccattccgtccaactcctagcccagtcccgggggcgcctacttcaggtctgagagtctgaactccgagatgctctgggtgtgtggatttccttcagctaccctgatgtccccacttccaagtcctgactcctttgagccatcccagggggtgtccggccactggaccacaggagcagaggcgagtctgtgactgtgtgaccagcaaggtgtgtgatgtgtgcgtgagcgagcacacgagtgtaaagaatggcacccagacctgagctaggacagagggagcctgggggccacaggcaagctcatttcttctccacacccctccccgcccgaccctgtctaaactaatggggtagtggtagccgcaagggcagggatgggagtggctgaagcctacttcactcccaaagatttctaaggaaaatggttctactgcatcctttggctgggccttgttgacccgtgaccctctttcaagaacattcactctgatttccagtgtgccgtctccactggccacgttctctaaggaagaacaatagcatctgtttttgtttccaaatggctggagagtggggctgtgggaccagcgcccatatataaaaatgaagcagggattggggcttgccctgtgatgtgctgttgaccaagttagaggggtataggcaagcagcaaagtattgggcaagatcactggactgggagtccagagatgctgcttcaccctggggctttaggcaagtccctttccctcccagagcctcagcatcccttttagcaaattatgacattctgcctttctcctagaatggctgtggggatcaagggagacagtggccatagggatgctatgttaaccgtagatgcgtctgtaggagcactttcctaactgccaacgtgagttcagactcttcaggctatttggcacccaggtctatggtgaggtgtgacatatgggatgtaaagtttgatgcctgctctgactccagtcttgctaacacacacacgaaacctttggcaaatcatgaccctgccttggggaaaagggcagtctgggagagcttcttcaaggcagcctggcttcaatgcagtccggggcatgacggagataggcatacgttgtgaggaactggagggtaactgggtaaagagctgcagtgtgggcagaggtgtagtgtgggtcacaatgaggatagccactggccaaagcagggaacagagacagaatgaagagctctgtggggagggtggggcacagggtggagaaccttcaaagtccaaagagtatgacttgttgggattcaatgctgtaggcagtagggagccatggaaggctcttaggtggagaaatgacagccggacattagtgagcaagccctgtctccctgagcagcatgggtggtcctctgagcacgccaggcacgagtgtgcagggagctggtgcaaatgcctctgtgtgcgggtgagcatctgtgttgtgactctgcccacgcatgtgcttcagtgtgccgagtggctgcacgccccagatccatgcggcacgtgccggccggtgagggtgctgggcaccgggaggtggcggagagggcgacgtatgcgtgttgtttgtgggcatgtgttagagtgtgcatgcgggccgtggggcctcacagcatgtgtgtgcacaatctggcgtgtgcgtgtgtccgccacccccaggcctgccccacccatgcatgggacctgccatgtgatttgatgctgtctttcagaatcactatcagtggcccctgaggagcatcagccatggtaggtacatgcctcactgcctgctgcatgaatggtctgcctgccccgctgccccagctccacacagggggcatacctggagcctcagagccaggctgcctgcccctcccttctagagctgcagacttgctctttcctctttctgtccttgtgctgctggctgtctcacttccctccctgccagccacaggactcagtgccactgctcaaggtctccat

SEQ ID NO: 1886029 - DNA, 4001 bp, Homo sapiens
agtgccacccaggaaagccgggaagaggctacatgggctacctggcccactcagggaggagggcaggactgggtattgtcttgacagcaaccctgtcccacaacactgaactgggtagggaaggggtcaggtgtcctcatttttcagataagaaaactgaagctcccagagggcaggtaaatgtattcagagcacagggcaagtaagaggcaaaacttctgccagcaagtccaggatttttttcaccagaggacattgcttggtccccagacctcaggaccctgtgttttgcctcactcccacccacagagctcctgtatccaggtatcaactccaactcccactcctggaggccgaggcaggaggatcacttgagcccaggagttcgagaccagcctgggccacatagtgagaccttgtctccacacaaaaattttaaaaatagctgggcttggtggtggcatgtgcctgtagtcctagctactcgagaggctgacgttggaggatcactttgagcccaggaggtggaggctgcagtgagcagtcatcactgtactccagcctggtgacagagcgagaccctatcaccgcccccccgccccaccaaaaaaaaactgagtagacaggtgtcctcttggcatgataggtcttaagtcccctcccagatctgtgacatttgacaggtgtcttttcctctggacctcggtgtccccatctgagtgagaaaaggcagtggggaggtggatcttccagtcgaagcggtatagaagcccgtgtgaaaagccatactccaaggggctccaagtccagcgcacagtcccagaagggcccagcaaggcagccagggcggcacaggcaccaggtcccaaccttcttccctgtttgcccactctcagaccccggagttcatcatctcggagccgctggccaatatgtactcatgtgggaaccagaacacactgatggaggagttggcagagcaggcacagcagcacgacgagatgctgcacatgcaccacgcgctgaaggaggcgctcagcatcatcggtgacatcaacaggaccactgttaccatgcccccgcccgtggacgacacctggttgcaggtgcagagcatccctgacgcacacaggtaccagagactgccccccacggccccaaaatcccccacccgggatgcccagaggagtgccctggggacaagtggcacaccccctcaccggggtggctcccacctggagtgacggggggagcttgacaaggagcactggctgcaggggggggggggtgggatgttctcgctgctgggggcggggcttaagctccggcaaccgccttggggtgtggcagggaggagcttcggtgcatgggtgtggccggcactgcgctggggcggggccgcccatctctcccctccctgtgcctcccaggtcgcccaagtccagcgccaggatgcccaggccctgccatgtccctagcccggcctgggtggcagggcccagctcctgggcggcaggacccagctcctgggcttcctcctgctgggtccgcccttggggaagtgtgccccataccctccaggccagaggcttcccctgatccctttgggccctacccccctggtgctcttgtgccccagccggggtccccaggtaagtaggggctgaatgcagccaaagaggccgctggacaggcgtggccaggaaggaaatgggactggattccagagcaccacatctggccgccagaactggccgtctccatccaaggcactgggaccatgggtgccggagccacgtgtggccgagggctggcagagcctgccccccagggatcactgagtcctggaggtggtcgtttttgaggagggggctgtggggctcgtcccacctgccgccttctgtccagcacttgcatgacacttccctctattttcactcttggcggctgcccacactttgcatttctcttcctttcttctcgctgtcctccatcctccattccgtccaactcctagcccagtcccgggggcgcctacttcaggtctgagagtctgaactccgagatgctctgggtgtgtggatttccttcagctaccctgatgtccccacttccaagtcctgactcctttgagccatcccagggggtgtccggccactggaccacaggagcagaggcgagtctgtgactgtgtgaccagcaaggtgtgtgatgtgtgcgtgagcgagcacacgagtgtaaagaatggcacccagacctgagctaggacagagggagcctgggggccacaggcaagctcatttcttctccacacccctccccgcccgaccctgtctaaactaatggggtagtggtagccgcaagggcagggatgggagtggctgaagcctacttcactcccaaagatttctaaggaaaatggttctactgcatcctttggctgggccttgttgacccgtgaccctctttcaagaacattcactctgatttccagtgtgccgtctccactggccacgttctctaaggaagaacaatagcatctgtttttgtttccaaatggctggagagtggggctgtgggaccagcgcccatatataaaaatgaagcagggattggggcttgccctgtgatgtgctgttgaccaagttagaggggtataggcaagcagcaaagtattgggcaagatcactggactgggagtccagagatgctgcttcaccctggggctttaggcaagtccctttccctcccagagcctcagcatcccttttagcaaattatgacattctgcctttctcctagaatggctgtggggatcaagggagacagtggccatagggatgctatgttaaccgtagatgcgtctgtaggagcactttcctaactgccaacgtgagttcagactgttcaggctatttggcacccaggtctatggtgaggtgtgacatatgggatgtaaagtttgatgcctgctctgactccagtcttgctaacacacacacgaaacctttggcaaatcatgaccctgccttggggaaaagggcagtctgggagagcttcttcaaggcagcctggcttcaatgcagtctggggcatgacggagataggcatacgttgtgaggaactggagggtaactgggtaaagagctgcagtgtgggcagaggtgtagtgtgggtcacaatgaggatagccactggccaaagcagggaacagagacagaatgaagagctctgtggggagggtggggcacagggtggagaaccttcaaagtccaaagagtatgacttgttgggattcaatgctgtaggcagtagggagccatggaaggctcttaggtggagaaatgacagccggacattagtgagcaagccctgtctccctgagcagcatgggtggtcctctgagcacgccaggcacgagtgtgcagggagctggtgcaaatgcctctgtgtgcgggtgagcatctgtgttgtgactctgcccacgcatgtgcttcagtgtgccgagtggctgcacgccccagatccatgcggcacgtgccggccggtgagggtgctgggcaccgggaggtggcggagagggcgacgtatgcgtgttgtttgtgggcatgtgttagagtgtgcatgcgggccgtggggcctcacagcatgtgtgtgcacaatctggcgtgtgcgtgtgtccgccacccccaggcctgccccacccatgcatgggacctgccatgtgatttgatgctgtctttcagaatcactatcagtggcccctgaggagcatcagccatggtaggtacatgcctcactgcctgctgcatgaatggtctgcctgccccgctgccccagctccacacagggggcatacctggagcctcagagccaggctgcctgcccctcccttctagagctgcagacttgctctttcctctttctgtccttgtgctgctggctgtctcacttccctccctgccagccacaggactcagtgccactgctcaaggtctcca

SEQ ID NO: 1886030 - DNA, 4001 bp, Homo sapiens
cccaggaaagctgggaagaggctacatgggctacctggcccactcagggaggagggcaggactgggtattgtcttgacagcaaccctgtcccacaacactgaactgggcagggaaggggtcaggtgtcctcatttttcagataagaaaactgaagctcccagagggcaggtaaatgtattcagagcacatggcgagtaagaggcaaatcttctgccagcaagtccaggatttttttcaccagaggacattgcttggtccccagagctcaggaccctgtgttttgtctcactcccacccacagagctcctgtatccaggcatcaactccaactcccactcctggaggccgaggcaggaggatcacttgagcccaggagttcgagaccagcctgggccacatagtgagaccttgtctccacacaaaaattttaaaaatagctgggcttggtggtggcatgtgcctgtagtcctagctactcgagaggctgacgttggaggatcactttgagcccaggaggtggaggctgcagtgagcagtcatcactgtactccagcctggtgacagagcgagaccctatcaccgccccccgccccaccaaaaaaaaactgagtagacaggtgtcctcttggcatgataggtcttaagtcccctcccagatctgtgacatttgacaggtgtcttttcctctggacctcggtgtccccatctgagtgagaaaaggcagtggggaggtggatcttccagtcgaagcggtatagaagcccgtgtgaaaagccatactccaaggggctccaagtccagcgcacagtcccagaagggcccagcaaggcagccagggcggcacaggcaccaggtcccaaccttcttccctgtttgcccactctcagaccccggagttcatcatctcggagccgctggccaatatgtactcatgtgggaaccagaacacactgatggaggagttggcagagcaggcacagcagcacgacgagatgctgcacatgcaccacgcgctgaaggaggcgctcagcatcatcggtgacatcaacaggaccactgtcaccatgcccatgcccccgcccgtggacgacacctggttgcaggtgcagagcatccctgacgcacacaggtaccagagactgccccccacggccccaaaatcccccacccgggatgcccagaggagtgccctgggggcaagtggcacaccccctcaccggggtggctcccacctggagtgacggggggagcttgacaaggagcactggctgcaggggggtggggggtgggatgttctcgctgctgggggcggggcttaagctccggcaaccgccttggggtgtggcagggaggagcttcggtgcatgggtgtggccggcactgcgctggggcggggccgcccatctctcccctccctgtgcctcccaggtcgcccaagtccagcgccaggatgcccaggccctgccatgtccctagcccggcctgggtggcagggcccagctcctgggcggcaggacccagctcctgggcttcctcctgctgggtccgcccttggggaagtgtgccccataccctccaggccagaggcttcccctgatccctttgggccctacccccctggtgctcttgtgccccagccggggtccccaggtaagtaggggctgaatgcagccaaagaggccgctggacaggcgtggccaggaaggaaatgggactggattccagagcaccacatctggccgccagaactggccgtctccatccaaggcactgggaccatgggtgccggagccacgtgtggccgagggctggcagagcctgccccccagggatcactgagtcctggaggtggtcgtttttgaggagggggctgtggggctcgtcccacctgccgccttctgtccagcacttgcatgacacttccctctattttcactcttggcggctgcccacactttgcatttctcttcctttcttctcgctgtcctccatcctccattccgtccaactcctagcccagtcccgggggcgcctacttcaggtctgagagtctgaactccgagatgctctgggtgtgtggatttccttcagctaccctgatgtccccaattccaagtcctgactcctttgagccatcccagggggtgtccggccactggaccacaggagcagaggcgagtctgtgactgtgtgaccagcaaggtgtgtgatgtgtgcgtgagcgagcacacgagtgtaaagaatggcacccagacctgagctaggacagagggagcctgggggccacaggcaagctcatttcttctccacacccctccccgcccgaccctgtctaaactaatggggtagtggtagccgcaagggcagggatgggagtggctgaagcctacttcactcccaaagatttctaaggaaaatggttctactgcatcctttggctgggccttgttgacccgtgaccctctttcaagaacattcactctgatttccagtgtgccgtctccactggccacgttctctaaggaagaacaatagcatctgtttttgtttccaaatggctggagagtggggctgtgggaccagcgcccatatataaaaatgaagcagggattggggcttgccctgtgatgtgctgttgaccaagttagaggggtataggcaagcagcaaagtattgggcaagatcactggactgggagtccagagatgctgcttcaccctggggctttaggcaagtccctttccctcccagagcctcagcatcccttttagcaaattatgacattctgcctttctcctagaatggctgtggggatcaagggagacagtggccatagggatgctatgttaaccgtagatgcgtctgtaggagcactttcctaactgccaacgtgagttcagactcttcaggctatttggcacccaggtctatggtgaggtgtgacatatgggatgtaaagtttgatgcctgctctgactccagtcttgctaacacacacacgaaacctttggcaaatcatgaccctgccttggggaaaagggcagtctgggagagcttcttcaaggcagcctggcttcaatgcagtccggggcatgacggagataggcatacgttgtgaggaactggagggtaactgggtaaagagctgcagtgtgggcagaggtgtagtgtgggtcacaatgaggatagccactggccaaagcagggaacagagacagaatgaagagctctgtggggagggtggggcacagggtggagaaccttcaaagtccaaagagtatgacttgttgggattcaatgctgtaggcagtagggagccatggaaggctcttaggtggagaaatgacagccggacattagtgagcaagccctgtctccctgagcagcatgggtggtcctctgagcacgccaggcacgagtgtgcagggagctggtgcaaatgcctctgtgtgcgggtgagcatctgtgttgtgactctgcccacgcatgtgcttcagtgtgccgagtggctgcacgccccagatccatgcggcacgtgccggccggtgagggtgctgggcaccgggaggtggcggagagggcgacgtatgcgtgttgtttgtgggcatgtgttagagtgtgcatgcgggccgtggggcctcacagcatgtgtgtgcacaatctggcgtgtgcgtgtgtccgccacccccaggcctgccccacccatgcatgggacctgccatgtgatttgatgctgtctttcagaatcactatcagtggcccctgaggagcatcagccatggtaggtacatgcctcactgcctgctgcatgaatggtctgcctgccccgctgccccagctccacacagggggcatacctggagcctcagagccaggctgcctgcccctcccttctagagctgcagacttgctctttcctctttctgtccttgtgctgctggctgtctcacttccctccctgccagccacaggactcagtgccactgctcaaggtctccat

SEQ ID NO: 1886031 - DNA, 4001 bp, Homo sapiens
ttcttaaccagtacccagcaatctcaacaattaccctctactgccccttgggccccctgtccccaggagcctggccagccaagactcacatccccaggtgagtggcaaccaccagaagtggttgtctcagggctactgccagtttttttcttttttgtctttgctcctgctggaacaccagggctcttcctttgctgatattcttttagctgtgggaaagaagagcagtaatactcatgagaactaccagcccttacagccacaccctccttacagtttttgcaaaatactcttatacaccatctggtttaatgccaccaacaactgtacaaggtgttgtcacaatcacttagtgattgagagggatggatattatggctaaaaaaaaagttgggggggcaataatggaacttaaacttggtcttctgactccaagctctggggttttgccatgatcagcagctgctggggaccaaaaccagacgcagagcaagaaaagtaaacattacataggcaggaactacatgctgtgtggtttagagtcatacatcctcacatgtctgttagtgtgaagaagtgcaccagtatctctcaaacttttatatcaatgtgtcctcatggcagaaggcagcttttttgttaaatctgggaatttgtcagaaagaggacaacccaagtctcatttcagagagaagtctggtatactcttagaaacctatgtgagggtcatccctaagtacattaatgttttttctctctcaagagaatcaagggaaactggtgcttcagaaagatctcccacatttatcctgtggcactcaatgtaccccaagttgagatgatatgaggaagattcaagctgtcaaattcagtttcccaagatctattccacagaagatgagcaaatctcacttcagagaccactgactgaagggcagtctggtcccagaaccgtggagaattagaatatgaggtggagaactcagaaaaaaatgttaaaatctctctggagagtagaagcctgggagaaaaccaaaccaaacccattctcccattaccacccagagatactgtcaacgttttgagctcacaggggaagtgtaggcttttcacactgtcgatgtctatgtgaagggagtaaggcagcctgaaacctcttgcccctaggtcccatagtccccatttcccttctagctggaaatttgtgctgtgaccagaggaaccagaaatggggtgagaatgcttaggggactgggttgtaagatcaaaggccagtcttgcagcagtaatgacagttcctaggaggactgtgacatcactacattccactcctcctgggggtggggggaacctcatcagtgcaatggctgagttgccgatccacgatgggggaggggggatgtggggctgggacccaggtccttggagatgccagtccagagagcccagggaggtcgggcttgggtcagcaggaggggagagcagagtctgctcagggaaccccaggagtcaccagcccaaagtcaccccgggatgactggcgatgctggggtgttggggctgggggacccaggtccttggagaggtgagcccaaagaacccagggaggttgggcttggggcagcaggacctgagggctgaatatggagcagggagccccagcagtcatccgcccaaagtcaccgcagggtgattggcgagggcagaggccaggctgcttgctgaaggggcggggctgactgacaagactttggtggggggagtccagaggcgccggggtaggggggcccagcccggtgtgcctcaagagtggtatggactctgagagtggtcttgtcatcagaggggatctctggctaggttggggggccatgacctttttcttggctttttacctttttcttgactgctgccaatttgttccatcgagtttcttctggcatcatggggtcgggagggaggtagggttggggccacatcagcgaacacctccagtcacctacaaggctgctgtgtgactgagccagaggaggcgtaaccagggccacactagaatgcagaataggggtgtggccttaatgctccgatcccattggtcaatgagaaagatgaaaaggaaaggaggcgtggccaggcagcagtgtgtccagaggaacctgtgacatcacaaggaaagctgcccatgcgactgctgtccccgcccattcggggagaggggcggggcctgcctactccgggagaggggaggaccggcttttgctttaaaatgttaaactttaaaaaatatatgtgtttatactttatatatatgtgtgtcagtgtgtgtgtgtgtctacatgttcctccagagctgtcttcattatccagcttctatgcatggtctatgattttggcctacgtttttcatcttcagatggagtataagaattaccagtattaccccagtgaagacacaaatcctataaaaatggaaaatccatagtatgtttgatgattaatgaatgaagtggactatattatccaacattccaataaggtaaaataatcacaatgatttctcggttttggaaaaaacatttctcttattctcctacattattaagattttttaaaaaacaagaaacatgtctaatatctttaaaaacacaaagcttttgggccgggtgtggtggctcacacctgtaatcccagcactttgggaggcctaggtgggtggatcaccttaggtcaggagttcaagaccagcctggccaacatggtgaaaccccatctctacttgaaatacaaaaactagccaggtgtggtggtgggtacctgtaatcccagctactcgggaggctgaggcaggagaatcacttgaacccgggaggcagaagttgcagtgagccaaggtcacgccactgcactccagcctgggtgacagactgagactccatctcaaaaaataaaataaaatagtcaaaaataaataaaaacacaaagctttccatttaataagcactcaaagctctttactggtttaaagcaaatacaaggcctatttttctagaatcacctggcctctctaagccttgcaaatgaaactgaatttctcatttgatacttggctatgacttgcaatcatgataaccaagaattgtgttatgtcactgtgtattgttacctgaattccacacgaggctgggatcaagggttgaatctttcatgatttgctccataacctgtgagcttcctttcccacaccaaactaagctttgttctagagttctacaatttacagttagtagacaagagtggttctcaaaaatgtagcctctggactagcagcagcagcagaacctgagaactttttataagtgcaaattctcaggccccaccctggacatggtgaatcagaaactctggagtagggctcagcaatctgtgctgcagtcatccctccaggtgttcaagaacctctggcatacagcaggtagaaaaatgtgtttccttctgtaggtccaaagccagggataccatatgttctgtcttgatatgaaacaatgacatgcaattaaaagacataaatctccttcctactcccaccctccatccaatgtgttttatttttatgagttaaataagaaaacaaatggcaatcagagattcagcctaaaaagtatgtttacaagtgtcagttctcatccagcctgatctcacacaataccatttacaccctcttacctctcaagttttttaaaaagtgtcttcacaatgtaagtctcaggcacactagcagttctataataaaacaccaagtagatcggaatgtccaaacttactagagaagaaaagtggaatcactggctgtattttcaaattgcattcaacaggaaatgtaagttttgaattcttttcaccttcacacttccaagttaatagcattaaatcagaatactccattcttccaaagcctctagccaggcaaagttttactgtattacttcttgctttcgatagat

SEQ ID NO: 1886032 - DNA, 4001 bp, Homo sapiens
aaaacaaccccatcaaaaagtgggtgaaggacatgaacagacacttctcaaaagaagacatttatgcagccaaaagacacatgaaaaaatgctcatcatcactggccatcagagaaatgcaaatcaaaaccgcaatgagataccatctcacaccagttagaatggtgatcattaaaaagtcaggaaacaacaagtgctagagaggatgtggagaaataggaacacttttacactgttggtgggactgtaaactagttcaaccattgtggaagtcagtgtggcgattcctcagggatctagaactagaaataccatttgactcagccatcccattgctgggtatgtacccaaaggattataaatcatgctgctataaagacacatgcacacgtatgtttattgcggcactattcacagtagcaaagacttggaactaacccaaatgtccaacaatgataaactggattaagaaaatgtggcacatatacaccatggaatactatgcagccatagaaaatgatgagttcatgtcccttgcagggacatggatgaagctggaaaccatcattctcagcaaactatcgaaaggacaaaaaaccaaacaccgcatgttctcactcataggtgggaactgaacaatgagaacacatggacacaggaaggggaacatcacacactggggcctgttgtggggtggggggaggggggagggatagcattaggagatatgcctaatgttaaatgatgagttaatgggtggagcacaccaacatggcacatgtatacacatgtaacaaacctgcacgttgtgcacatgtaccctaaaacttaaagtataataaaaaataaaaacatacaaccaaacaaaaaaaagaatgctggaaaagcacaaatgtaacgttttatgtggtgggacagccctttcaaaagtgttttccactgcttatactgatgaaggtagaaaaaaatttcacttattttaactcttcctttaaaaacttcttcttggtggctcatgtcatgcatactccacaagtcctggaagttaaatgctcttaaatatttgatggtctggtcttagcaaaacggcaggtttttacttttacatttttagctatgttttaaattatttgtaatccagacactgaagttttattttgttgtgaattgaatctgggcagagtgtacaagggatctctctgtattatttttacaactacatgtgaatctataattatctcatcaaaaattcactgaaaaaggtatcacggagcccatgtttgctgttaccgtctttgctcctcccaggttacaatgccccgtgcctctcagtgcacagtgaaaatgcagcagacgtttttgatgtgagctccacggaatggatccagactgtccccttcaacaaggtaatttgaccttaagattatgcaactaatgagttaatgactgaaacgcggaaacagaaataatccattgtacatttactgtaatgggtacttgctagtttggaggcttaacaaagagtataaaaaacaaaaccctacaaaacattatattgattaattgcattactagtactagagccatttgtgacatctagttccattatataaagtagtattgttatagataaatatattatttatttataccatacagcacagcagttatttcccatattcagtttaaagttactttatcagtaatttttacttaccagtataatttgttccttttatacttaccagtataaaaaggaacactttacagggtaaaaggaacatttttacagggtaaaaaaagaaaaaagcatataaccaaggctgtgtttcagattctcagtaggatctcacaatggtgatgttttgcaaaacaaggacattgacagtaactccatctacttaccttaggcagattttcctagttttactttcactgtgtgtgtattaatgtctgtataattctaccacctgtgtgaattcatgtatccaccactagtcaatatactgaatggctccagcaccacagtgggtccctcaagagcccttttataatcactccccctccctcccacctccttccgctttcctaacccctggcaatcagtaacctccatttctaaaattttatcatttcaaaaatgtctaacaaatggcgttatatagtattcatgatttttatctgctaagtccaaatttatttttctaaaaaaaacaaactttggattagaaacccaggagaatcccattacaatattcttatcatatagcagctacatcaaaaaatttttggaatatatacagttcaaataaatagacaaaaacaagtgatgcccatcagtcagatgatagagtaacttcaattcatatggtccaagtctgacaaaaatgcattctaacacctgcatctaacaccagctttattgaataatttcatcacgtttcaaaatctgtgtctcctagaccagttgagctcacaacaaaaagcaattgtagagagttagaaaaatatatgaaattagtgaacaaaacagtgaaaccttccaaccaggaatgtttttggaactttctttgttagtaatagttccttatggttcctaaatattcaacctcccagcatgaatgtgtctcccatcaaaagagccacagaataaacacaacctcttttttcaacatccctcttcctatgctcacgtctcccatctttttcccttgtcttacagccaaattcctgaaattgttattgatattccttgccctccacttcccacccctattcacacctccatcacagggcaatctgacttacaccttaatcactccattaaagctgctctcatacaagttatcagccatcagttgtgaaaaccatctgacctgtttgtctcttcttggctgcccagcgacacctgacccttctttcttcagtccccacgctgctgctccctcgattttccccacttccctgaattctccttccctgttttctctgctcctcttcctctggtcgaagccctcttcctttctcgctctgcttactcagcatgtccaaagagtcaggctgacactaccagaagcgagtcatcgattttagcgtgacaagtgggatggctagagattgtgtgccatgcacagtactgttcatgaagtgttcctacaaccaggctttagagctccttccccattataggaaattcagggcatagaagtgaagcagtatcatgagggagaacaaagacaggtgcagattgtgggacattatgaaggacaacaaatcagtggcagggaggactgctcaggatgagaggacctttgtgagaaagtggtgtgcagggtggaccttgtcaggattctgattccaatagacagactgcaaaaagagaaatacttgtgataatcaagtatgtatgactgtggactatgtatgggatgataatcagaatcattgagtacatcttcaggagcgatcacagcaatgtgattatgggagaaagtgtccctacttttagtgatacatgttcaaatgtgtagagatggaacaacatgatgtcagggatttgacttgaaatattccaacaacacaacaacaaagaaaatacttcaatggtcacatctcttcctccatacccgcctagatctgctccaccttgtgttttatgacctcagagtctatcagtggcctccgcccctttgctcaagttggaaacctgagaatcattgctgattctcttacatgtcagcttccacttccaaccaagtgtgaagcttttgcaattttatctcctcaatattcctcatatcctctcctctccatccccaccgctactatcatacataattttaattcacaatttctcccgtaaccccctaactggtctcttagcctccagtaagtagtaattgaattcccttaattactagtggtgtggagcattcatttgtgcgcttatttgccacatgtatcttctttgttgaggaacctgttcaaatactccgcccatt

SEQ ID NO: 1886033 - DNA, 4001 bp, Homo sapiens
agcagcccagtgatctgcaaacacaggctggccatgagaagtgagggtgggtgtctgggcagccaggccctccccatgcaggctgggagccactgttggaagagttgtgtgtggaagagcacaggctattctagaaatggggcatggctggcagcttaaagccaccagtgggaggttcacgggctttctacagtggccatttctgaacaaaggatgtgcctgcttttctaaggcagccccttttcataccgaccttatgcctgaggcagcaaccctctggcctacaggtgcctgaagcatagtgggcatccttcatagcactgccattcaaaaccacacaccactgcccactatgtacaggagagagaatatggggagatgcccagcaaagcaaggtttcagagggtcagagcaccgacaggctgacggaggctggaaacaggctcttgcaaatagccactggtaagcccgaggatccaccaatcaggcagaaagcgtgactgagatatgtataaccaaaagtatggcacggaaatggctgtaaacagattagacctcccacccctgccccccgcacagtgggaaatgaggaagggcagcctggcttgggacatctgcccagcagatccccagaggccacacacgttacattctggcttttaagtgcactttcaccctttgggcacactttggttgtgaaggcaggaagagcagcgtcccggagcccactcaggtatcctcctcctcgtcactgaccagctcacccttgtcagggctggtgtcccgctcatgcaggaagtcctcacggatggcctccagctcggtcagctccagccggactttctccaagtggtaggcacgtcggttccggatctggcgtacggggaaagggttcaggtccccaaaggagatactgatcagcttcctggcaggacgcaggggagagacaagagaatcagcggcgctccagagagtgctcacacacagccctcacaggcacagcaggtggcctggggcagggtgggaagagcactggccaggctgggggcctgatgcaggggacgaggcccaccttctgcagagaggtgacaaggaacaaaggcccagcaagaggcaggttcagaatgatggcctgcactccagctctgccacatgcttgctgtgtgactgaagtcactgccttttgtggcctctgattcctcatctgcacactggggtaacagtagtgccacctcctagggtgtgggattactcgtgttcccacacataagcgctgagaagagctcctggcacttgcatggtgatggtgggtatgtctgcatccttgggcaggcacgaggcctggcaccgggcacgagtccaggacgtctgtgtcccaggattcattgactgggaatgaacacaggcccaggcagtcctggtgatgactgtcagacctagtcggcaatgtgacaagtgtccagatgcagtctacagagaaatgtgcagctcgtgggtttcacatccccaggtcagggctccaattttcaataaaatgttaaggttatgatccacttgctcctaaccactggtcagtggcttaataaaaacaaaaccaaaagctgtcctgaggcctggctatggatttgtagcactaatgggtcagtcacactggtctctggggatcacaaaataggccagttcctccaacactggggccaccatcttcccctctctggattctgccaggccccagatgctttgtatccaccaacatgggctcatgcgcttccctgtcaaccaaaggcccaacagactcaccagccccaggaaaagctgtgatgaaacagaaatgccccgaaggacttcctgcctgtccccatcagagcaggccatttgctcctgctgctgtcggctgcgtgggctccttttaacacaggcacacacgagggtgcaaccttttatgtttcaaaacacccactactacctggacatgcttaactctcatccagaggcttaaggtcagaaaggccagctttatttaaattccgaattcaccagtgtgtgttctggaacatgggagcaccagagaacagagaacgcccaagcacaggggtccccgcgtgtggatttctcaggttccgcctcctgcctggctctgcagaccgggctgccagccccagcaggtgggaggaggctccgtgtgaacggggcacagggtccccaccaccagtcctttctccccaacagctgtcagcccacagcccccacaaaccccaaacctacggcgcccaacactcctgtgctgcagaacacgagcccgaagtataattcttcatttgctcctcagtcaggagctgacagagacccctcggcccaggctggcacccgggaagccagaccccacctctgcctcaggcctggaaggttcctctgggagatgagaaggtgtcccatggtcagctaaatttgggagacgatgctcagcgccttaaaaggctcctagaagtcctgctgcagaacgtggttcaatcctgtgtaactcccgtctcctgaatgcagctgaccacacaactccctccctgtgtttctgaaggccaatcgctgtgctgcaggactggcctccttgcaaccactagtctgggaagctcattaaaacactgaggctccagcccagaggcgggttatgggcccctgcagtcttgataacagcggggagcctgccaccgccttggcactctttaaagcacctgttggtgtggcgaccccgctttctaaagcaagctgcaggggagaccgtaccgcgagccgctcacaaggaggcgctgcaggaccatgcaaggcccagcagtgtgggaggggccaggtcggcctgcggtgccagggaaggggcgggcactcgccagagccacgcccactcgcctcggctcctcctggcagcgcctgggacccagtacagaactgagggcagcggcgctcccaacactgccctagctgtcggcatgggtgagctcactccctgtcactctcggcaatcctgacccaacacgagatgaacagaaaccccccaggctcaccccaggactcagaatcaaatttcccccgcaaatatgattcccatatccctcctcatttggcagaaatcagggcactcttgttggtgctattagtaagcctgaaactattacaaacacactccccagtaaaagactaaaaatagcgatgacctccaggaagcctggcatggcctcagccagcacctcagctcccattgtccaaatcggctctcagggtcagagcagccaacagctgcggtccaggggatatacggatgagggtggcccagaacaggcaatgaccgtgtggccagggagggttcctgaatacttggctgcccaggccagaaacacagggctcttccaagtcaaggatcacttgagcccgggagtttgagacaaacctgggcaacatagtgagacctggtctctacacaaaaatttaaaaaatagctgggcttggtggtggcacgtgcctgtagtcctagctactcaacaggctgatgttggagcatcactttgagcccaggaggttgaggctgcagtgagtggtgatctcatccacggtaccccagcctggtgacagaacgacatcctacctccaaaaaaaatttttttaaactgagtagacaggtgtcctggtggcatgacaggtcctgggtccccttccagatctgtgaccttggacaggtggcttttcctctggacttcagtgtccccatctgagtgagaaaaggcagtggggacgcagatcttcaagttgaagcagtgtagaagccgcatctgaaaagccatacttggggctccaagtccagcacacagtcctagcagggcccagcggggtggccagggtggcacaggtatcaggtcccaacctccttccctctttgcccactctcagaccaaggaattcatcttctcagagctgctgtccaacctgtactcgcatggggaccagaacacgct

SEQ ID NO: 1886034 - DNA, 4001 bp, Homo sapiens
cctccctgacaatcccttccaacctctgtcagcctccttccccacaatcacacacacacacaaaaccacactgccaggaagggaagccattgagtgagtattgtgaatcctacaagtggctctgtagtttaaaagggcaatgcctgtgcctgaagaaaatttgtctttagcttcatcaggtgaagaaaattggttttataacacaaggcccaccaaaccagaaaagcccaggaacgcttctccacaggactcacttagcacgagaaatcactcagagcaaaatgacgcacacagtatttgtcaaatttttctttttcatttagcagaaggtaaggtaaaagactacaactgaagttaataaatgacactctagccattttgatcatttgtcactataaatgatagacatttaagctagttccatctggggaagtgaaacagaatcatgttcatataataagccagacgaaccaaattcagtggaatacgtgcacccaaaactggaccagacttgtacttaatgcagcctgcaaatccccaagagtccacgacagaatacaagaacagtaacactggtttatctcaactcatcttagctccctcacaaacttgccaataatgacctttcaagaactgcaccgttggtcctcatctgggcaatcccgtggcttagaaaaactgaataaagtgcttcttcgaaaaataaaacaatgcggggaggggggagtagtaacaaaaaaaaaggcacactggtttttactgtactgaagcaataaattctccaacgaacttcattaatgagtatcagcaaagaatgaacaccaaaataccgctcaatccaactttcatcgtgaattcttgaattcacagtaggatcattaaatgtgacggtatcactctgctataaaaactatttccaaaacaaaacaaacctatctaccccctttcttgatttaaaaaaaaaaaaaagaaaaaagaaggaaaatttgagggtttttgcttttttcaacttcacacaccggtttgcctttgcaaaaaaaaaaaaaaaaaaatgtttagtctcaaagtatagctgcaaggtggaccggctgcacgggtcccagagggccgctcgcctccgacggtcgcagtttcagccgggccgcgcccgcgagaaacagcggagaggccccagcaggcgggcgccgccggacaggtttaccgtccgcgtcggccccggggaaccgctccctcgcgcccgcagcacttgttcgcggcgcggactccacaccgcggccgcccgccccaggggaggagtgagtccgccccagcggcgccaacccggggacccggggcaagggttcggggccatccgccgccgggcgcgccccccatccggaaagcggcgacggcccccaagttgggctgcggagtgggaggcgcgccgagccccaagcagacaatgcgggagaagggtgatgcgcagggaggaggggtccgcaaagctgaggtccccgcgccgcccggctacccatccgtgccgcccgcccctgaagccccgcgcagcccccgaccctcctctggggcccgccccaccgagcggccgcaggggacgggccgcgctccgcaccccgacccctcctcaaatcacaaaacttcccccaactccgccaactaagttgcgctctcaccgtgcggctcccggggctcccccgcgggccgagccgagacagctcctcaccttcgccgcggagaaagacaataggctgcctctcccccggcggcggcagcagcggctgcggctaaagcggcggcaaccgaggcgagcagtgggcacggcggtctcggccgagccgaggggcttcaccgctgctgttccggctccgcgacagctctgcacgtagccccagccaccccgcgcaccggctacaagccgcccgggggtggccggggcacgcaagagggcagtaacgtctgcgagtcctcccgtgagtacacgcggagcaagggctgcgagctgggattgcacggcagagctgcccatcccgctccacgagaccaatagtaaggcacctgggcggggcgctcaggttgctaagggaggctgaggttgaccgccggggctgctctgtggcaaagtgatcacagcagggtggctggcagagactgctctgggaaatgcccactcacggtctcctctccgccctgtttctagaaactgccctttctctgtgtgctcgtggttacctgagctgtagcatttaaccacacatcgtgaaatgatttactcctctatttcccccacttcaactcaggaagtggggtttagtcttctgtgtccacagcctaggacagtctaaggtattaggtattaaatataggtattaaacaagtgttggatggatgcacggcgctatggcggaatcacaattgtgacagtgcattccgtgaacttttggctactcgatcaccacagtcgttccgtgttcaagctgcaaaggacctcagaaatcatcggattgctttgagaaacaaaatgtggtccgtgtaccaacggcggccgaggagaatatattagctggtacacggagaaacttcttttttcaaatagttaagtgttttagtgctcattaggagggaaatgcctatcacgtcaaatcattgtttcattaatgttacttcttaggtcaaataaaaagtggcaaaaaacaagtgtatttcaagaaaagtgttaagtgaaacttgagacactttatatgcagttcaagaatgtaaaatagtagttgacagtgattgaagtaagaacagttggttaggtaggaggagaagattattggctgggaaggaggaggagggaaccctctgtggtgctgattctgtattttgacctgggtgatggataacaaaagtatgtacatcaataaaaaatacatccagtgcactttagattagtgcactttacacattttatacatgtatttttaatgtcaatttttaaaaaatctggtatggtatatacccccacaaccccccccccccaaaaaaaatgcaaagatgcaaatgactgccatttgggaaacactgatccaggcaggctcactagcagtgaccaaacacctgagaaagggtattgtgaatacctgatgtatgtgccaggaacttccatggttgaatagctccaaatctcagaaatgctcctaacctagtgttgagctctggtgcatagatatattttcttttctttctttctttttttttttttttttttgaggcagagtttcactcttgttgcccaggctggagtgcaatggcacgatatcagctcactgcaacctccgcctcccaggttcaagcgattctcctgcctcagctgcccgagtagctggaattacaggcacatgccaccaattccagctaattttttgtatttttagtagagacagggtttcaccatgttggccaggctggtctcaaactcctgacttcaggtgatccacccacctcggcctcccaaagtgctgggattacaggcttacaggtgtgagcctcagcatccaacccagaatagcttaaaaaaaaaaaaaagccaggcatgcccagttcttcatgtgaaattatttctgtatcacctcatcatgctgctcaccctcttccactgttctctaatttgtccttgttgatatttaaaagctggcacaaggccgggcgcagtggctcacacctgtaatcccagcactttgggaggctgaggagggtagatcactagagcccaggagttcgagaccagcctgggctacaggtgaaaccccatctgtactaaaagatacaaaaattagccaaacgtggtagcccaaatcccagctacttgggagaccgatgtagaaggatcgcttgagcccaggaggagaggttgcatgagccaaatcagcagggcagctgcagagtggggtgcaaggtcctcaacccagaggttccctaggccccacttgccccagctcatgagagcctggttctgagctctg

SEQ ID NO: 1886035 - DNA, 4001 bp, Homo sapiens
acaagatcaataagatctggagatgtactgtatagcatggtgactgtaattaataataacatattgttcagttgtctctttatatctaggggagactagttccagctcaccctggagacaacaaaatcagcagatgctcaaccgcctcatataaaatggtgcagtatttgcatataacttacacacatccttccatgtagtttaaataatgtctacatttcttatagtagctaagacaatgtaaatgctatgtaaatagttgttacactatatatttgaattattttttgtcatattgttatttttatttttttctaaatattttccatctgtgattgaatctgcagatgcagaaccacagatactaagggccaaaagaatacttgaaaattgctaagagagttgatcttaaatgttctcacaacaataaaatggcaagcatgtgaggtgacagatatgttaatcagtttgatttaatcattttgcaatgtacacatatatcaaaatatcaccttgtataccataaatatatacaatgttttcaaattaaaccttaattaagctgagggaaaaatgtacacctgccacctgtcacctccaacacacacttcctattgacctgaaccttctaatttttctccatctttactcatcgccccccaagcatgccacatagtttatttaccccgtcttcccccattacaatataacttccacaagtcaggaatttttatccattttgttcactgctgtattcatgagtatttatagtagtgtctggaatgttaacaattattattgttgaattaactaatcaattattattttaaaaatataaataaacatgtatattacattttgcatttaaacgccattagagcccaactataaatataagtatagatggaaggggaaaccttaaatggttttatccttatattctttttgccaatatgttttcccacatttctctacaataaacttctacacctttataatattgagagtaaatatttcttaagaaaaattatccttaagagagagctcaaaaaaataaataattcacaaaaaactgctgtgaaggctatgcatggaaagggcagaagggagatggagggagtgcagagacctgtgggctgagtctgagcctcaaggctttttcagcatgaaactcagcaaagacaggtgttaaaaaggcctgcctcccaccgcccctgctggtcactaagcttaggcaatcaaagtgtaccagtgttttttcactgcccagcatatactgatttaaggactcaacactctgacttgagaaaacctaaaacatgaagttatctcaaaggtgggtgagattctaaggaggctcaaatatatagtcctcaattaattctcacctcaacttagttacaatctgatacaacatattaggagacaggaacagcacagtggtaaaaatcaaacctcacctcaaaagatcgtaaattattgctctcagattagtattaactgacacaatatgtgcagtgagtatcttctcttcctcctcccgaattacagaagagaacgtgaaagactaggagccatacacattaccccagggaaagcagagtgaaagggcagtctgggtgtccttaactgcaccactcacagagggggcctgtcccacaaccagccaggttatttcaacctattcttacctgacaaaaaggatctgggggccttggctccactgtaggtgggtaattttattccaactggttttgggtgctagttttctgcctagtggtcaaattcagaaacccaatcaggacctaggtctccacctggagctcttaggttagctaatcaatgtcttcttggtcctcaaggaagggtttattgtttttgtttgcttgtttgattggttgtttgccattgcattaaaattctttcttacccagcaattgatgagttcaaggctatcctgtcacatttcgtgatgtggcctgagccctcccagagcgttactgactgggaccaactactaactaaagtttagtgaagagaagacaatgagcttgctggaacgtcacagaggcttggttgccatggtagtgattgtcagatgagatcacagagaagggtgtaagagaaaagaaagaaaaacatgcaggaaaagctgaagcataatattatactaaaatatatatatattatatatatatattttatacatatttatactgtctaaacttacagtggagtaatgtgttgaaacttgaggggaaaactactttttgagaaagactgactttccagcatcttcttagagagatgtggtttcatggaagaatggtgtctgagctacattttgtcttattctaaaagtaaaaggaatgggactgatctggaagcacatagattccagatcaatactaataccagactattgtaatgccaatttataaaaggaagctaggtatccattaaagtgacagaaaaccaacaggtattttttgtaacagatcattgagttggatgtgaaatggtttaaagctttaactattccaggggctcctgcaaagtgtaaacttagtgtttccttgagttagcactgaaaggagagcaggattgagggacaaaagaagcaatccagtcatctagtaatatgactctggatgatgtttgctctaaattgctcccagcatcagtatgtggaaggtggacagtgtgtgtgaacttcaaagcccccgcagggcttcagttggcttgaataaaatgttactggttatcctgccaccttgtggctatgggccaacatgccagggtgtggaggaggaagggaggaaattaatgaatcacagagttgcctgactgaagaaggaaagctcagaaacacatcctcttctctcttccctatagatgtcaacttgcccatcacttgattagctaaaagtgaatagggcttaaagttcagtccttgagtgagattttgcttatatagccctcctaggacttttgtcctatcagagtagcttgttgcacagtgtgctccttgtgatcaacagttagttaatcttgtctctccaaaatctaaagtttaaatccttattcattaaatcagactgtttatcaagtatagtgctttactaacgagattatttcagaaataagcgaacaaaacaataagacgtatgctgtttgttttttgagacagggtcttgctctgttttccaggctagagtgcagtgacacaatcacggctcactggagcattgaccttgtggctcaagcaatcctcctacctcagcttcccaagtagctgggaccaaaggtgtataccaacacgcccagctaggtgtttttatgtctgtctgtttgtttgttttattttgcagagatggaggtctccccaggttgtccaggctggtctcaaactcctgggctcaagtgaacctcccgccttggcttctcaaagtgctgagattatgggcgtgagccactacacctgcccaatattgttgatcagagtaaagaaatgacataaacacccagtaacagttagaagccgtattcagattagctataattttcactagaaccatcccaatctcttgaaagataaaacatcaaattaaatgtagccaaatctaattgcttcacctctgatttttttttaatcacttgaaaagggtaatggttccctcacattttgtatataaaatctactggctaggggaaggctcagaaacttgaatgttaaataggatcccaggtgattcttacacacactgaagtataaaggtcactggaccattctagtggccatgggtcccctctggttggcctgtagttgaaatctatgggaacaactttcaaactaccacatctgaggaatcagtggaggttaggaggttacttttagaaggtgattgggaatgtactcgaatttgagatttgttaaagttcattatagttatcacatatgaaagaagaagcacacatgaggaaaggagagctctggggct

SEQ ID NO: 1886036 - DNA, 4001 bp, Homo sapiens
cccataaaccaaacctcctaaaatcaaatggatctaagaatgagctagatacagtttactcacggctgggtgaggtggctcacttgaggtcaggagttcaagatgagcctggccaacgtggtgaaaccccatctctactaaaatacaaaaattggctgggtgtggtcacgtgcacctgtaatcccagctacttgggaggccaaggcaggaggattgcttgaacctgggagtcggaggttgcagtgagccaagatcacgccactgcacttcagcctgggcaacagagagagacttgactaatcaatttctttgtcagtctcctaccactgaatttctatagtcttcatttgatgtatttctgtataggccacaagtgccagcagctgcacagatacttcgctgtttagccaattctattataactttcacaagagaatttagagtctgtagcctttagagtagaatttgctatggaacctatcatgagggatacatttctaatcattgcttcttttactttaaaccatggaaaaaggacctaacaaatgatgccctttcagaagagtgaaggacttctggcaatgttctctttaacccacgatgtgggttatgtggagtgaatcaattttttgtttttgattgattatgagctaacacatctaccattaaagtttcttacatacattgggcctttatccatgtataaggctggctgcaaactccttcacaaataaaaatgttccccataagtgcacataacagaccccttttccacttctattgttcgtagaaggcataagcaagaaaaaatattcaaaaataagagtttcatgatagtagaagtcttaatctgtgaacttgggaaaagctgttcacatcaatgatgtcatcttcttcttgggagaaatttccctagttagttttaccttaagcattccagtgggtgcacagctccaagagcatggaggggcccttctcagttgtgagattatgaacccaaagttcaaggtcctgaagttttgttatagtgtagatggcaaggacagtctttctctgatgtttccagcagattcaaaccataaaaagcttttttttttaatctggtgaaaatacactgtagcataataatctactgttataacatcagccctcttgcatgggaaagcttttctacaaccagaaaacatgcatggaaaataacaatggaatgaaatccctttataaaatgtttaaatggctgaccagaagaccaaatatacctgaagctttaattgttttcctaggaatatgggatcaagcattggttataaacaattttttgttgttatttagtttttatttcataatcataaactttaactcaactctgcagtccagctaggcatggaagggaactgcagcgagagcacaaagattctaggatactgcgagcaaatggggtggagggtgctgtcctgagctacagaaggaatggtctggtggttaagataaaacacaagtcaaacttattagagttgtccacagtcagcaatggtgatcttcttcctggtcttgccattcctggacccaaagcgctccgtggcctccacaatattcatgccttctttcaccttgccaaagaccacatgcttgccatccaccactcagtcttgtcagtgcagatgaaaaactgggaaccgtttgtattggatccagcatttgccatggacaagatgccaggacgtgtatgccttaggatgaagttctcatcatcaaatttctccccatagatggacttgccaccagtgccattatggcatatgaagtcaccaccctgacacataaatcctggaataattatgtgaaagcaggaacccttataaccaaatccttcctctccagtgctcagagcatgaaagttttctgctgtttttggaatcttgtctgcaaacagctcaaaggagacgtgacccaagggctcgccgtgactgcgatgtcaaagaacacggtggggttgaccatggctgatagtacagggctcctggtggcagtgacggcatctgcaaagcgacaggttataaactattttaaacaatttcagtattagctggtttaacatgaaagtcttttcttgatatgtaattaattttttgttgttgttgttttacgtgggttagtagctttatacaagaaaatttggtcatttttgtggtttacaataacttaacataattataattgtgattggtaacatatacttagacattagaatttgagaaatcccatacaattttggaatatattattcacaaaaatataacctaaagaagatttaacatcattttgtcaatcccatgtacctaaacatgtcaaataatcctgtttacctcttttctggatgttttcaggggccctctgattcatctagaaagccaggcattaggaaagacaattttgaaactgaagtttgattttggaattccagattaccgtaaactatttattttgccaaaatgatgactcagaaattttaaagaagcaaaaaccttttgtaaccttccacacacacaaaaaaacccccaacactttctactgttcttatacaccttgcatgtaaaactgtttctagtagtcttaattgcatgttataatggcaaatttgttttttttgagacagagtttcactcttgttgcccaggctggagtgcaatggcatgatctcggctcacttcaacctctgcctcctgagttcaaatgattctcctgcctcagcctccccagtagctgggattacaggcaggcaccaccttgcccagctaattttgtatttttactagagatgggggtttcaccatgttggtcaggctggtcttgaactcctgaccttaggtgatccacctgcctcggcctccccaaatgctgggattacaggtgcgaggcactgtgactggcctataatggcgaattttaacataaaacctggtaagttaggccaggcgcggtggctcactcctgtaatcccagcactttgggaggccgaggcgggtggatcatgaggtcaggagttcaagaccagcctagccaagatggtaaaaccccatctctactaaaaataataataaaaaattagccaggtgtggtggcgggcgtctgtaattccagctactcaggaggctagggcagagaattgcttgaatctgggagatggagattgtgggtgagccgagattgcgccactgcactccagcctgggggacagagtgagactctgtcaaaacaaaaacaaaaacaaaaaaaactggtaagttctgataaagtttctgataaggtttgactacttccagcacagctaggggcatggctaactccacgtgtccccaggccttacctagctggaaagcaggcaagttaaacaattttcaaaagccaaaggagtagcttatgatgttaaaggatttagcaaacctagtatttgaacataatgtacaccacatgtttacattttgaagacaactgtatttttccaataatcttgaaaactgtctttatttcccaactattgctaaagtcacatgaactaaaaggcattacactttctacttttctgacaaaatatttgacttaagcttttattattattaaaccaattaatttaaaatcttacagaggagatatacgtgacttctactttatatttaaccagtttgcatagagggaaagagcccagagactgactcataagaaattcttatcctttcaccggcatgccagatttcagggttctctctttcacgcgtgtccctgtgaagagaccactgaacaggctttgtgtgagcaataaagctttttaatcacctgggtgcaggtgggctaagtccgtaaagagagtcagcgaagggagataggggtggggccgttttataggatttgggtaggtcatggaaaattacagtcaaaggggttgttctttggcaggcacgggcaggggacacaaggtgctcagtgggggagcttttgagcca

SEQ ID NO: 1886037 - DNA, 4001 bp, Homo sapiens
ccactgatggcctgtaaggcccactcactctaggctttgtggcccacctgagaagtgggaggctggcctgggagatgggaccctgtgactcagaacccgaggctgtgtacagcccccgtggctggaggtggtcacagaggcctggcaggataggtgcactggagcagggggaggtggcgggagtggacggcagaggttgctgcaggctggcaggaggcccctgggacctcagttctgtgccaggatctgtcggggaataccaggggtgagcaagtatggagatggggtggcagggtgtcaccctgggcaggctcttttatgggcatgtgagggggtcagggtggggtctcaagacctttcctccagaaacttcagcccagcagcgcccgttcttgaatcctggggttggccatgagcaggtgggacagaaatagcaacagctggagacgtgtgaccttgaaaccggggcactctgcttggtggggagctgctggagcctccttaaggtggttggggtggggagccaggttctgatgccccccccgcccccccaccccccccaatcccccgcccccccactccccccactcccccccactccccccccactccactcccccccactccccccccactcccccccactccccccactccccccactccccccactccaggctataagcgggaccacctgtccttcaggttctgcgagacgctgcacctagtgggctgctgccagctgcccactgtccgcacccactgctgccgctcgtgctctccgcccagccacggcgcccgctcccgaggccatcagcgggttgcctgccactgaccgtgccaggatgcacagaccgaccaacagacctcagtgcccaccatgggctgtggcggagctcctgccccctacgccctacgccctacgccctaatggtgctaaccccctctcactatccagcggcaggctggggacctcctcccccctcaaaaaaagtatttttttattctaacagtttgtgtaacatttattatgattttacataaatgagcatctaccattccaaagcacagcatgacttcatcttggatttggagaatcttaaaagtgagaaactcttccccccactcctctgcccaaaactccaccgccacagcacctcggcaggcgcggcttttcacctgctcctctggggcagatctgcagggtacagagcagcaaacaagtccgtgagagcatggcgtctggtgaggcacgggccttggaagctggggggctgctgcccagggagggctatctgcggagggtcgggttctgggggcaggaaggtcttccgggcaggggcacagcttggcccttacttgctgcctgcctctagctcggctcccagctttccctggggccccactctgtggtcctcagagacctgttccacagggattgggcccaccttgtcacttgcaggactgccccttggagtgatggggactggggcccccaggggcacctccctgggcctgttgtatctgttgactcttctgcaaaaagtagacagagaagagagcaggctggcccgctgtgctctactgtgtctgtcccaggactcggaaggtagggagggagcgtggccagggcggctgcctgcaggtgcgtgtcctgctgctccccaactcaacatgctcacctcatttcacaccaacaagccccatcctcagaggaggagcccaaggctctgagaggaagtaactggcccaagggcacatgccctggtgacacaggcccatcctaggccctgactgcccacctccaagttccaggccaccctgagcaggccccagtggcagctttgcacagagagggcagcctgccagagttcacacaggaaagcaagttgctgggcaagctagagtgagtcccagccccgctgtgctgcccgagggtagaggagcgtcaggcgtgcttcctgtctgtctgcagcagcccggctggcccaaagagactctagggacccaagctctgagtcatggcttcccaggccttagtcagaacggcccctggtggcactcccttccaaggggtggggagcagggcctgtcgacttgctcctgacccacacacggagccagtccctgtcccagctctgccccagctctgccgccgccgctctgctgcgtgactccaggaacccccagcctcgctgaatccatgtccgcagaagagaaaagcctgccaggccttggcctgccctgtctgggaatccttgctggagccaccccgaaacacccctatgggaacccctttggtctttatcattcttgggtgttttccactgatgactgcgggtgtgcccagtggcagctgggcctgagctgtcagcccaggcaggagacaaacaagcctgtgactcaggcagggcatggcacagctggcggaaggaggcatgcctgttctttgtggctgggcggggggttatccggacacagggagtctccagcttccggctttcccacctcggtgcccccagcccacacctgcagcttggccatggttcttggggcctcccaaggctgcccctgctggcaaaggcatcctgatgcacccgccccagggtgagccaagggcagagacacccagaaacgccaggctggaaggttggagagcccctcctcgccccccgcaacaccaataagccctgccccaccctccaagcccttggggtgagccccatcaccagtgactataactgaatttcaatgcagaatattatacaaattagtagtttatttcttcctttagtattacagttccaaaacgtaacttgaaggtcagcacaggagctgctgtgatataaaaggagagagtcacctggcgccccctgcagtcctccagttgcccagcagcagtgggacgttcagtggcacacagtgggtctctgtatggcctcccacctgcaaggacttccccgggcaggcccagctgcccagaagccccggaacacacaggaagacaacactataggatggcaggtggggatctgtgcaatacaaacatgtagctagaaaacccaaccgaggatctgtctagaatacttccgatatcaatataccgtagttgaaaccagaaccgtctccagctgtcagcagtcttggcggctactgtacagctgtcagcatgactacaggcagcgcccgaggctatctggggtaagaagtgggcctgcacatcacatcggtgagtcagtgagagtcagggccagagggaaaagcaactcggaggctgaggctggcacagatacacacaagggagtcacacacataacataataacttgttatataaaatagatatgtggaatctagaaacaccttgagaaaatagcctataaaaatataaactgtagtgagagtgtacaaaagtattaacagaggttcaacccataaaaaaccccatccatttaaaagttggcaattcctagcaggtgttgggagggagctcccctcggtcctggtgcgcacgtttggacaggcctttgggtttcccagctggcagggtcccccttgcaggggccacgggctgggtgttggggtgaaggttcagaggaggaacagcagcttggggcagcccctgtcagaagggccccctgccatggcagccagtggaggccagggaccttcagggcactggaggggacagagcagctctttcctcagtgacccgagggaggggaagtgttagcgcaaaagagtggggcccacagtcctggaaggaggagttggctccgtcccgttcccaaactttaaccaggcggagccgccctctcttgccttctggacacgcatcacttgattccaggcaggagaacctctgagaaagtgtccccagtccctttcctccaggaactctcctgctgtcgcacacacacactgcccggcagctgctgacaactgcctggaaacactaacataccaccgtgggttgcagccacgacgggcccctggtcaggt

SEQ ID NO: 1886038 - DNA, 4001 bp, Homo sapiens
actcttcagactgggaaagtaagcccctgaggtgtgccacgagggaaaaggtgcagctccagtgcctctcttcgcaggcccaagagctgcggtgcacctgggacctggaattagagagtggtccctgttcagcatctccccgaggaggcccaccaacaaagagggtgtgtcttttttttttttttcttcctattgagggtgtgggataatggtggaaggaacatgcaaagagggtgtgtcttaattagcactggctttagggaacaaggaaaagggagaacccgggagtacgggaaggaggctggggcagacaggagtcagaggcccattccagcccaaacgagaagccagtgagcaaggtggagaccagggatgctgtgaccaaagcagagaggaatgggcggggtggtgctgacaccccagccccgttctgcctgccagagccccacttaccaggcccgagtccccagaggtcccctcctactccctgctcgattcccttcctcagaggcaggtctgtggcttggctgggaactccagggactgagggagcactgcagctgtgggaccggcgcatagctaaaagccggcgggccatagggccccgcggaggaggccccagcaggcggaccaggaggccgaagcctcccgacgctcccagcctgttgcttattcattcagagtgggaaagcgccagccgagcggccagccagtgcggggctggccatgtaaggcccacaggcggtcctgcccgcccggtgccctgcggagagcctcgtgcagccctgggcaccgcccctgccctgccctgaccccttggccttgaaatgctgtcatcggaggagccgtcccgctcgggacaaggccagcatggacaaagctagagctggggcaagcaaggagccttcctgtcctcgaggccgtgggaagagaagcacgcccagggggccactcctgagagcctctctgtccaccaggcctctgcagaggggtcaccatggctctggcccgaggcagccggcagctgggggccctggtgtggggcgcctgcctgtgcgtgctggtgcacgggcagcaggcgcagcccgggcagggctcggaccccgcccgctggcggcagctgatccagtgggagaacaacgggcaggtgtacagcttgctcaactcgggctcagagtacgtgccggccggacctcagcgctccgagagtagctcccgggtgctgctggccggcgcgccccaggcccagcagcggcgcagccacgggagcccccggcgtcggcaggcgccgtccctgcccctgccggggcgcgtgggctcggacaccgtgcgcggccaggcgcggcacccattcggctttggccaggtgcccgacaactggcgcgaggtggccgtcggggacagcacgggcatggcccgggcccgcacctccgtctcccagcaacggcacgggggctccgcctcctcggtctcggcttcggccttcgccagcacctaccgccagcagccctcctacccgcagcagttcccctacccgcaggcgcccttcgtcagccagtacgagaactacgaccccgcgtcgcggacctacgaccagggtttcgtgtactaccggcccgcgggcggcggcgtgggcgcgggggcggcggccgtggcctcggcgggggtcatctacccctaccagccccgggcgcgctacgaggagtacggcggcggcgaagagctgcccgagtacccgcctcagggcttctacccggcccccgagaggccctacgtgccgccgccgccgccgccccccgacggcctggaccgccgctactcgcacagtctgtacagcgagggcacccccggcttcgagcaggcctaccctgaccccggtcccgaggcggcgcaggcccatggcggagacccacgcctgggctggtacccgccctacgccaacccgccgcccgaggcgtacgggccgccgcgcgcgctggagccgccctacctgccggtgcgcagctccgacacgcccccgccgggtggggagcggaacggcgcgcagcagggccgcctcagcgtgggcagcgtgtaccggcccaaccagaacggccgcggtgagtacggccccggcgcccctccggccgcgcgtacccctggccactggaaactgctccgggccccccgggcccctccttagaacttcctggaggcctccccggagctgctaagcacggagcagcgccccctcccgacttcccccgacccagccaacagcacccccctggcatctcacctcccagcttaacccgcacccaggcatcatcagtgccaggggttggccaggcaggtgtgggctctgatcctggctttggtggagggactagccgagctttgggaggaggctcgccttctgcacttggcttgggtcatctgaggacaaaaggaaggagcccctcatccaccttctccctcatttcaatgagggcatctccttccccccttagagatgttctatgccagctcacagggtgaggcaaggagcatcagaaacctgagtcttcagggccagaaaggccttaagggatgcccctggaggtgtggcaggctgcccattactgggcatgtgtgaggttggcttgagtgcgcaggaggttagaggggagcgtgtgctccaggcaggagtccggacttcctcaggggagtctgcaaggctggggcaagagagaccagtcaggcactggcctgggtgcagaatttcaggggctaccaaaaaacacagtagttgagatgagtaatattgagatgtatttttttaagtcaaaattaatgcaaaaaaaaaaaaaaaaaaaaaaaacctgtgataaaggaaatatccagattttaaatagagtcagtaatagtggtatgccgagccatattggagcctgaggctaactgaaaaatcagcaacacggatcctgtctttatttgatatttggatattttgttcattacagatagttttgcattaatttttattttaaaaactattgtgttaaatattacttatctccgttactgagtttttttggcaccccctaaaattttgcaccccgaggaaaaaaaaaaaaaaacacctcactggcctcattcccctcaccctagtcctggccctggcggagagccccagctgtggacaggactccctctggcttttcagggggtgaacatacgtcctcctcttgggaaggcccaagccctctgcacatgaggacacagtggaaaggcagcttccacacatgctgttagcagacagggctactgtgacaagggctgactggtgggtgtggccagtgctggacggccatcagccattctctgctgtcctagaatccccctccctgctaccctctccatacaggcagcttttgggccaaggttttctactcagtccccaatacttatgcagtccaactctgccttgcctctttcaagctgtcgtcagtttcctctacccataattctctgctccccattgaggttgctgtgcctggcccaccaagtaagggctgactgagccctccagtgcctcagagtataggtgctagtgccccagcctcctcctcagcctctgtcagcagagggatgatgctttgtctccagccaagctgacctcagtgaggggctgctgctcatggggtgcctgtctccctgggtactgctggaggccaagactaggggagaggagcgtctccactgggaacactcactctatcacatccaaggtgtcgcttttgagttgtgtgctgaatcccactttaagaacctgcaggagctcaggaaaaatcagatggcaggtccttctgtggtgtgatgaaggatgcatccacctgctctggtccttaccaggtacttgcagcatccctgcagaagggcgcattatagccatgcatcagctgctctagggccccttggagaataggatgttttacctagagggtgctaaacttttgcagtggcttttcttagaatgcaag

SEQ ID NO: 1886039 - DNA, 4001 bp, Homo sapiens
tttttttttttcttcctattgagggtgtgggataatggtggaaggaacatgcaaagagggtgtgtcttaattagcactggctttagggaacaaggaaaagggagaacccgggagtacgggaaggaggctggggcagacaggagtcagaggcccattccagcccaaacgagaagccagtgagcaaggtggagaccagggatgctgtgaccaaagcagagaggaatgggcggggtggtgctgacaccccagccccgttctgcctgccagagccccacttaccaggcccgagtccccagaggtcccctcctactccctgctcgattcccttcctcagaggcaggtctgtggcttggctgggaactccagggactgagggagcactgcagctgtgggaccggcgcatagctaaaagccggcgggccatagggccccgcggaggaggccccagcaggcggaccaggaggccgaagcctcccgacgctcccagcctgttgcttattcattcagagtgggaaagcgccagccgagcggccagccagtgcggggctggccatgtaaggcccacaggcggtcctgcccgcccggtgccctgcggagagcctcgtgcagccctgggcaccgcccctgccctgccctgaccccttggccttgaaatgctgtcatcggaggagccgtcccgctcgggacaaggccagcatggacaaagctagagctggggcaagcaaggagccttcctgtcctcgaggccgtgggaagagaagcacgcccagggggccactcctgagagcctctctgtccaccaggcctctgcagaggggtcaccatggctctggcccgaggcagccggcagctgggggccctggtgtggggcgcctgcctgtgcgtgctggtgcacgggcagcaggcgcagcccgggcagggctcggaccccgcccgctggcggcagctgatccagtgggagaacaacgggcaggtgtacagcttgctcaactcgggctcagagtacgtgccggccggacctcagcgctccgagagtagctcccgggtgctgctggccggcgcgccccaggcccagcagcggcgcagccacgggagcccccggcgtcggcaggcgccgtccctgcccctgccggggcgcgtgggctcggacaccgtgcgcggccaggcgcggcacccattcggctttggccaggtgcccgacaactggcgcgaggtggccgtcggggacagcacgggcatggcccgggcccgcacctccgtctcccagcaacggcacgggggctccgcctcctcggtctcggcttcggccttcgccagcacctaccgccagcagccctcctacccgcagcagttcccctacccgcaggcgcccttcgtcagccagtacgagaactacgaccccgcgtcgcggacctacgaccagggtttcgtgtactaccggcccgcgggcggcggcgtgggcgcgggggcggcggccgtggcctcggcgggggtcatctacccctaccagccccgggcgcgctacgaggagtacggcggcggcgaagagctgcccgagtacccgcctcagggcttctacccggcccccgagaggccctacgtgccgccgccgccgccgccccccgacggcctggaccgccgctactcgcacagtctgtacagcgagggcacccccggcttcgagcaggcctaccctgaccccggtcccgaggcggcgcaggcccatggcggagacccacgcctgggctggtacccgccctacgccaacccgccgcccgaggcgtacgggccgccgcgcgcgctggagccgccctacctgccggtgcgcagctccgacacgcccccgccgggtggggagcggaacggcgcgcagcagggccgcctcagcgtgggcagcgtgtaccggcccaaccagaacggccgcggtgagtacggccccggcgcccctccggccgcgcgtacccctggccactggaaactgctccgggccccccgggcccctccttagaacttcctggaggcctccccggagctgctaagcacggagcagcgccccctcccgacttcccccgacccagccaacagcacccccctggcatctcacctcccagcttaacccgcacccaggcatcatcagtgccaggggttggccaggcaggtgtgggctctgatcctggctttggtggagggactagccgagctttgggaggaggctcgccttctgcacttggcttgggtcatctgaggacaaaaggaaggagcccctcatccaccttctccctcatttcaatgagggcatctccttccccccttagagatgttctatgccagctcacagggtgaggcaaggagcatcagaaacctgagtcttcagggccagaaaggccttaagggatgcccctggaggtgtggcaggctgcccattactgggcatgtgtgaggttggcttgagtgcgcaggaggttagaggggagcgtgtgctccaggcaggagtccggacttcctcaggggagtctgcaaggctggggcaagagagaccagtcaggcactggcctgggtgcagaatttcaggggctaccaaaaaacacagtagttgagatgagtaatattgagatgtatttttttaagtcaaaattaatgcaaaaaaaaaaaaaaaaaaaaaaaacctgtgataaaggaaatatccagattttaaatagagtcagtaatagtggtatgccgagccatattggagcctgaggctaactgaaaaatcagcaacacggatcctgtctttatttgatatttggatattttgttcattacagatagttttgcattaatttttattttaaaaactattgtgttaaatattacttatctccgttactgagtttttttggcaccccctaaaattttgcaccccgaggaaaaaaaaaaaaaaacacctcactggcctcattcccctcaccctagtcctggccctggcggagagccccagctgtggacaggactccctctggcttttcagggggtgaacatacgtcctcctcttgggaaggcccaagccctctgcacatgaggacacagtggaaaggcagcttccacacatgctgttagcagacagggctactgtgacaagggctgactggtgggtgtggccagtgctggacggccatcagccattctctgctgtcctagaatccccctccctgctaccctctccatacaggcagcttttgggccaaggttttctactcagtccccaatacttatgcagtccaactctgccttgcctctttcaagctgtcgtcagtttcctctacccataattctctgctccccattgaggttgctgtgcctggcccaccaagtaagggctgactgagccctccagtgcctcagagtataggtgctagtgccccagcctcctcctcagcctctgtcagcagagggatgatgctttgtctccagccaagctgacctcagtgaggggctgctgctcatggggtgcctgtctccctgggtactgctggaggccaagactaggggagaggagcgtctccactgggaacactcactctatcacatccaaggtgtcgcttttgagttgtgtgctgaatcccactttaagaacctgcaggagctcaggaaaaatcagatggcaggtccttctgtggtgtgatgaaggatgcatccacctgctctggtccttaccaggtacttgcagcatccctgcagaagggcgcattatagccatgcatcagctgctctagggccccttggagaataggatgttttacctagagggtgctaaacttttgcagtggcttttcttagaatgcaagacctcagcatgaggctcagcctgatgggccccacctctgggcagagaaaactgagctctcaaatgccacaatattggcagaggcatgcctgggacttggcatctgggcaccaagtcagtgggtcttctagggcctgtctttgggctgttagttcttaaggaagccagttgattg

SEQ ID NO: 1886040 - DNA, 4001 bp, Homo sapiens
gtccccagaggtcccctcctactccctgctcgattcccttcctcagaggcaggtctgtggcttggctgggaactccagggactgagggagcactgcagctgtgggaccggcgcatagctaaaagccggcgggccatagggccccgcggaggaggccccagcaggcggaccaggaggccgaagcctcccgacgctcccagcctgttgcttattcattcagagtgggaaagcgccagccgagcggccagccagtgcggggctggccatgtaaggcccacaggcggtcctgcccgcccggtgccctgcggagagcctcgtgcagccctgggcaccgcccctgccctgccctgaccccttggccttgaaatgctgtcatcggaggagccgtcccgctcgggacaaggccagcatggacaaagctagagctggggcaagcaaggagccttcctgtcctcgaggccgtgggaagagaagcacgcccagggggccactcctgagagcctctctgtccaccaggcctctgcagaggggtcaccatggctctggcccgaggcagccggcagctgggggccctggtgtggggcgcctgcctgtgcgtgctggtgcacgggcagcaggcgcagcccgggcagggctcggaccccgcccgctggcggcagctgatccagtgggagaacaacgggcaggtgtacagcttgctcaactcgggctcagagtacgtgccggccggacctcagcgctccgagagtagctcccgggtgctgctggccggcgcgccccaggcccagcagcggcgcagccacgggagcccccggcgtcggcaggcgccgtccctgcccctgccggggcgcgtgggctcggacaccgtgcgcggccaggcgcggcacccattcggctttggccaggtgcccgacaactggcgcgaggtggccgtcggggacagcacgggcatggcccgggcccgcacctccgtctcccagcaacggcacgggggctccgcctcctcggtctcggcttcggccttcgccagcacctaccgccagcagccctcctacccgcagcagttcccctacccgcaggcgcccttcgtcagccagtacgagaactacgaccccgcgtcgcggacctacgaccagggtttcgtgtactaccggcccgcgggcggcggcgtgggcgcgggggcggcggccgtggcctcggcgggggtcatctacccctaccagccccgggcgcgctacgaggagtacggcggcggcgaagagctgcccgagtacccgcctcagggcttctacccggcccccgagaggccctacgtgccgccgccgccgccgccccccgacggcctggaccgccgctactcgcacagtctgtacagcgagggcacccccggcttcgagcaggcctaccctgaccccggtcccgaggcggcgcaggcccatggcggagacccacgcctgggctggtacccgccctacgccaacccgccgcccgaggcgtacgggccgccgcgcgcgctggagccgccctacctgccggtgcgcagctccgacacgcccccgccgggtggggagcggaacggcgcgcagcagggccgcctcagcgtgggcagcgtgtaccggcccaaccagaacggccgcggtgagtacggccccggcgcccctccggccgcgcgtacccctggccactggaaactgctccgggccccccgggcccctccttagaacttcctggaggcctccccggagctgctaagcacggagcagcgccccctcccgacttcccccgacccagccaacagcacccccctggcatctcacctcccagcttaacccgcacccaggcatcatcagtgccaggggttggccaggcaggtgtgggctctgatcctggctttggtggagggactagccgagctttgggaggaggctcgccttctgcacttggcttgggtcatctgaggacaaaaggaaggagcccctcatccaccttctccctcatttcaatgagggcatctccttccccccttagagatgttctatgccagctcacagggtgaggcaaggagcatcagaaacctgagtcttcagggccagaaaggccttaagggatgcccctggaggtgtggcaggctgcccattactgggcatgtgtgaggttggcttgagtgcgcaggaggttagaggggagcgtgtgctccaggcaggagtccggacttcctcaggggagtctgcaaggctggggcaagagagaccagtcaggcactggcctgggtgcagaatttcaggggctaccaaaaaacacagtagttgagatgagtaatattgagatgtatttttttaagtcaaaattaatgcaaaaaaaaaaaaaaaaaaaaaaaacctgtgataaaggaaatatccagattttaaatagagtcagtaatagtggtatgccgagccatattggagcctgaggctaactgaaaaatcagcaacacggatcctgtctttatttgatatttggatattttgttcattacagatagttttgcattaatttttattttaaaaactattgtgttaaatattacttatctccgttactgagtttttttggcaccccctaaaattttgcaccccgaggaaaaaaaaaaaaaaacacctcactggcctcattcccctcaccctagtcctggccctggcggagagccccagctgtggacaggactccctctggcttttcagggggtgaacatacgtcctcctcttgggaaggcccaagccctctgcacatgaggacacagtggaaaggcagcttccacacatgctgttagcagacagggctactgtgacaagggctgactggtgggtgtggccagtgctggacggccatcagccattctctgctgtcctagaatccccctccctgctaccctctccatacaggcagcttttgggccaaggttttctactcagtccccaatacttatgcagtccaactctgccttgcctctttcaagctgtcgtcagtttcctctacccataattctctgctccccattgaggttgctgtgcctggcccaccaagtaagggctgactgagccctccagtgcctcagagtataggtgctagtgccccagcctcctcctcagcctctgtcagcagagggatgatgctttgtctccagccaagctgacctcagtgaggggctgctgctcatggggtgcctgtctccctgggtactgctggaggccaagactaggggagaggagcgtctccactgggaacactcactctatcacatccaaggtgtcgcttttgagttgtgtgctgaatcccactttaagaacctgcaggagctcaggaaaaatcagatggcaggtccttctgtggtgtgatgaaggatgcatccacctgctctggtccttaccaggtacttgcagcatccctgcagaagggcgcattatagccatgcatcagctgctctagggccccttggagaataggatgttttacctagagggtgctaaacttttgcagtggcttttcttagaatgcaagacctcagcatgaggctcagcctgatgggccccacctctgggcagagaaaactgagctctcaaatgccacaatattggcagaggcatgcctgggacttggcatctgggcaccaagtcagtgggtcttctagggcctgtctttgggctgttagttcttaaggaagccagttgattgagaggggaatgggacagggcaaggccatgtctgaagtgggggtgcttggtgcttagcagacctctggccactaccctgagccccacagttcattttgggtcaaaaacatttctcccctgaaggtagcatcctaggtgccaagctgagtgtactcacatgcatcaagtccaggcccttccctggggcagtctaccaggaggggcatctcagtgctgtgattaggcaagcattggtggggccaggggctttgtgagcccagaggagggccctccctgtcaggggctaggg

SEQ ID NO: 1886041 - DNA, 4001 bp, Homo sapiens
gcccctaagtgggcagaatctcctctattttgtagatgaggaagatgagattcaaagagcaaatcactttttttcctcgtcctagttctccaacatgtaaactggaaacagtacttgccatccacaaccgtgaaacccaactttctagaaagaagcatagagaaaacaatcaaaaaagaaatagtatctccccttccaaaacgaaagacaaaaaacctttctcggccgagcatggtggctcaggcccataatcccagcactttgcgaggcctaggcgggcggatcacttgaggtcaggagttcgaaaccagcctggccaacaaggtgaaaccccgtttcgactaaaaatacaaaaattagccgggcatggtgacgggcgcctgtagaagcagctactcgaggggctcaggcaggagaattgcttcaacccgggagggggtgggggcggggcggaggtttcagtgagatgagattgcgcctttgcactccagcctgggtgacagagactctgtctcaaaacaaacacacaaataaacaaaaaaccctttctcaatctctaggccaactaaaacgtccacgaaaaatgtaactaatccatacaattggctaatcgctaccttccctccttaactcgcctaaaatcagcagaaaagcaactctaagtcacagcttttagagcaagtcataaaagagcgtaaatcgcctctaaagttgccttccaagaaaaggtagaggagcctttatgagattttttgttccctaccgagacgtgtggcgggagaaagtggccagtctgcggctgagctgctgctggggagggcgggccacctgcggccagggcgcctaacgggtcggactggacgtgtaggggccggaacagccggtcaccgcgccctccttccctcgggaaacgggtctcattctcacacccggccccgccacatgtccccacaaggagaagggaaggggcaggaggtaaagaggcactttctcagcatccaagggcgctactcttgctcctatccgagcacctcaggggctggtgggctttggggtgttttgtttcacgtgctttcagattcagaaggtgcacccgctctgcctggttttctggagatagggccaagcatggcaccccctggggcccgggaagcgacaggctcggggacgcgcgcgctccagggccagaaatggcacgaagcccgggctccggcgaccccgacccgctccacctctgcgcccccgaccacagccgaggcgtcccggcgcagggaaggtggcgggggcggaaggggcgctggcagtaacccgagcggccgtaaagaattctcccccactgtgcggttcccatttcacagacaagacagcggagaccctgggaaggcagggacttccccacgctcccgcgcctgggaagcaagcccgggtcagtcccggcgcccggtgtccccgggggacctccgagagaagccgtgaccgaggccgggcgccgaggccggggcgcgcgtggagttgatgctggcagtgcctcttccggctcccccgagcatttcctcccccttcttcccgggagggacttaaacgctcccgagggtgagtgcgggggccccgccggccccgcactcgacgtccaggccccccgctcgccggtccgccgctgcagttcagtcccgaggcaacaacaggtgcgcggctcgccgcaccccggcgccggctccggggaaagtttccctggccgccgcgcgctgtttacgggatcctgttgcagcgcgcgggcccggggctttccggcaggtcgagccattgaaacccgagacgcggggaggagctgtcgctgcgctccgggaggaacgagggcggccctgggcctggccagagcggctccccttacctgtgactcaacaggcggcctcagcctccatcctcgggctaggctggcgccgcgccccgccccggaggctgtccctgtgcccctggcgtcctcctccctctcccattcctccccaggggctgcccccgttccccgctccccggccccttcccctcccccagggtcaccacccaacagtcttcccagctaccaacccctggctccccagagagtttgcaaagattgtgggctccaccttcccacctgattcgccaccccaggagaatttactatttctctttcatttgtggggagaagacaccgttaacgcccccaccccccgctcacacgcccaccctcgccggtgccccgggcctgaacgcggcacatgtcaaccccctcccacgccccttcacacttctattatttctgtttctttggacaagaatcatttgcgttaaccttttttgaaaacgttcaagtttcactccagtaagcttcctagaaggaaggaggaggtgagggaggagagagaaggaagaggaggaggaggaggctttggctgcagcggcggcgggggcggcttttgaggaggctgcggcggaggcggttttggcgactttggcggcgaaaatttagacagttgaaaaataggccaaagcacactgaacctgcaggacatcccgtaatcttttctgcccatttcaaagtctttccctgtcctcacccaactattacaggccgcttttgctgaaacctgacaatgtcatttagtaaatgttcagctagtattcatttgaaatagaaataaccaacagcaggtaatttcttcttggcctgtttctgcgtgttatccaaggggaggtggaatacagtggtggttttaaaatgccagcagcctaggaacccaaaggcctcagcagcctggcacctccccacccccctgcggctcttaggggccgaaagattgagggtcgtgatcaactcagtataccactggaggccacgtgagtaagcagcaaactgtttctcatgagagcagggtgttggcaaactgacaacctgtgtctgccgcccagaaggactgctgagggcagtcaccacccaggtgcaagtgtttaggattagacacaactgaagcctgttagtaatgagaacttgtgataatcaaacagctgaccagtcttagggcctcctccctgctcattctcccaatgaatgcgaagggctgtggaagctcggggggctgccttcgctcactagaagcagggagctcccttcttcccggtttccccttcctttaaaacagatttctttaatcatttctacgtttgtcctttcgttcagtcctgtaatgacggtctcaagtagtaacaataactgtcgtagtgacggtctcaagtagtaacggtaataactgtcatagtgacggtctcaagtagtaattgtggcagtcagccacaggcacacaggactaaaggttcattaatgtctgctgtaaaaatgtagaatatatttcttcaaggtctgaagtatacattttttgatgtacgtttttgttacattttttaaagttctcttgtttttaaaaaataacatgtatagggccgggcgcggtggctcatgcctgtaatcccagcactttgggaggccgaggcgggcggatcacgaggtcaggagatcgagaccatcctggctaacacggtgaaaccccgtctctactaaaaatacaaaaaaaattagccgggcgtggtggcgggcgcctgtagtccccgctactccggaggctgaggcaggagaagggtgtgaacccggaaggcggagcttgcagtgagccaagatcgcgccactgcaccccagcctggtcaacagagcgagactctgtctcaaaaaaaaaaaaaaattacatgtatagagcttgaacagttcttttaaaatatgtatgtgtgtgtgtgtgtatacagtatatataaagaataatgaactgaaaagttccctgcttctcattcaactcctatatccaaagtcagtattagtcaaatacctcctcttttccttttagtttctgagttttgcgtctcgcatgagtattttgaaactactccaaaactagaaaataattcttctaaat

SEQ ID NO: 1886042 - DNA, 4001 bp, Homo sapiens; identical to SEQ ID NO: 1242192

SEQ ID NO: 1886043 - DNA, 4001 bp, Homo sapiens; identical to SEQ ID NO: 1242199

SEQ ID NO: 1886044 - DNA, 4001 bp, Homo sapiens; identical to SEQ ID NO: 1242203

SEQ ID NO: 1886045 - DNA, 4001 bp, Homo sapiens
gtgaaaataattaaaatatcttgtctttaaatataatgttgtagattacaaagtattggccttttagagacattcctgggaagtcagttgttggccttatctcaagcttggaaaaactaaatcttaataaaatggggagccagaagtgagaaggcaaccctggggccttttagtcttacactcgtgtgcagtgctctgtaagaatgattagtttggttccaggatttttttttttttttttttttttttttttttttttggtatattgtgttcctgtgatgcttttttgcaatagttgtttttgggtgataaaaaaaaagttgaggccacaagtctcatagtgaatgtagtatttcttgtctgttgaacacctaccctgaactaccctccattccatgccctgccccctcttgagatgtaaggatgaggagactgaggatccaacgggtatagttggccaagcattgagtatctatcaggaagctccttctgtgggagcaggttacctcctgctctctgaaggcagcagaggggaattgacatgtccagaggtcaaaggcatcaggaggtgtggaattgagcctgcacctcagactctgcacccagggtcctttccgtgaacccagacttagccactcaccttctccgcaatagacccgggcagccatgtgcacttggtgcagaatagagattatgtatggtgaggaagggcacttagctgtcctgggactgtctctaggactataataaggtggaaaccatgtctatgtagataacttccctatggagtttacagcaaccatgtgatgtgcacttttggattacaaagtcttaaaagcataaatctgagctaccgcctgttcctctgccccctcctagcatacttgctcaggagacaagtctatacctgctgggccacccctctcttccatctctctcctgaacctgctactccaggctctcccccgcgccacccaccgccccgcccccatcccactaaagccctccaatttgccagattcagttgcaatgtctcagttgcattttacctgacctgtgaccagcaatgggtacatgcgatctctcccttctgtttgatgtgctttctcctgggttctaccctctgtctgttctcttccctcacctacccctgtgcctcctttgccaattttttctcgtctgccaattcagaatgttgttcccagggctgagtcattactgctctccctcactccctaggtggtctttctagcccctcccacccagttctctctccatctttgcgttcaattctatattccacctctccactgaatacctctcaaggaaactcacctccaaatctttgtccccagcagcctttcttgacagaggttttccttcatgtcctcctgtttctgcttctctccttcctgtctgcttcccagctctctgagcctctctcctgtgcaccttgcggaccccgcagccccaggcgtcttgctgtgccctgcagggctccctcctttgattctgctgccccttttggtgctttctccttgctcctctgtgtgtcttctgcttccttctgagctccagtgttaggtcctgctgttacatttggctctcgggtccatgtcatggctctctcttggcttcagtggaatctctctctgcatggttagggggaccattcatttgcctttcagaaagctcagtttttagcctgggaagggcagacttcacgcagcaacgcttacaacacttcgttttccgagggaacagacgatattaaccatcccatcctcaccgttgcatcccataaacagcatccatgacagcatggagctttgtggctttcctcactgactcttaccaccagtcatgcttatggattttagcaattgttgccagccccaggagacagactagcccacggaatgatctgcatcacagcaaattagtccatttatctctagagtttaaattttatttcccccaatcggggagttgctgggttaactaggcctataaagagaggggtggaggaagcttttacatatggctttaaaagtcctcaatattgcagttgggaattgccagatattttgaacccctctgctgtgtcagcaatccagccactgcctaggccttagttacttaattcagtttcaggcagattcccagtgaacactgctgttgtttattgagaagtgtatcctgacctttctcaactaaggaatagtttcacaattttcatggcaaaattcattcagaatgcaagcaggggtcagaatgacattgcagttggacggcctgaaaggttgctttgtgagaccgtgtaaaccatgcccgcattcaccaaagcatctgttgaaaaacatctcctgtatccatgtgacccagccacctgtcgttaggacgccagcaatcaagcatgctgagaagctgagaccctggaggcactcgctgcactgcctgggcctgggcagcctgttgtcccctctgccttgtggccatcttgttgcctcctagcacctcccttcttccgtgggaagaagctggagtccaggtttactacctgcaggttctctcataaaacacaagaaagagagtgagcttgaaatacctgtggattgatgttacctgggctgctctaagattctattagctactaactataaagggccttgttttgcttgctaggatgacactcagctggttcttcaggcacaaagaaaaaagcgtttgtgatacaggtttctttctgtcttgtgcccaaggagtatatttgatagagactggcttgggttaagtgagtaggggacaggtaagtttctggccatgaaatagagcaggcactggaaatacaccgtgagccaccaactcaaaggaaaaacactgagttgttgaacttacatttttaaaagaaagcatttatgagcaagttcaaacttaacctaaacctgtgtctcgtctcatctcgtctcatctcttttcttttctttctttttttttttgagacagagtcttgctctgttgcccaggctggagtgcagtggcatgatctcagctcactgcaacctctgtctcccgggttcaagcgattctcctgtctcagcctcccgagtagctgggattacaggtgtatgccaccatgccaggctaattttcatatttttaatagagaccgtgtttcaccatgttggacaggctgtctcgaactcctgagttcaagtgatccgcccccctcagcctcccaaagtgctgggattacaggcatgagccactgcacccagccacctgtgtattttctgaaactattgaactggagaagaaacaaaatatctccatagtttgtctaaatcaaatcagaattgagttgcattttattccctttgagaccccaatcacgtgaagcttcttggtaccctttgggtttaagattggcctctctggcctcatgttgatcttttcttgggattctattttatgcactgtgcagggctgatatcattatagccactttatttgtgaagaaattgaggcagagtggccaaagtgactttctcagattgacacaggctcttagtgatggagctgggcccagaatccaagggtggtggagcttttgtgccaagaggagcacctgagagggcttccctgattcttctctgtccccaggtgctgagaggacccagggaactgaggctgtctttaggacccagtcataggtgcccaaggctctctgcctcttgccttgaggacattaaccctagaaattccactcctaggaccttctctcagaaaccccaaggagggggactactcagagggaggtgtggtgaacatctggagctccctcctcctaaggggttctacttgtcaccctgtagtaataactcttagccaatatgctgttgttgtcctcctttaaatttttcaaaattgatttgtaaaatttgttttgtacctaaagtgtactctttatttgctgttttattctctttccatgtttaaag

SEQ ID NO: 1886046 - DNA, 4001 bp, Homo sapiens
gtaatagacaagctaaaatgcaccacaaagagagtttggagagaaccacagcatctctctggatgtcagcttgcaggactgactgatctagcttacatgagcaaccctggccctaaagccaccacccaaaccactgccctgctagaagctcactatgagagcagggactctcactcattattcttccaagtgcctcgcgcacagcctggcccgtgataaatgaaactggttggcaaagaagcagagttcagagacagagtaggattgtgaggtgtgaacagggtaaatccattttcattggctttttccttacagatccaatgaagatgaatttgaactgattgtggccctagttttcaaaattctttaattctgggctctatctgaattgggagaagatgcaagcaataaaagaggctgctgtagtctcaaagaaatatattttgaaaaaatgacctgcccttgagcccaccaacttccactccccacttctaatttctttcctctgaatttagagctgttcccttagcaacgcttgtttccatggtttcctccatgacaatgatcccaaacccctcctctcttttacctcatgacagtaatggatgatggggatcctcaatgtggccactccatgttaccatggtaacaattaactgagccttaatttatcttttgtgaagagggctagggaatatgaagcttttgatttggagggggagggtccaggtctagagctaccattctcataaagaagaagataagctatttgtcttaatactagccagtaggatttagttcaaacatttgttcagccctactttaagcacaactgagtttgagggaatcaaaggggtacaagacatagctcctaatattgaagggctaatagtctagcactagggctcatggtaccgctgaactctggcacagatggggccaataaagaatatggctcttgatagcaccgtgatgatcaggcatctatccattcccagtatcccctcctgccaagaaccaaaaaaagactgactgaagtggtctgtactcacattaagacttcttccgggctgttatcagagagtttctgtcctgaaagggaaagaactttgacttcccctcttttagggaagtggggaccaatgccagcatccctgagtaggactatttggtgcaggaaaaaagagaaaaataaacagacctgcccattgccagtgcaacaaaggactgggataatctccagttccaggataaccatcacctacctgcaacaagtcttcctgggaagcgatgagtcagctcttacattgaattaaagagtcattgtctccatccattcagcttttctatttgtcactgaaaattcaggccaaaagcgcagctctgaagaatgaaagtggaaaaacagacaaataaaaatcaaagtgaagaggacaccaaacaccaaacacaaaacaccaaagctgagagctgagtagagtgaatccacaagctgagatatccattctgcatcacaagcaatgcagttcttccgacttctagctttccatcttcatctccaaaagttttcaccaaatctctaataatgaggaccaattatctatttttaggggaaatcacaaaattctctggaccctcagtgtgctggtaacaataacctgcactgacttggaaagatgatcacagtatctcctaaaatgaagggggaaaaaagccataggacaatgtataaggcaggtatgttgaagtaagctgcgaataggtaggtaaaaaatgtcatccttgcaagtcagtgcaatctggattagccaaagtcaattccagatcctgagtccaggactctgagttctgtcctttgctactggatggaactaaggcagattcaatccttctgtgtaccctgctcactcagctagtcagaaaaggataaatggcatcctcttattggttgacaaggcaatacacaccaaccaatgaaagaatgcttcttcctttccagccaataagagctcagttatcttcttgaaagtagaccctttgtccataaagaaaataagcagaaagtgaataataattaaaaaaaaccacacaactgttgctatgggacattactgatgtgatcaatgatagctgccccggacaattcataaaggaaagcacttctttgggaagaaaagtacaaaaagcagaccagctgtctggtctggtctaaagggaagtttctatagtaacatgggagagaaaagcattttaaaagcattttaatgtaaatacccgcaaaactatcaagtcagttcaccgagcgaatttttgaccttttaaacttatgctgaaattataatgaataaaaattcttatattaataataaatgaaggaaatggagagaaaagaagagaacaagaggagaaaagaaaagacctgtgtgtttatggttcagggcatcacagataaagatatcacagttcctgcctgaaacagaaatgttctccaaccccgtgttgtcaagtaatatctcagtttaaaacaaacttctttttgttgttgttattgttgctgtttttcgggaaagagaacgttcatggcacttagacttatttgagatgaaacagtgcacagagcacaggctgttctggtaacttgctagcgatttcctctcaaatcattctgagaatgttacagctgcctttggaaaattatgagtaaaataatttcctacccagatgtttctaatggacataggcagggcaaggctgacaggtgaaagtggagtcaatgtttgtcaatcaagggaaacagaaaaactcagaggattagaagctttaggtgctgtatttgctaattatgaaggcgatgctggggaggaagaagagaagagaatcttgaggaatcaaatgagagtgatgctagtgtccatctgctaagggagacacgtttccctctacctgtgctttctatgtggtctatggggcaaggtgagaagtgggggtaatccagaattcagccctctctcccctgaggggagtggtttagtggggcagggatgactatcaaaccagggagaaagtttctctctacagtagacacccctggacaatttccttgtctccctcctgtacatccaggaaaagcaatttttttttctcattttaagggggaaaaagagagggtggggataggaactcagctccttcagtataaaggactaaatgaaaaatataaaagcccaaattgtaaatcctggagaaatgaagccatggggtggaggggggaggggatgactgtagtggtggaaaggtaagttgctctgctatgcgcctttacttaaaataaaaacaaacaaacaaaaaacaaacatcttccaggatttccccagacggggccttacgcgggatcgatgtgcctctcacctagcccagacaaggcaggggctccccaggagatattttaaatagtcaaggtgctcactgattatcagtggccaaagccccgccacccaccgtaaccaaggcaacaggaggcaggtgctgcgactggttgcctggtaagcatgctagtgccaagtcctttcccttccttctccacctccgttagcccttttgtgatagcgcctctccctccgctatctttccccttcttggccaaacaataatctttgctcctcatacaaaggtcactttgggctcctttgggtaaaaaaacgcgtaccttgatgttctttttgaacagatttcatccacgcttgagttttgagacctagataaaatgtgcttcttacctcggcttcaatatcttctccctccaccccactctttccctttcactcactcctattaaggcatacagagagcgcggggaggaaggaaggaagggaaaaaggaagggggagagagcgagagggagcacgggggagcgcaggatttaaatgtggcgatttttcacggaacaccagagcctggggctcacagtagatcctctgtcccgcttgcccctttgctcaccg

SEQ ID NO: 1886047 - DNA, 4001 bp, Homo sapiens
ttactttctaaagtgttttccactcaaggaaaagaagtaaattcctatgtcagagtaaccgaggtggttgaagaataggtattagccagagaggtctagatagtaaaatcaaacttcaagcctcaaagaagctccatgaacagagaggaatgccaggtgtcacacagctttccttcactctaattcattcttgactagagcctgtatgcctgtttcagagacatttaaactcttaaaggatttcttatgatcttcactaaatacattaagaagaatgccaaccagcgccctttcgtgtactgggacaggtagtcatgtgattaaaacagggaacacgaactctgactttaaaatgtattgtagatacaaatgctctaagctaggaaaggtttttcacacccacagccaatgatggcagcctttcattcctcggaaataagccctttttaggtcactgaaaaagagtgcaactgctgcagctcacgatgcaatatcttcatgagcccagagcacatacaaatccaaagggaactgccacagtacactgctcattcttggcaccggaacagatgaaacacactgtatcctgcacatacctgccagagcaggccactttcctcttctgtgagatttagaaagctcccccaaaaggttatcactcccatcaccaatacacagaaaatggaggaaaggctgtttccagttctcggcctttaaacagctctaaatgtcagtactcacagtggcatattacaaagtaataaacagtgcacacttgagggcaaaccgcatattgagctatagaagagctcactgtgattaagatgagatcaaacatcatagcagaacattagcaaattttatctgaattctgtaatggacatccatgctgcaataacattagaaaagcacgggagcctattccaaaccagcgagaacagttttgtgcaaagagtgggtctttgtgtgtttgaactcccaccacgtaagggcaaactcgatatgcatgctaatgacctacaattatgaaatgaaaaaagaaaaatgctgaaggatgccagagtgaacatcagtgagagccacagagacccactctcttttaactttttacaaataaacttaaactataaattagaaacacaaataatcatgagtagctctaacattcaaatgaagtaaatgaattgtgtaggagattaaccccataactttgtttcgtttttaaaaatttcttgagcagctctttgatgatggtggtgtttatctccttcttctcggcagccaagcccagcaaaagcatggcacacagcagttgctgcccaagcctgggtgctcctggtggtcctgcatctcaccaaggagctgcacgactggctgtgcagtagggttgtcctgggaagaaccctccctggcttctccttgtgcaggctccacgctgttggtgaggctcgcctcacaaagatctttggagagagggaggcggggatctgagtggagtgctagccgccccccgctcctgcctgctcaccccgcctgggggctctactcaccaccatgcttgtcggcagccccgagctcctggggggctggggctcctggactgggttcagcagcagggttccgggcagcggccaggaatttgccgtgcccctcgctgtagctgccacaagccgcaacaccatctcctgcagctccagcagcttcacctgaagggacgggtgctcagctgtcaggccgctgctggcgcccaccctcatgcccaccccacccacacccccaccccacccccacccccacagggatgttgcacaccctaccttcctctcctccttgtcctgggccagcctgatgatggcctcctcccggtgacgcatctttggcactgtcccctggctctgttagaaggcgatgtactttcctgcgggaggacagggctcagacgctggggcccctcccatagccctgcagctccccctgccgtgccctggcctcccactcactgatggcatctctctctccggtactggatgaatccaagttccagtttctccacatgctccctcaggtccgccttctcctccaggaggtccataaggccgctctggagccaaaataatggggtcacatctcagcagcgacctgccccagccctgcccttcttggcccatgctaggactcactcccctccagcttctccatgacttcctgcagggcccggagggtctccccactcacagactcgcccccagtccctgaggctgggactgctgcctctggctccttctcggccgaggtgagcgtctccatcacctggcccagcttctcctgcagctcctttacttgctgctccaactgcagtgcgctcttgttctcgtgcttctggacagagagaagcaatcagcagccacccactgcagctggagaccccagaacttggtgtctgcctcccatggcaccgggaagggtggagccaagttagaaaaatactctcctctctcccacagccaccagagcaaagctctggctcacaggtgcctttggaagtaatatttcatgtgagggctacactgccccattttacaggtggggaaacaaaggcctggagggctagggaggagggcaggctccccaggtggggcaacccaccagctcctccaagtcgctctgtggctcggccagctgctgaagcctcttctcccgttcccgaagcctctcctgctgctcctgaagcctctcctcctgctcgcgaagcctctccttttgcccacggttcaggagactgatgcactgattgttttccacctgagcctggagctctcctgccactctctccagctccttcctcaggtcttgcagctccacctcagaggacactgctggggcatccgggggcagtggctcagctgagaaaggaagcagatcataagggcctctggattctcaaaacaaaaatcaaaacagaaaaaacaacaaaacaccctcctgttggcgcacagctcctctcaggctcccaaacttggcttcactgctaacgatccctcgcacccggatggtagccagtcttccaaaccactttcagatagagagcactgcgggtggctgacaacgggccctctttgctcatggggacactgaggctcagggagatgacaagacttgtctcctggcacagacctctttccctctgcctcaaagccctgccatccacccacctccctggggcactctaagccacccccacagccctctgatgccagtcctgctcccaggtcatgccagccccatcttacccatctggtttttgagtctggacaagctcctctccagctcctctacccgatgcgtatcatgcttcttctcctccttcaatgtgcaaacctgcccaaagcacagggggaaagggccctggagagaggggctggtggctggacaggctcccatctccctctctgcccccacctccacaaagcccagacccaggaccacctctggctgcactattcccattttaaagaggcccagaaagatccagtgacctatcttaagttgttggtggggggggggtggggcgggaggctgaagggtcagatctcacctcctgcgacattttcctcatcctctgctgccactgggccctctctccttttatttgttcagcatattgatctctctccagctggacttctttaagcgactccttcaactgcaagaatggccacacaagttaggaagggccgtcactggtcctcacctgctcctggccacctggggtcatcttccttccacatccctccctctgcaaaacctcacctgtgtcacgtgtcctttcagcagtatctgctcccgtatggactgctctaactgccgcttgagaagtgctttactgcggctcgagaactggatggtgaagagtgagaagtttcgatctggggagcctgggccattccacacagtgccccttaaaagggctagggctaggctcaatatacaactcggtcagt

SEQ ID NO: 1886048 - DNA, 4001 bp, Homo sapiens
ttattttctaaagtgttttccactcaaggaaaagaagtaaattcctatgtcagagtaaccgaggtggttgaagaataggtattagccagagaggtctagatagtaaaatcaaacttcaagcctcaaagaagctccatgaacagagaggaatgccaggtgtcacacagctttccttcactctaattcattcttgactagagcctgtatgcctgtttcagagacatttaaactcttaaaggatgtcttatgatctttactaaatacattaagaagaatgccaaccagcgccctttcgtgtactgggacaggtagtcatgtgattaaaacagggaacacgaactctgactttaaaatgtattgtagatacaaatgctctaagctaggaaaggttttccacatccacagccaacgatggcagcctttcattcctcggaaataagccatttttaggtcactgaaaaagagtgcaactgctgcagctcacgatgcaatatcttcatgagcccagagcacatacaaatccaaagggaactgccacagtacagtgctcattcttggcaccggaacagatgaaacacactgtatcctgcacatacctgccagagcaggccactttcctcttctgcgagatttagaaagctcccccaaaaggttatcactcccatcaccaatacacagaaaatggaggaaaggctgtttccagttctcggcctttaaacagctctaagtgtcagtactcatagtggcatattacaaagtaataaacagtgcacacttgagggcaaaccgcatattgagctatggaagagctcactgtgattaagatgagatcaaacatcatagcagaacattagcaaattttatctgaattctgtaatgaacatccatgctgcaataacattaaaaaagcacgggagcctattccaaaccagcgagaacagttttgtgcaaagagtgggtctttgtgtgtttgaactcccaccacgtaagggcaaactcgatatgcatgctaatgacctacaattatgaaatgaaaaaagaaaaatgctaaaggatgccagagtgaacatcagtgagaggcacagagacccactctcttttaactttttacaaataaacttaaactataaattagaaacacaaataatcatgagtagctctaacattcaaatgaagtaaatgaattgtgtaggagattaaccccataactttgtttcgtttttaaaaatttcttgagcagctctttgatgatggtggtgtttatctccttcttctcggcagccaagcccagcaaaagcatggcacacagcagttgctgcccaagcctgggtgctcctggtggtcctgcatctcaccaaggagctgcaggactggctgtgcagtagggttgtcctgggaagaaccctccctggcttctccttgtgcaggctccacgctgttggtgaggctcgcctcacaaagatctttggagagagagaggcggggatctgagtggagtgctagccgccccccgctcctgcctgctcaccccgcctgggggctctactcaccaccatgcttgtcggcagccccgagctcctggggggctggggctcctggactgggttcagcagcagggttccgggcagcggccaggaatttgccgtgcccctcgctgtagctgccacaagccgcaacaccatctcctgcagctccagcagcttcacctgaagggacgggtgctcagctgtcaggccgctgctggcgcccaccctcatgcccaccccacccacacccccaccccacccccacccccacagggatgttgcacaccctaccttcctctcctccttgtcctgggccagcctgatgatggcctcctcccggtgacgcatctttggcactgtcccctggctctgttagaaggcgatgtactttcctgcgggaggacagggctcagacgctggggcccctcccatagccctgcagctccccctgccgtgccctggcctcccactcactgatggcatctctctctccggtactggatgaatccaagttccagtttctccacatgctccctcaggtccgccttctcctccaggaggtccataaggccgctctggagccaaaataatggggtcacatctcagcagcgacctgccccagccctgcccttcttggcccatgctaggactcactcccctccagcttctccatgacttcctgcagggcccggagggtctccccactcacagactcgcccccagtccctgaggctgggactgctgcctctggctccttctcggccgaggtgagcgtctccatcacctggcccagcttctcctgcagctcctttacttgctgctccaactgcagtgcgctcttgttctcgtgcttctggacagagagaagcaatcagcagccacccactgcagctggagaccccagaacttggtgtctgcctcccatggcaccgggaagggtggagccaagttagaaaaatactctcctctctcccacagccaccagagcaaagctctggctcacaggtgcctttggaagtaatatttcatgtgagggctacactgccccattttacaggtggggaaacaaaggcctggagggctagggaggagggcaggctccccaggtggggcaacccaccagctcctccaagtcgctctgtggctcggccagctgctgaagcctcttctcccgttcccgaagcctctcctgctgctcctgaagcctctcctcctgctcgcgaagcctctccttttgcccacggttcaggagactgatgcactgattgttttccacctgagcctggagctctcctgccactctctccagctccttcctcaggtcttgcagctccacctcagaggacactgctggggcatccgggggcagtggctcagctgagaaaggaagcagatcataagggcctctggattctcaaaacaaaaatcaaaacagaaaaaacaacaaaacaccctcctgttggcgcacagctcctctcaggctcccaaacttggcttcactgctaacgatccctcgcacccggatggtagccagtcttccaaaccactttcagatagagagcactgcgggtggctgacaacgggccctctttgctcatggggacactgaggctcagggagatgacaagacttgtctcctggcacagacctctttccctctgcctcaaagccctgccatccacccacctccctggggcactctaagccacccccacagccctctgatgccagtcctgctcccaggtcatgccagccccatcttacccatctggtttttgagtctggacaagctcctctccagctcctctacccgatgcgtatcatgcttcttctcctccttcaatgtgcaaacctgcccaaagcacagggggaaagggccctggagagaggggctggtggctggacaggctcccatctccctctctgcccccacctccacaaagcccagacccaggaccacctctggctgcactattcccattttaaagaggcccagaaagatccagtgacctatcttaagttgttggtggggggggggtggggcgggaggctgaagggtcagatctcacctcctgcgacattttcctcatcctctgctgccactgggccctctctccttttatttgttcagcatattgatctctctccagctggacttctttaagcgactccttcaactgcaagaatggccacacaagttaggaagggccgtcactggtcctcacctgctcctggccacctggggtcatcttccttccacatccctccctctgcaaaacctcacctgtgtcacgtgtcctttcagcagtatctgctcccgtatggactgctctaactgccgcttgagaagtgctttactgcggctcgagaactggatggtgaagagtgagaagtttcgatctggggagcctgggccattccacacagtgccccttaaaagggctagggctaggctcaatatacaactcggtcagt

SEQ ID NO: 1886049 - DNA, 4001 bp, Homo sapiens; identical to SEQ ID NO: 1886047

SEQ ID NO: 1886050 - DNA, 4001 bp, Homo sapiens; identical to SEQ ID NO: 1886048

SEQ ID NO: 1886051 - DNA, 4001 bp, Homo sapiens
aattcctgaatattttaacaatcagctcatgaatgctgatgccagctgggtggagaacaccagtgatttcagtgtaccagtgatgtttggtttcccctgggatgtaaatgtaaacagaggactcctggagtctgatggtagatttccagcccagcaggtagagcagaagagagccttgaaagtaacaattctgcccccatctccttcaaatcccaccagcaaataggcttcccgggtctttcctgccctcacttctttagtctttaaagggtgggaacttgaattagccaggagagcacacaaaccaaccaacccccatttccatcaccaacacccagctgccttccgcagtggtacgcacctcggtgatgggattggatgccaggaccttgtcttccacgtgagcgttgctgcccgatttgctgacggtggcaaagtacctcatggcatagcgagccgacactgtctttccagcacctgactccccacttacaattatggactggtttctgttgtttctaaagcaaataaaagttttcaaatattagtttcttcccattaaagaggcaacatgtgctaattaagacaaatgtggacaagacaaaagagggaaactgttttgtcactctactatttttaaatctcaatcaatttccttctagatttttttttctatgtgatcgtgcagaacacacaattttaaaagttcacatctttcatccaaccttattcaaatccttactccttactgcttccctactcaacctttccactcaaccaaaaaactgctccttcccatccttcccactctctgggcaggatttttgcttttaaactctgttcttgaatttcacctctcatttcatctctcctctgccttccccaccctctcctgagcaccctctttctagatggaccctgtgtaggtcatcatgctgcctgtcaacatgtatttattgagtaccatgttgaggggccccaagaccaacctcaggttcaatgacccagtaagaggactctcaggactcagcatatagtcatcctcacagctaagactgattgcagcaagaggatacacagcaaaagcagcacggggaaaaggcacacggggcaaggtccagtggaacacgggtgcaaacttccaggggtcctctcccagtcgggtcacacaggacacattcaattcttccagcaaggaatttgacagcacatgtgaaatgctggctgccagggaagctcattagagatgcagtgcccaccttctgcctagcatatgccaatattccagactcccagaaggaaagcacgtattcagcataaagcacattatttacacaaacagcttgagtttaggtaaaatgagccactttttcaaccaagaaatgtcaggaaccgtcatgaaatcagaggctagccatgggccaccttgcaagcaggcctctaaagatagcagcctcaggccttatgtcaactcctttctgcacatcccacttaaatataaaaacatttcaaggacattattttgagagcaattattcaaaagatgcttgggaacatatgcgctctctaagccaacatgctctgttatataatttagagattttttaaaaatgcattaaacttttcatgtcataagactgtgatggtggaagcttctaacatggctctgtggatgtggcaccgctcacatgccaggtgctgggtgaatacagattctcatttaagcttcacaaaaatcctacgacatagatatctcttttacagaagagtaaaatggtgactcaggggtggagtgacttgacccagagcacagagccacagcctcccatgtaaatgctagaggagactttggatacagagccccggtccaatattttcatttcaaagagagaagatgaagactctgagaagtgaaatgacatgctcagtgtccctcagggcatagaacagggctttagtaatcccagccctgttctacagccctgagggacactacctgtctagcatcaaacaaggccaacacgagcctgctttgggctccgttctgttatggcagttacacagacagacctccaaggagaaactggctctttagggctgaagtgagcacagccctacagtgccaaagagctcatcccacccatacccagtccctaatcaccacgatacctgggagacctacagggagccagggaaaaatctcagaaccacaggggttttagggttagaaggaatcttggtgcagcggaagctgctaattctctacccagtatgcatttgcattctcctcttccttcttagggactaggccccagtggccaggcagtgcccctctgtgcatttgaaagactgcacatcccagcctccctatgtgagtgaggtctgcctgacgagctgttagaagtgctttgtggggcttccagagagtctccttaacctggagggccatacccttcccctcatatgccttgttacctagaatatggaagacagaggtgagaactggcttgtccctgaggatgacggccccaccccagggacagggagctgcacggcaccgggtctctgatgactctgaagaagctcggtctagccccagactgcccatcagacatctgtgcaggaaagcagcacgtgttctacctcatgtaagcaccacctgctccctcattataagcatcagaaccaggaatgggtgccctctgagagtccagctcacagacgaagacataaagcggagggagctcaggagctgcggctggggttatgcagtaaagatttaggtaaagagtcagcaggtccaggtcctgtgcctcagatttcccatctgtgaaatgagggcaatgaagtcagtcaacttcacaggagtgctgtaagactcaagggagaccactgtatgtgaaagttcttttgcaaactgtaaaggcagctacaaagatagggtggtgtttctattctccatactttacagatgaagacactgaagccaaaagtgatagttatgggaaaaataaactagagtttaaaaatctgagcacaaatcccagatctgccttttacttgctgcctaccctgggttggttattccctgaagctgtttactgcccagacatttgcatcgtgggctattctgaggccatcccagatgacacatgggaatgtgtgcacggtgcctcattcacaggaggcttttcatacatgtgcactagtgaaacgagaactccacagggccctacaaacacctagcagtgaaattaggataaaattccatgtctcctgcacctaaaacctcctgcagctaaaaaccctgtcatcagatcctacttcctgcaatgggtaaaaaaaaaaaaagcttaaacgtctcatagcagagaataaatcaacactcctccaaccaaacacactgcaagaaaagcatctgctattcccagactggtaggactgacttgactaccttgaaggaacaaaacccaggaaactccagtcttgacaggtcaggtacatggaacagtcgtttgctattcattccaggtagtcggctcaacaaagcaccacctctggcctatctcttttaatgagcccaacctagatatctcccctccactgtgatggtctggcaaatgcagggagcattggcagagcaaggggaagtccagcttggcaggaagctacctggccatctgcttgtatgcctcttctgccacggcaaatatgtgtgggtccatatcgcccatgttctgcccgctgtaggcgtggatgatggcatctccgtatattggcaactgcttgtaaggattcatggccaccaaaatgattcctggggaaagatgttagatgcagttaaaatactcttactgccacctgcatctccagtttttttttttttaagaaaccccagctctgtcgcttattaaaccttctgtgtgactttgggcaagtcacttcacgcactgaattaattccctgccagtcacctacaccctcgggctgttctgacggtt

SEQ ID NO: 1886052 - DNA, 4001 bp, Homo sapiens
gcaatgcagccttcatcccccgacctgcacgtcccctctcatcccagagcacaccctccggggccatcatccccccacccgcagggctcaccctccaaaggaccccagggcctgcgtggtggtccgtggactcacttaccaaccctccttctgctcggcctcctgaagcccttggatggctcggagggcacggggaccaggtactaaaggataatgatggctacacacatgtccctaagctcactacctggggacgccctcattctgtctctcagtctattaacaggggagatggagcccaggagcccaggagacagctacacacacacacacacaagcacacacacgtccctgagttcaccacctggggatgctctcattccgtctctcagtatattaacggcagacagagcccaggagattgacggctacacacacacacacacgtgtccctgagctcaccacctggggatgcactcattccatctctattaacagggcagacagagcccaggagattggtggccacacacacacacacacacacacacacacacacacacacacgtccctgagttcaccacctggggacgccctcattctgtctctcagtctattaacaggggagatggagcccaggagcccaggagacagctacacacacacacacacaagcacacacacgtccctgagttcaccacctggggatgctctcattccgtctctcagtatattaacggcagacagagcccaggagattgacggctacacacacacacacacgtgtccctgagctcaccacctggggatgcactcattccatctctattaacagggcagacagagcccaggagattggtggccacacacacacacacacacacacacacacacacacgtccctgagctcaccacctggggatgccttcattgtgtctctcagtctattaacagggaagacggagcccgggagactgacggctacacacatgcacacacagacacacacacacacgtctctgagttcaccacctggggacgctctcattccatctctcagtctattaacagggcagacggagcccaggattgatggctacacacacacacacacacacacacacacacacaccttcctgagctcaccacctggggatgctctcattccatctctcagtctgttaacagggcagacagagcccaggattgatggctacactcacacacacacgttcctgagctcaccacctggagacgtccagcactcctcccacagcatcttcgaagctctcattctgtctctcagtctattaacaggggacacagagcccaggagaggtctctgtcccgcgctgtcctggcaaatctgggtcccgattctgagttcaatggtgttaaaaaataataggctatgtccccactaaagtctaaatatagccaaccccatttacccaggctgtgcacatcacaattccacttgtagaggctcctaccaccatcttaggtccatccccagaaggtccatcccacccccaccccgcccccgtcaaggtctcactctgtcacccatgctggagtgcagtggtgcaatctcagctcactgcaacctccacctcccaggttcaagcgattctcctacctcagcctctgcagtagctaggactacaggtgtgtgccaccacacccagctaatttttgcatatttagtagagtcggtgtttctccatgttggccaggctggtttcgaactcctgacctcaggtgatccacccacctcagcctcccaaagtgctggaattacaggcgtgagccaccgtgcctgacctcagacaccttttggtgcttctggtttgagatggggtctcactctgtcacccaggctggaccgcagtgctgcaatctaagcttactgcagcctccacctcctgggctcaggtgatccttccacctcagcctccaaagtagctgggaccacaggcccccaccaccacgcccggctaacttttctttcttctttttttttttttttttttgtagatacaggttcttacaccatgttgcccatgctggtgtcaaactcctgggctccagcaatcctcccacctcagcctcccaagtagctgggaccacaggcacccaccaccacgctggactaatttttctttttttatctttttcttttctttttttgtagatatggggtcttaccatgttgcccatgctagtgtcaaactcctgggctcaagcaatcctcccacctcagcgtcctgagtagctgggaccacaggcacccaccaccatgcccagctaaatttttttttttggggggtagagaagggatcttaccaagttgcccatgctggtgtcaaactcctgggctcaagcgatcctcccacctcagcctcccaacacgtaaacgggtgctacatttctgcacaatccccgcagtctcccttattctgttttacaactactcccacataaagtaacatagaaaggtgagccccattattcctttagaaggtagactggagcttgcaagaagctgtaggataaagattcagaggtcaactgagataaaatgaaacacccaggtgattttaagctaatcaagggcccctttcacgtgggtgattttaaactacccgagtgaccctttcacacaggtgattttaaattaatcaagagcctctttcacacaggtgattttaaactaatcaagtgaccctttcacacaggtgattttaaactaatcaagaccctctttcacgcaggtgattttaaactaatcgagttctcctttcacagaactaaaaggggtggttaatttacacaaatgcgcaggctacagccacctctccttcctagggacttcgggccgaaaatgccacctgtcacacctccaatccaggcactgcagggctgttaggaggggaattagcagctgggataccccaatcctacaatgaggggggttagcaacccctcctgaaataccaaaaaggccacagcttcctgcagacgcttaagaaccatgccaatcacaactgctttcctgaaaaatgcaagaagtcctggtgagggctggggttgcaggacgctttgcacaccacgggtaacagtttgtgggggcgcttctctgggactggctacctcttactgtcccctggaccaggggggccctgctctcatccttctggcatctcccaggcccctgccccactcagagctccaccgcaggggctcctgaggctggactcagaaccgctggatcccatcaaggcccccaaggcagacatctcacagatgtctgtgctggggggtgcgtctgaggctctccttgcttcatgaggctgcttcaccccattcttgtctcccctcacctcctgacaccctgggttccccataggcccccctcccctgcacagattttcacctaggctctgggaggttggtggagtcctgggttctagaagacctcagagacccagggcagagtgaatgtcaggggttatcagaagcaggggctgcccaagaccaattgctgagggaagaaggagtgatgaatgagatggataaacatgtcagctgtttggctttccacaatcattatctattttcagcctccgtgtcctgatgtttaaaatacagcagctaaaatatctggtggtcttttcttcctcttctgagtgcagccacgacatgccacatctctgcccatggccttcttgcctttgtctctagagggtgccatcagggatggatctgtccatgcaggaaggagcctgaaccccagactcttggacctcagactgggagagggtgtgggtgaaggcacgtggaccagtgattgattaattgattgactgatttatagacagagtctcactctgtcaccaggctggagtgtagtggcacgatctcggcttactgcaacctctgcctcccaggttcaagcgattctcctgcctcagcctcccgagtagctgggactacaggtg

SEQ ID NO: 1886053 - DNA, 4001 bp, Homo sapiens
tgggactacaggcgcccgccaccacgtccggctaatttttttgtatttttagtagagacgtggtttcactgtgttaaccaggatggtcttgacctcctgacctcgtgatccgcccgcctcagcctcccaaagtgctgggattgcaggcgtgagccacagcgcccggccgaaaaaactttttaaaatttgtttggggatctcccatatttgccaaagtaatcccacaaaaacaattaacatttgactttgaaaattaagacaaaaaatacaatgatgaatattttcttgtaaaagcaaagacagtaaaaatattcagatttaaaataagcctgagaaaaagcatgatttccttgagcttacctaagtaaacttatttacaagtgactgtatcaataattagcaaaagtaaaagtcattatgaaatcctccaaatctttcaaagtactatcttacattcaagcattgagtttgcccataaaattatttaagctcaaccttttcctcaatctccaaaactctggcgtgtaactacacaaacacttcaataggggacagaatctccttttatcattcattctaccaaacatcaacttcataagaattagaatcaagtgtaataagaatgaactatatagaatcattgatataaatttataggtgttcagacataacctttagacatatttgtcagtgtacatgtaaacaatactcaataacttctttaatagagttctccagagaaacagaaccaattggatgtgggtatataactcagttatatatttcatcagcttcctttttatgtaatagaaactaactacagctaatgatgaatttttttcattcattcatcattaaaaggggagagagaaatccaggctgggtttgtgccatttttattccctcacagttctcttcttgctgcatgattcttcctttcagatattaaccagaaggaatggttagcctgactatagctctagaggagcaacacaggctctggataatgaggatgcacaggctttaatcagtcctagcaggaggtcttggcttagacaactatgtagagttgatggtatccctataggaaaaaaatatatatatatatgtttttgtggtagcaggacagagtcagtttcagacatttgttcaacaactgttggtgttcaacatatattagtattttgcactaggtactatgtgctaaaagtatagtaaggaataaaaatagggaaataaacaaaaacaaaataaagaaacagagaaaattcctattaccctttaggaaaaacaacataaaataaagtaacagaatctagaaacagagaataacaagatagaagcctactatataccaccattatcaacctgtcaaaataaacattgtcagtagtgagacaaactggaatcatgtaccacctgataggatgcaatgaaaaaaacgcagcatcaattctgtgatattcttgccaaaatgcattgcctgactctagtcacaaggaaacctcagaaaacctaaagggagccattcaaaaaagaaggaagggaaaaggaaaaagtaagggaaagaggagagaaggaaggggagggggaagggaaggggagagggaagagaaaaaggaaggggaaagcgaaggagaaaggaaaggagaaaaggaaggagaagcaaagcaaaggaaaaaaagaagaaaatatgggccagaaatcttggttaagttaggtctaaagatctattcttgatacaaggacattaaaaagacatgacaatgaaaggcaatgcatgattctgaacttgatccttttgctatgaaacattattgggactattggtgaattttttttttttttttttgagacggggtctcggtctgtcgcccagcctggagtgcagtggcgcagtctgggctcactgcaagcctcgcctcctgggttcacgccattctcctgcctcagcctcccgagtagctgggactacaggcacccaccaccacgcccggctaattttttcctttttttttttgtatttttagtagagacggggtttcaccctgttagccaggatggtcttgatcgcctgacctcgtgacccatccgcctcggcctcccaaagtgctgggattacaggcgtgagccaccgtgcccggctgactattggtgaaattttaatgcggacttgataattagatgtagcaatatattaatattaattttctggttttgttcgttgtactgtgcatgtattgcatttgggggggcacatatattactgtaacagatttgtaatatatacaattatatatatgtatatacatatatagacacaattgtgtttgtagaaaatatatatgaaagcaaggtttttcaactttggcactatcgcttctgacatttgggccacataattctttgttgggggcatttcctgtgaattgcaggatgtttagcgacttggtttgcctttaataactaaatgacagtagcatcctcctcacacctttccccaggctaacaactaaaaatatcttgagatattatcagatgtttcctggagggcaaaactccccctggttgagaatcagtctactaaagtatttggagatgacagagcatcaggttcgtttctatatattattaaagtatctttcaaagttgaaggtaaaattaagacattttcggaaaaattaaatgggccaatttgtcaccagcaaatctgtactacaaaacatgctagcagaagttttctggcctgaagggaaataacgtcgaatctaaactccagattagaggaaatgaaaagcatagaaatggtaagtatatgagtaacaggaaatacttttttttaatctgccgattttgttgaagggaaactgactatttaaatttaaaaagatatcattttattgtggggtttatgatgtggacagaaaaacttatactaaaaaaaatcacaaaagacagagggggagtaaaggaaatgttaccgtcatcagtttttgttgttgttgttttgggtttttttaatagactttatttttagggcagttgtaagctcacagcaaaattgaaagaaagatacaaagatttctcatacatcattgtgtccacacaggcacagcctgaccccttgctgtcattctcctctggagtggcacattacttaccgctgatgaacctgcactggcacatccttatcaccaaggtccatagttatattagggtccacgcttgctgtcatacattctatgagtttaggcaaattcatataccagtatagtatcatgcagaatagttttctgccctgaaagtcttctgtgcatatgaataggataggtggagcacagatcactttttaggaaaatgttgccttgttttgatttgacaaagtaggcaacactatcaatcactggagagaatgtaaaaatagaacagatgtcatcagttttttacattatatatgaagttgtcaaaaattacctcgaagtaaaatttagattagttaagtataaattgatgattattgtaatacaaataactcaatacaaaaaagcgttgcaactaactcatctatgcaatttaaaatgaatacttaaaatacaattaaacaaaaatatgagaagagaaacaagagattgtacagtttttaaaagtggcaacacatttcatttaacatatttatgaactaaattattcaattacaaggtagagactgtcatattagacaaaagaatgagacccaactaatgttgtctaccagaaacatacattaaacataaagacacagatagatgaaaagtaaacctacaagaaaagataaaccatatacacagcaagcattaggaagcttgtgtggctacattagcaaaatgcaatgtagactggaaaagagggtgcattataagagaaaatgggggcatttcataattatgaaagaaccaattcatcagaggacaataatattgcttatattattgtcctctgatgaattggttattatattattg

SEQ ID NO: 1886054 - DNA, 4001 bp, Homo sapiens
aatagccacgaaaggaccccagactccaggaaccaccacctagaaaacagatccttctccggatcacctgaggtcaggagttctagaccagcctggctaacatggtgaaatcccctttccactaaaaatacaaaaatcagccaggcatggtagcgcacgcctgtaatcccagctactcgggaggctgaggctggagaaatcgcttgaacccaggagacagaggttgcactgagccgagatcacgtcattgcactccagcttgggcaaaaagagtgaaactccatctcgaaaaaaaaaaaagaaagcaaacagacccttctccaccaaggatactgaggcaagaaaccactggaaccactccccactcttccctgcccacagacaacccaccaacccaccaggaacagtcacccctagaggccaactctggccttctgtaaattcctgtctcacaggattgggacttggagaaaagacaccccaggaaaatctcactgcaggcaatagaaatatccttaaaaaaaaaaaaaaaaagacttttgcagcaaccctttagcatctctaaaagttagaattcaatctggaaaggaagaattgtttcaactgtccactcacaatgttcaagtaacgaatgcacgtgcttcagcagtcccctacccactgcttcgagcgagctctcccggtgtcatcccgatggaaaacactactttgggaagggggtgagaagaggagagaaatccaaaaagggaaaaacgagcctcttataagcccctcccacatccttccccaactcccagccctcagtagcaacccaaatacagaacatctgagctggaagaaaccttatttttagaggaggaaaccagggcctaggggtcgagcgagttgctcgcagttaccgagcatgtcagaaacagcctgttcccaagtgcccagctcacgagtcaatgctcttttgcagaccttgatctcacaccaacccactcagacccagtggggccagcccaaggtacccaggaacaactggccttcggcttttttgagacagggtcttgctctgttgctcaggctggagtgcagtggcgcaaacatggctcactgcagcctcctggactcaagcgatcctcttgcctccatctcctgagtaactgggaccacaggtgcacaccacaaagcccagcttttttttttttttttttttttttgagacggagtctcactctgtcgcccaggctgcaatgcaatggcatgatcttggctcactgcaacctccacctccgcctcctgggttcaagtgattctcctgcctcagcctcccaaatagctgggattataggcacccaccaccatgcccgacaatttttgtatttttagtagagatggggttccaccatgttggccaggctggtctcaaaaactcctgacctcaagtgatccatccgcctcagcatcccaaagtgctgggattacaagcatgagccactgtgcccaactcccggctaattttttaattttgtgtagaggtggggtctcaccatgttgcccaagctcatctcgaattcctggactcaagccatcctcctgcaatcccaaagtgactcacgcctggcctggtcttcagctcatgaacaaagaggacagacacagtatcttgcaaaaggttggggtaggtatgatggtgatggtggcgatggcaggggggtggggggtggtcccactggatgatgccacggtgaatcctacatggttacaggccaacgacgagactgactgacagactgtcaactccccacagctgagtgtgagtggccttgtgccccactagctatggggaggttggggatgggtgctggagcaggcccagccatccctaccagcccagaccacagagcacacgagctgcagcctacatttctaagtttacggctttcctgttataaagacactgagcacgttttcagaatttgctgccatcatcatcgcacccagatctgatctggcttccccaagggaaagagaccccactgagaaccaggacactgcactcagggtccagctcagaagatacccactgacgagattccaaacaaaagacaaagaacctcaaaacaacgtcaggaagcccagggtgaagccccagccctgtcaccagccatagcaggtggctttgtggccttcgcttgtcagcctcagctacagtagagtagactcgcctcaggtcccgtcacacactgacactctatgacaccaggcgttttaaagggcagtagaatgcgactgagtctcagataagactcagccaccatcctccatctgctcagagcttcagtgactccttctgcacacaaggtggcaaagaagtggtgtgaacagagaagagaaggggacaagatggaagtcaggggccagccagctctgggccctagaccgacctgggcctgggaacttgaggggggtctctgcagagccaacgttagggctgccgaacagaaacgtcagggcagtcatacccttggtgtggtcttggtcgccgtagtgggtagggggtgggggtgggagtgttttgggggattgggtcctgcctgggccccgcgcttaggcttggcaccagcaggttgctcttacgcctcccataggaaagaaggccctctgagtatggccacttgacgtgaggtggatggaatgtggcgacatggcctgcagacccaggacttataaggctctgaataaggacacaggggaagacagcaagcagcacacagccagacagtggatgtgaacctagatccacacactccacaacatgtttcccatgcttcctgcaaggagctctggggtggctcagctacccaggcaaggacgatgcccagatccccttgcaagaagcccccatctagaggacacttggccccagagtttaccagtgtcaccacagcctcacctagtaaggacaagtcccaggttcaggtgggatctggtgttctgcctgcccctgctatccctcttgccccaaatcccatgttatcagggcctggctataaggccccatcctgggctgcaccttgtagtttcattcctttacacaaaccatcagcatgcaaagctcatagtcctttgagcaacaggtagaacaggtatggggtccccattttacagatgcagaagtcagtccagggatcaagtgcctggctggccagtggcagagctgaggcttaagtccaagttgcctgaaaagtttggggctcttcctcataatgtgcaatgtgtcctagacttccaatggtgtgtgtgtgtaggggtggggggaatagagactggggggaactaagccagggtgaaaagttatctgaaaggagggacagggctgggcaggtataagaaggcttcaggcctcattctccaagccacttccagccccaggaagagaagccttaatgtcgtgggaacacacctggtcaaagcctgttgtgtgcacttgacctacacctcatttagggaactagaccaaacagagaatgagctgtgcttgcaaactctgtgtcagggcaggctggctgaagcgtgccttccatcaggatccagacagagccaggggccaggacttggctttcaggggcaaagttcactgggcaccccggcatggaagcctcccaggcccacccacctcctgcagccttcttggtgctgtgtggccagctaacacagatctactgcctgcctgtgtgcctggcaagggttgcagttgccgccactgccatacaataccctacagaagggactagattcaaggcattgggctagaggacccctacacccctcactgccagctcctaaatcaatacctccaacccttaaaccacatgatgctatgctggcatgaacacacagccccgagcccaccacacctagcccattacttgacggaggcgaatgaaacctgacaggagagatgtttcctaacatgatgctcctgtcaggagggggtttctgttcagaggtag

SEQ ID NO: 1886055 - DNA, 4001 bp, Homo sapiens
agggagacagaaggcgaggccgggaagacccctgccagggatgtgtgtccccccaccacatagaggcagttctccagctcagctgagccatggccaaagcgggcaatcagcatgggcgccgccttggaccattcctcatgtacggtgtcgtacacccagacatccttggagaccccgttctcggagcccctgccccccgtcacatagaccttgcagccgatcgctgaggcgctgaactccttccgggggctgggcaggtcggccttggggatgatctccttggccttgtggtccacctggtagatcttgtcacacatgaaggtctggccccccaggatgagtagcgtgtggcccgccttgcgtggccgggcacaggggctggtgaccacgccatcattctgcaggatcctggtcttgcagcgcagggcctcatccatgataagcttggtgcgctcgtctgccatgaggagggcctcgctggagacggcctcctgcaggcagtcggacggcagcaaggccagacgcacgctgcggaggagctcgggcaagtggaccttccgtggctccaggtcgtgcttcacccactggaggatggcctcgaagaccacccgctcgtcctcggtctccagctcatcactcgagatgaggtccagcagtgtgtccttggacaggctgttgaagtcctcgctctgcctcaccgtctcaaagtgcaccaggcacatgcgccaggagaactcatacagccggcggcactggtgggcgtccgagagcagcatcatgcccaggcagttggaggggaaaaggttcttctccaggaactcggcggcagcatcccgcacatcgtggaactgcagcatgtcgcctgcctccagcagtgactcagcgttctcctcgttgatggcgatgcgtgaggagtaggcaaagtccagcagcagctccagcacctccgggtgcaggttgtcctggaagttgacagtgtcatcccggctctcccgaaggccatggctgaacatggcctcaaaatagcggctagaggcggccagcacggcacggtgacaggggaaggcacggtcgcccgcccagagtgtgacgtcggtgaacatgcagtgcttgcgaagcgtgttgaggtgggccagcacacagtccgggtgggaggccttgtggaagagggtgacgttcatggaccccgtgctgctccgcgacttgcgggtctcatggacactgaccgacatggtgcgtcagcttgtgggggaacaagcccacaggttagaggagcccctcctgcccatctgccctctcagggctcactcttcagcacaagcccccttgtcccctcccacccactctctgctcacctctgctaaaccaagcccctctcccgcaaccacgttgccaaggacaacacaggcaagagtggctgggtctcaccctgccctgcagaaactggttttgttctcagggtatgagccagctctgggacaaacatctctggcctgcagatgagccaccccctaggcaagctccagttgaggctgcctcccatggttaagagaacatgcaaacggtgttcctgactgaggctggtgtccgggcagtgctaagtaactggtgcctttgaccacattccactctcatgacagtcctctacagaagcttctcttgtaagtcccattttagagctagggaagccacagctcagagaggccaagaaactacccaaactgccacagccaggattctcacatgggctgtccggctctggagcctgatctctgttcaaggtgactaatccctgcagggtttgctgtggacgcccaagcagagcctcacgtacccacttccctgctcccagcaggctctgccctgggccgggctccaagcggtactggctagacatcccccttgccttggaacaagagccgccatcaaggcccaagtgctcagtggagacatgttctctgaatccaggtgtctccacagggctctttacctagctggggcaagtgatggcttggaggtggggccgccagtgactcaccctcgagaccaacgcagaggcccaagatgacagcaggacatgccgaaccctaacggaagtgatccagatttgcctcagcaaagcagagaaacacgaagccagagcttcccaggtcccccagctgacgccaggatcctgggccaacgcagcgcctcccctgcctcccttgcctgcccttctccaccaggcctggggacctggcgctcagagtgatggagtgatggccaagaaacaggttcactacttgctcaatctaggggaattctaaagcactgtcattaatgtccagtgaatggcatgacccgaggccccagttcagtactttgaactcaaggctcagccaacaggcggcaaaactcatatacctagagaaaacatggccaacacccttgaggccatctcgaagaccacagctacctgccccactgacctgtggaaggagactgtattcaccaagtctcccgatcaggaattcactgaccaccttgtcaagaccctcaccagagtctccatgcagaggacctacgctccagctgtggctacaacagggtttttatacaagaaaaataaagtgaattaagcctgaaaaaaaaaaaaaaaagaaagaaaagaaaacatggccaaaaagcaaactgcattccagtatcttgaccccctaaaagcctgtgctgctgtcttcctgctggtaatggggccaagaaaaacaaaaaaccctaaacaacaaagtttttcatttttaattttcaaaagtatgtaactctcctgccgcctcccactccaagtcaattttctacttaggtaataatctggtaaaggtaggaaacgatttcatgcttcagtgaaattgtaaatgagtgtccggctacatggctctctcttgctcactcctcctctggaaaagaggcagagaagccacaaactgacgagattagagctagcaaggtccctgcttttgggcttaggcagagagggcacagggccagactggccttgctgcttggacccccaagctccaggtagactgtacaccgaggacctgcctaagacactgctgtccaaacctgcagcccacagtccacagggctccgaggctatatgaggttagcccttctgggggttggggtgagagcactggacgcagatccaggctgtatcctggctccacctccatcctgtacctcactattattttcttgtaaagtgagatccccatcctactcaggcctccacaactcacttgttggcaactatttcctgagcacatcctcgaagctgggccctcagatgcagtggcacggagcctgagagactgcgctgaccgggtctgagggaagctttgccaacagcctggcccgtgactgatcggaattgcctaatctgaattccagaccctgcgacatttccccaaatcttgctgtgattgctaaactctcactccagtttcctcactccagaccacccccttggtgatcagacaatttcccaaatgtggctctgtcccctcctgccccaccccacagtgtcaggacattttaagaggcatttgttgcctctggtctgcagaccgtgctgggggaaacgtggagagccaaggaccaggaagaattctagttcgagccctgggactcctaagcccatgccctctccactgaggtcacgttcaagggccctgatgctgaggtttggcttcagttccattgtcaacacacttgtgcttccaaggacctccctgctctaggtccctaggcacctcatcgcacctgccccctgccccaccctggccctgccagaggggaggctggttctgagcttgggctgaacggcagcttgaatgcctgggcttggacactccaagtgtggggtgagcccctctgggattcttcttacagacagccccagctggaatcccagctcctcaccttagtaactacggccctggaaccaacacacctagaactaactc

SEQ ID NO: 1886056 - DNA, 4001 bp, Homo sapiens
cgattttctacagtgaaggggcgtggaaggggacaatgggagtagaagcgggtttctgaagttgtgtttgtacttgattttaagcgagctgtgaacaactcgtgtccaaataagtggctgagaggtggtcctaagtaagcacaagtttagtagtagagtactcgtaacacagaactggctgaaaccccgccctcttgtctacgggcgttctttcagggcgactttgtcagtaccccaaactgtccccgcatgaggtcactctgcacggtcacgtgctcgagcccgcgggagcgccacatcgccagccgcacccctccacccccaacctgcccacgtgacccggcctagtttctccaggcccgtccctacgtctcactcgggaagccccgccccacgctgagcgctccgcctgcgaccctccgccacttacccaccccggctcaagcacgacccgtggatccacgtgctttttcttgtccaatgggagccggctcccgggcgcgaaggggcggggaggaaaggaacgactgtgctacgttgccagaaggggcgggacctgcaacgtccgacagaacgaggggacgtaacggaggcaggttggagccgctgccgtcgccatgacccgtgagcaccgagcccccttctccttgcccttttctttccgttcaccctaaacaccaccggcgaggcgccggctttgaccttccgtagcttccctagcaaggcgtttctctgggcgcgctctgtggccaccctcacactcggtgcccggaaatcgagccctttgcccacggctacttcacgggaccaccctcccgggttaggcataggccctcccggatcttccgcggtgtaaggagaaggccagcgcccctgtgataggcccagagcccccactccacaagccagcccatcccccacggagacccaaaccgtccacacacaccttgccagctgtttgggccccacgccgccccaaaacacgcctccagctggccccttgggacctcccttctctagtccgtattttgacctggcccgtggcagattcgccactcccccctaccccaagcagcctgggcctcgatgggccgttgtcggggcccggagattgaagtggtgttggatcctgctgctggccgcgctggggtagaagggtcgccggtgtgtgggcagagcggcccccgcgtctcacctttaattttctttccttaggcggtaaccagcgtgagctcgcccgccagaagaatatgaaaaagcagagcgactcggttaagggaaagcgccgagatgacgggctttctgctgccgcccgcaagcagaggtagccccagggaggggagggaaagggacggtggagacctgggttagaccaagggttatagaaggaaagagagctacctcagggcttgaatgtggactagtcgtgaggagcagagtgcattgcttcctctagggttttatttcctccccaccctccaaattgttagctcacagccttacaggaaaggacgggggcgggcgcctgccctcagtctgatttctgagcgtccctgggtctgaccttaagggcaagggcagggagcttcacatttcaaatacagttgtggttacggcagcccagtacttttggccctccttgctgttcggttctcctcccttctcccaacctcctcactggtgttgctgggtgtggtcctcaatacagaatagagacccttgggcctgtgtcaccagacttctgaccccttgggcaacagccagatggagactggtcgccttttgagcctcagctctcttcctcttgttctcctagggtgggagtacagcagccaaacgctgaacttagtcccatccacttccatcttatcctttgtgcccttcatccccctgcatcttgtcctttttgccctctggtacctcccagtgccccatcatctctacccccagggactcggagatcatgcagcagaagcagaaaaaggcaaacgagaagaaggaggaacccaagtagctttgtggcttcgtgtccaaccctcttgcccttcgcctgtgtgcctggagccagtcccaccacgctcgcgtttcctcctgtagtgctcacaggtcccagcaccgatggcattccctttgccctgagtctgcagcgggtcccttttgtgcttccttcccctcaggtagcctctctccccctgggccactcccgggggtgagggggttaccccttcccagtgttttttattcctgtggggctcaccccaaagtattaaaagtagctttgtaattccttgagcgcctggtttgactggggacttggggggatggggttggaagaatgactgccctttcccaccaaaaaagggagaactctttagattcagattgtgggtatgtagacttaataagtgaaacatcacagaagaagcctttattatacaatgacaaccaaacaagtactccggatatgcagtagaggaatcctctaagaaccatagagacttcttttctgtgatttttgttccccacccttgaacaccatctctaggatggagttggcctaagagtgaatgctgcaagatctgtgtttatgcctcttttcctcattcttcctcagtttgttcgtctgcttgaaagttggccaaaaaatcctgctgctcaccgacttcccgtggtcagctgctgtcaagcgttcactttctcttctgtcattcctcatggaatgagggtggttttgtcttcccgcttcccttgacctcaaaatcaggattaaaacctggggtagcctctgtgctcctttcttctatgccctggtttgttctgtggttctgggcttcttatatccgtgtgcccagggctgaactccttattttcctttctccaagggcagagccgagtcttcagtccctgttggtctttccccacccccacttccagcccaagagccaggaaagggctggtgccacactgtctgctgggatcagcggtggttctttgagctgctgatttgggtgttaggctcttgagctgggatgcagatgtaacagtagctccagtgagtcagacactctgcccagcacattagactgtgtttgaccacttcttccagttcatagtattgacttcagcccaaacggagataactccctgtgtgtccttgaggtattgagctgggctggacagctccccttgagccaactctaggagtacaatgtcaggggaaccccagtttgtgaaaaggacttagactggaggatatttgttatctggggatatgatgcggtggcggcggcgcctcaagataaggggctggggtttctgggtggggggccaacagagtggtgccagtaacagccccagatagaggagtacgcaggcccagcatgaggcaaccttgacccagaaggtggcccagctacccttgatgaaggtcttttccagttctgctccctcatagctgtgtaaccaaaggctctggttagagaatatgaagggccttagcttttagacctgttctacctcctcaccaaatataatggcagacccatgtgtgtctggaatggccttgaattgctctttccttaaaatagctagctcttcaggagagtatctaaggcccactccatcttacctgaaccagttggtaagggtaaccatgacatagagtgaggcaaggaagaagacgaagtggaaggcagaatagttgtaggaaagatgctggacttggactggaggagctggaggggtttcttggtcagctggcctcgcagccccacccctttgccctggagagaggaaatggctgctgggagcagagctgctgaaacacctcttcccctctcccccaactacctttgttaaggctcttgagggttcttatggcactccacagagatctaccacttcttatggttcctcacttggcactcacctttgtctgcctccactgtttcagggcagcagaaacacagtgagggcttctgcaaaacagaacgcaggttttg

SEQ ID NO: 1886057 - DNA, 4001 bp, Homo sapiens
gagagaggagtctgttcccagaactgtagcacaaaagctagaggctgagtaggaacatcttaaactaagtcctcagtcttatttccagttttcttcctgtagatcggggcttaggacaccctgtcacattttcttcactcctccaccaggaattcctaaaatccatgctcttggatcctggcaaatccaggaggctgggggatgtggcaagcttcagcaagactgcctgggaccaaccctgcagccttaatttcccaggcccgctcagcccagctggccagcaaaggcaggcagagcttccgtgtccacacatgagaatgacctgcagctgttctttgtccaggctgaggtccaggattcccattgcagctcctaggaaatctttaaaattaggtcggggatgagcctgtcagtagattaggtagggaacttttatgaagttgagggtgaaccatctggagggtgaactggctggtgtgattctagaactgggggtggtgcctagcagtgcatttgtgagaagacacagccaggcttggtatatgatgtggtgtgtgtgtatattcacaggcatcgtggagcatatacactttttttgtgtgtgttgaaatcttacagattacaaagtacttttttttttttctgagacagggtctctctctgtcgcccagcctggagtgcagtggtacaatcatagctcactgcagcctcgatctcccaagctcaagtgatcctcccgcctcagcctcccatgtagctgggactacaggtgtgtgacaccatgactggctattttattttatttttgtagagatggaatctcacaatattgcccaggctgatctcaaactcttgggctcaagcagtcctctcgcgtcagcctaccaaagtgctaggattacaggcatgagccaccacgcccagccagattacaaaatactttgacatcttttctctacagccctcaaaaggaggcagggcaagcacaattaaatcccattacaaatggggtgactgaagctccattcatggcttgcccagggtcacacaaagaatgaatagcagagccctgagcctgtgtgcttccctctgtgccaggctgctttacccaggcatgggtgcaccttgtgcatgggacatttctcctttgttgtgtcctgagtaccttaagccactcagatattgctcaggtggagtgaggggaaaatgttttcaggttgtattagtcaaaacaaaataccacacactgggcgactttaaaatcatacatttatccctcacagttctggaggcttggaagtccaagttcaaggtggcagctggacgggttcctggtgagggctctcttcctggtttgcagacagccaccttctcttcgcatcctcacttggtgggaaaagacagaggagagaaagagagagagagaaaaatgagatagagagagagagagaaatgagatagagagaaatgagagagagagagagagagagagagagagggagacacagagacaatgctctcttttcttaccagatctataatgagggccccaccccatgacctcatctaaccgtaattacctaccaaaggcccatctccacataccatcacattaggggttagggtttcaacataagcatttggagaggacataaacattctgtctacaacatgagtggagatccatctcttctttacctctggtaaggggaccacacgctgcagccagcgagacagtggcatgttcttgttacaactcgatctaactcccccagaagaggaggcagggaaggcggacaaaactgggagagggagagagtgttaggaagagagtagggtggccagaggcagcaaataaaatataaaatgcttaattctgaatctcagataaacaaccaataatgttttttagcataagtatgtcccaaactaagcttgggacatatttatgctacgaaattattcgttgtttatctaaaattcaaactagctgggcatcctgtcttttaatctggcaaccctaaaaggcaagggccaaaaatgccggaggcaagccaacggattccaggagggacaactgctggactttggactgatgatgctctttttatatatttaactttttaaaaaagcctcttttctttctttttaccagcttttcactagctttttaaaaattgtggtaaaacatacataacctaaaattcaccgtctaaaccatttttcagcatacagttcagtgggattaagtagattcacactgttgtgccgccatcactaccactcatttccagcacccttccatcaccccagcctgaaactctacccattgaacacgagctgcccaactccgccttgcttccccattcctggcgaccactgcttctgtctctgtgaattttgactattctaggcacttcacaaaactggactcatacgatatctgtagttttgcgtctggcttctctattgaattcttaaaggggggtgggaactaagcagatcacaagggagctgcccacagaggtaaagacaaggtcaggtaggctgagagacgcaggaaagcgggtcaaggcgtagggctggagggcaggggcgggccctgggcgtgggctgggggtcctgccccggggcgcaccccgggcgagggctgcccggaggagccgaggttggcggacagcttggccctgagcttgaggggaaggcagcgatgggacaaaggacggaggtctaggaagagggtctgcagagcagaaagcacgggtaggggcggcctgacgctcggaagacaacggatgggagccgtgtgcacgtcgggagctgggagtgagcgtgagttccgtgcccaggcccgcgactcggtccacgaggacagcgctccgggtcgacggggtcctggagccgcgctcggggagggcgcagcggagggcgagcggcggcgttaggacccggaggcgcgggcggactgtgggcggcggggctaggacccagcggctccggcagagcggaagcggcggcgggagcttccgggagggcggctcgcaggtgaggaggcgtccggggccgcgggaagtagggtcgtgggggcctggcggggcgaagtaggggacccggaggggctggagggaggcgggcgggaggcccgggaccgttcctgaccgagaagcctgcgccaagctggtgttccgcggccgctgcccggtgcccggctccactgcgaacgccgccgctgggccccgaccgcccgggaggcgtcttgggctcgccccggagcttcctccctggagccgcgccctgcacccggccttgcccggccctagcagggaagccaaggcttgtggggcgcagggacccgggctctgcggggtcccggttccacctccccactcctgcgtcttcccgccccggccgggttctgggaagcctcgcgcggctcttccgcagctgctgcccgcccggagctcctggtccctcgtaggggaccccacttctctgacaccgcgttgggttcccggggcctacagcgaggcctgtaactccgggagagaccctggagcggggtgtgggagaacggtctggaggaagggctccgagcacttcgaaagtataaaccgcggtcccaaagaggcgtgctgtgtctgcattttcctgggagtgcacggtttacattctcgaaagtagtgctgtcgactagaaatattgagcgatacacatgtacaagttttgtcacttaaaaagaatttgaaaaaacttcatagatgcaaaaaaaaaaaacccaccattattaaagaatacttaggtatttgtggaatgcattgaagagttaacaaaatggataggcaggaaatatcgcagacctagaatgaattacagctacccactgtggaactgaggagctagggtttctcataaaactccctgatagaagacgacttttgataaaattttttttccgccaacaaaatcccctgtcttctcaactagttactgtctgtccacta

SEQ ID NO: 1886058 - DNA, 4001 bp, Homo sapiens; identical to SEQ ID NO: 1886057

SEQ ID NO: 1886059 - DNA, 4001 bp, Homo sapiens; identical to SEQ ID NO: 1886057

SEQ ID NO: 1886060 - DNA, 4001 bp, Homo sapiens; identical to SEQ ID NO: 1886057

SEQ ID NO: 1886061 - DNA, 4001 bp, Homo sapiens
ttgggcaggggaagcaagaggccagagtcttcaacctcctgcagacattctgaagagttatgacggtccctttcctcctgttgccccatcctgacacatcttttcgcctctcctggcagtctgcattattccagtaagaatatgattttgaaaattgctgccctcaggttggatttgcctggagctccaactcctattgagttagcaggcaaacttttccctgcagagacaatgtcagggctgctccactgcccagggcatctcctggaggcccagccagggcgctagagaaaaccgagggcttgaggagattccctggggcccagcaggcccggggggcctgggctcaggaaagggagcaggagagggcatcccaatctggatactgcaggtgggggaaacaggcagcagaggctgccctatggcccatgtggggaatctatctgaagcatccttcctgcaatccagccttcctctcctctccccaggacaggcctggtagtgcccagcagctataaaaagttcccactttaagttgcactcaacagtttggcctttcaaggagcagactgggtttgccctggggactcccaagttctctgggccccagctctgggctaggagcccgtgggcacgagaagacagggctccttcctacctgaggtgaacaggactatggccttgaggcagctgtactcggctgagtcaacgtgcagcgccttgagcttctccacttgctcttggaagatccgtatgtggtccataaaggcgaccacccggtcggcggacatgggcgaagcatgcaggccggcggcggccaggagcggggcgacgtggaggggcatggagcactgcgccgcattcaacacaaacagctcgctccaggtgaggcgaagcagggccacctggtccgtgatctgcaggtcggggaagaaggggatgttccgggcccactcgacggcgctgaagagcatcctcgcggccagttcgcaaatgttctcgatacccatgatgttgttgggctgcatgcattggctgccgaagcgcgacgtgggatagggctccgcgcgcaacagcagggaaatatatccggacaggtacgagtggcagttgaggggatccccgttggtcagcgcgaactgcccgtgggtcggctgggtcggcggcatcctgcccctctgcaccgctgcggggaggaaaggagacactccacagttaatgaccagcctcagtccccaggttccccggcggggtctgccccagcccgacccccacctgacccaggccctgagcagcgcaagaaccaggcaggcctgccacagagctggagtcgccaggctcttggcaccattcctttcaaaccaccacccaggcgagctctgagggccagaggggcacacttgcctccgaggcccgctcggggctggtccgccgaggacccagaattggccaccttgcctcggggtccccggcgctgtgggcgggatgtagcattctgagggcatctttcttctttactgctaaacagctgatatttcttattgattggaggagagggagcgggaggggcgagtctggggggagggtgaggcgcttttgcaaaaggcacgagggtccaccccagacggcctgtggccactccggaacgactctcccacaaaccccgaagccccagccccagcccggcggggaacccccccagtgagagacaagcagagagcggaggtctggcgtctgtctaatcagtgtgctcggagaaagagacggagggagagggcggagagagagaggccggctaaagagagaggaagccgggagaggcagggagcaggcggccggcactagcggagcctgggcagggcctgtaagggccggggaaagccggcgaggctcgggcccaggctgttatctgactccggaccgggagagtcgctctcgcagaaacacaaagaaaccccggcgttggctcgccccaacccggagcccgcgccccgcgccgagcgcgccattggcaaagcacggctcgcggcgctcggcgaattttatatcacaaagacccaactcgcgcagagcgaaagcagccgcccagggcccctcgcccaccctttcctacttcctatcgcgctctcttcgtttcaaaaagtgaaaggaaaaaagaaagcagaggtatttttttttttagcaggatgttaatccacggagggtcacatgagcgctgcccgggcggcagcgttaatacggcgaagtgcataaaattgccatttgtaatttgaacctcctgtacaaaagtacaatctcaggtttttttttttttttttttgagagggtgggggctggggaaaggggtgagggggagggacatgttgaacatgcaggaaaaacaagggcagagagagagaagtaaactaggctttaaaacaacaacaacaaacaccccatcccttgcagaaaggcagactccagtgaactcacaatcaatgcaaaggaaatggaaacagcccaaagagagagtaaagaaggaaatcagtcggccaaagcatgcggatttggggtctgggttccaatgcagaactcgcttctagtataaaacccttttccgctgcaatacgaagagaagagcttggggcttcttgtccttacccagagcaggctagccaaacgtacccaggaccccgggacccaggacgagggaaggagaaatgagaggccgataccttcccgtctcatgcccactttgaggcactttttgaggcggcagtactggcactggttgcgatggtgctggtcgatgggacagttccggttggcgcggcacgtgtagctcaggttcctccgcacgctgcgcttgaagaagctcttgcagccctcgcacgtgaactggccgtagtgcttgccgctcgacttgtctccgcacaccacgcactcgatgtgttgctgctgctgctgcttgtcgctacccgggccgccagggccgccctggccaccggccgccgtctgggctggcgtgctggctgggcccccttggccgggcgtctgtggcgtgtgcggggcgccgggcggcgggccgggcacgggcggcgcctgcgaggcctggctgccctgtgagccgggcacctcgtcctgggggtcgcgccacgtgctgactaccattgccatatctatgggggctgcgtccggacttcctgctcccctggctgcgggcggcggcggggcggcggcggctccccgggtctcgggctccggcgcgccgccttttgtgtgtgcgagggtgcaagagggcgcgggagggcgccccgggtggctcgggggctggttggttgaggttggttagtttttccttttttgtttttgcttttgcaaagttttgtcgatggcttgtctggcccggtgtgtttgttttgtttgtttctctcggctcagctttgttggtttcggggggctttccgccgggaggggaggggaaggggacaggagagcgagtgggagcagaacgtggagaaagagggaggggagggagagctgaagtcgattgtctggcttcaagacagaagtaggaggcaaaaaaaaaaatctctccaaagatctcgctcgctctcactctctccctccctctctcgttcactctcgctcttagagctggtgtgcagccgaggagttggcggaggaggaggaggaggaggaggaggaagaggaggtggtggtgaaggaggaggtagaggaggaggagaggcgactgtccgggggccaagtccagggcagcccacagtcagccattcaggaaagccatcgaaatcaggaggactaggagatcggaggcgccgggtgcgggcgcgcccagggagccaggcaggccggggcggaggccggcggcccgcggagtggccggagcgctgcccgggtccgggggaatcagcatgaaagtggtccgcgtcgggcgctgcgcggcgtcgtcctggcgctgggccgccgccgccgccgcctgccccgggcgtccggcgcgc

SEQ ID NO: 1886062 - DNA, 4001 bp, Homo sapiens
gttagccatgatccaatggggagggaagggatcactcctttcctcaagtgatcaggcagttggatcacttgaggtcaggagttcaagaccagcctggccaacatggcaaaaaccctgcctctactaaaaatacaaaaattatccaggtgtggtggtggtgcatgcctgtaatcccagctactcaggaggctgaggcacgagaattgcttgagcccaggaggcaaagtttatgagatggtgccactgcactccagcctgtctagtctgggtgacacagcaagaccctgtctcaaaaaaaaaaaaaaaaaaaaaaaagttaacgaacttaggtacctacttaggagaaccaaaaatatatggccacacaaaaatttgtacatggctgttcatagcagcattattcataatagccaaaaagtagaaacaacccaaatgttcatcaacttaccaatgaacaaaaatggcatatccttacactggaagagtactgtcagaaaaagtaatgaaatactgataatataaacatggtacaacatagatgactcttaaaaacactataccaagttaaaggagccaaacccaaaggtcacatattgcctgattccatttacatgagatgtccagaatgggcaaatccatagagacagtttattagtatttccctggggctgggagcagaggggttgggactagggaaatgactgctaatggtacagagttctttctggggtaaggaagatgttctgaaagtagatggagatggttgcacaactttgtgaatacgctaaaaaccactgaattgttcaatttaaatgggtgaatactatgacatgtgaattatatctccatttttttaaaaaaagttaatgaaaagcaactttcttcttatttcatttttagggacaggcaggggagcccagcggcatgctggatatgaatgtatcttcagccttcaagttaccattggccagagggaagagtggccccaaactctgaagagcgctggcaaggctccccatcttcctctccctagcctccacaggaacatcacagtatggcttggcattttttttttttttttgagacggagtctcactctgtcacccaggctggagtgcagtggtgtgatctcagctcactgcaagctctgcctcccgggttcatgccattctcctgcctcagcctcccgagtaactgggactacaggcgcccgccaccacgcccagctaattttttgtatttttagtagagacggggtttcactgtgttagccaggatggtctcaatctcctgaccttgtgatctgcccgcctcagcctcccaaagtgctgggatgacaggcgtgagccacgcgcccagcctggcttggcatctttagggcagatctcagtatgccttgcattccaattcatctccagaatcctacacttcctccaaggtcagtcctcatgcgagtctccaacctcatccccacttcattttcctcattgtacttaccatcttttattcgtatcccaccaaattttggctttgttagctatactgcaaatagtagatgctcaataaactactagtgaatgaatgaacttggaaaaaaaagcttacacagaaatctgtactggatgttatttaaaagatgaaatttcatggttcaaatgtatttttctcccataaaaatattttctcttccatttaaatatatacctaatctttgagaaatcttgcacaaatggcattttattaaagaaaatctaatttacaaagctttgtaaattttaagaaaaacattcatagatcataaacaaaaatttcaatatgcaatattcaaatttacaagaaaataagcacaaacttttagacagtgcagttattgctgcactcctttaattccttatccagagcccaaaaaatgtagacaaaccctaaaaatgtagcagaagcatttccgcacactggtgtccagaatctagtttgtgcagaaatgtttccactagatttatagagtactcttcagaagaaagaggcgagggctcgtcatttggtcaccctttggacattttgcaactcttcaatgggtttccattgttggttgattgttataagctgaagagaaaaaaggaaaaaaaaaaaaccttttgttaaaaatttgactttcatttgcatgtccctctttcggatttgtccacactcccctttagaaaaagcatcaccattgtgtttgtacctacctctttccatatctaaaacatgcacaaaatagtaatgtgagctggtttctatcagtccatctttttacaaagcccttgggctcctaagtgttatgagatcagagggaaagatcaaacacatgtgccctactttcacttagcagtatccagatttttttttaagacagtcttgctgtgttgcccaggctggagtgcagtggcacaactgcaactcactgcagcctccgcctcccatgttcaagcaattttcgtgcctcagcctctccagtagctgggtttacaggtgcgttctactacacccagctaatttttgtatttttagtaaagatggaatttcaccatgttggccaagctggtctcgaactcctgacttcaagtgatccacccgcctcggcctcccaaagtgttggcattacaggtgtgagacaccgtgcctggccggtatccagatttttaagtttgccaggtattatgtgagccatagttccaaaagtgtatatgcttctcatgagtggatggacaatgctcctggcatagagtaggctcttaaaatttcctcattttaattactcgatgaaggcacaattgatctaagttacacaataagggtaaggtactaaatctattttgctcacaaaggtgctaaggtttgggcaaaatataaatcatttgtttttaatttaacaataccttttgaggtacagtagggtccacagtttcccaaggttctggatttttttttcgatcaaggctaaaattaaagaaagccaattaaacattaaaagatgtgaatttaaaccaacactgatactgggtttataaacatgttagggacaaaaccagtctcatactaaggcatgtgtctgctaatgatcaggaaccatcagtagcaactaaaattgattgaaaattctctaagggagtttcatggtgtggctcaaacattaaacatcagttcccctaaagggtaggaggtctgtattctcttgattgggctgcattggggaaggatcccacaaaccaaataaccatgggagtgaaactgccaagccaaggacatgcaataatgttcttatctcagtctgtgggaggggcaggttgaactctgcaggtggtgaactccagggctctaggctcctctgccagcggttagaggactgccctctccagccctgcaccagcctccaacagtttcaagtttatcttttcctcatattccaggatacatgtttttgttttttactttcttctacccaaagttgagattaggttcatcgtagacaactgaatctatcaattctaccacattagtaaaaatctaataagctaaaatttaaaattttaattaaaatgattgtttcatgatatatatctcccaaaaccactgaagaactttaaatttcaaaacttaaaaaaaaaaaaacaagctttacttcactgccagagagtggagaagggccaatgggtaaaagaataaacacaagaaataaactaatttgattaatatcatgggtttttttaaattttttcttttttttttctaattttcattttctgacccattggtagacaatatcataagagttttctgataaaagatgctttttaaccctgactcccagttcacaatttggcattctcatccatgggaaaaaaataggaaacttatacatttcataaactaaaagtcatccaaacactgccaaaaacgtttttataaattgagacctacttacatcacatcggttttccaaagagaatacacagcgaaag

SEQ ID NO: 1886063 - DNA, 4001 bp, Homo sapiens
aagccctgaagaaatgagagctatgcttttgattattaatattcttataatccaaaggatgatgcaggattttttaaatctttccacatgtatgtttttggaccagtccaaaaaagaattggaaacacacttatgccgcataaagacagagttatgaggaactataaaaacaaaataaaacctttggagaatcaactgcaaagacatgtattctgtttttattatagttctgagcccaacagtgtctcaccaggtgactacctgagatatccaacatcatatgtccaccagagggtggggaacactcagcccctttttatcaacaccttcactgtccagccagcccctaactggcccctttctgtctgaaggaggtggctgagtctctgggccggactctccgctcctcccagccgcctctgcctatccatcccatggccacctgagccgctctccacactcttgaacccagagccaagacacacaagtgctgagtctcatcagtaactgcaatctcatgaaagcactcttgggcctcagtcaccttgaagagcaggaaaggctctgaggggacattcattccacccatcatctcaggttccagtttgctttaaaggaaactgaggcatcgtaaaagttaaagacatgtggaggatcataccagaagttgagagcccagccaatctaagtgctgggactttcacagttgtcagggggcattacagctgtatattcaaagcctcaactgtatcttgcaatcacctggcacagctacagtgcccaggccacaccctggaccaattaaatcagaatctctgggaatgagatccaggcatcagtatcagatagccaagcttatatactcctgcattaaagtgagaaggcccccatgtgaacactaaatgccttaattcacattatttttgcacggttctcaaacctactcttgcccagccacatcctgaagattctgatgtaatttgccatgcatcaggacccttcaaaactcccaggtgactccaacaagcagctaaggctgagaaccactgtgttcatctaccaccttcatttaactttaaaactgtatttactctttaagtaaaatcataatatttaattgcagaaaagaaaagaaaaaagtacctgttcagctgagatgcaatccattgcatgttaatctgtattcacattccaggaaatagaagcatttgtagttacaggaatttttatctgtggttttacatctttacacacaggtgtatagacttgcttatgtgtcagtccgttactgcaatgtgccaattaagacatttattgagtttgatttggtataagtaattatgagttataaaagatcattctgaatcaacaacgtaataaataaccatctttaatgtaatagaatataagtttagttagagtcatgaaaccttctgtctcagcacatggttcctataaaccgaaaaagacaaaagcatttggtgagtagctgtcagctgaagaaaatgtctggaaagggactttccctcaaatcagacggaaattcctgctctccctttttttttttttaagcaagagtacctaaaattccaaaaagtcctatacccctttattcaccttataaagaagtctgtggaataagcccccttccctcaccaaccacccaaccgcttttctcaaggggagaccctaaacccagtcgcagagagcacattttgaataagcaaagtggagatctcactgacaaaacacaaaggctaccccagcatcctcaggcagggggcgcatacctgggccccctatgcccaaggtctcctcctggaatcccctgctgtcctcgggcacccagagcgggaacgccaggttttccccatcacgcaagtgcaggcggcgcgggggttccggaggctgtgagtgtcaatcacctacccttatcagttctccgtccaacacttacagtcacaaagctgggctggaaaagtgataaggggacgtgactggccggcaaagaagttttgatgaagctttgcaggacaagatgtaaatggacgtttgatttcccggcgagccctccccgccccctctctgcagttcctcctctgcctcaaattcaaagcccctctgtgcccttctactttgctctggcctctcgccccagtctctccctctgacacctggagagtcacttatgtttctgcacacagaaattcagacatgcagctctggacagctatggaaagtaataggttctttgcattaaaaaaaatcaattaaaaatagaaattaatttaaattttaaaattaataaataagccgaagttagtgaagtctttacccagtggctcttgcaggtctgaggccccagcccagcaggtcctgctcctccccagggctctgggctaagcccacacccacatgccattcataaagtccctacagcaagtctcctcctccaaccaggattggtcctccagagaggctggccccaggccaggacccatcagccacaaatctgcgagctggatgtgtccactgtgctgcgtggccttgatgggattaggccagggtggagtttggttccaaaggtaagcgcgttctcatgtatccaagctctctgccccatcatgtcagattcttccgtcttaactgtttgaccttccacgctgattcatacagagtctttgaaaaccaaaaactattgacatggcttcaaatgtggaggtcttaacatgattctgtgtatcggaatgaaaccaaagaaaacccgtccagatttcagaaatggatttctgtatagtattacactgtgggacgaccaccaactttggatcccatctgcttgccacttcctggttgtgtaaccctgagaaaattactgaatctctctgagccttgatttcctgatatactaaacagagatagtacctccttaactcccaggattgctgtgggaagtaagcgagaaaacggatggaaagagcttatgctcacccctaggtttaaatcccaggtcagccacctcctggttacatagcttcagcaggtcttataaactctccaaatctcagtgatttattcggcaaaatgtgggttataaaagctacctcaaagggttgttttgaggattaaaatattcaatataaggttaagggcttggtctttatagtaaaactggtctggatttaaatcctgaatttgtcatttgctggttcattgacagagaatcactcagcctctcagatccgtttccagatctgcaaaatggctgtgatcacccaaatttacagggttgtggtaaaagttcaattagatgagctataaaaagcccttagcatggagaatttaaaagatgtgtagctgatatcattaacaagaaaataccaccatggacagtgacattgacccagaagatgccaccaggtggcagttatttcagcaaatattctaaaaggtgcattacttgggtgggccacgtggatggatccccgagggtcaggtcagtcaagtcttgtgagtgagctccaactccatctgcatcctgtacagaaggcactgattactcacagggtaggcactaattactttggaaatcagctcctcaatcaggaccaagagcttatgcagctcctgccctctgtttcttgaaagtggagtgtcaagggaccaagtgtccagggcccaggaggacaaatggaatcaggaactctggcccatggagcggtcaagccaatcgcagatcatgaggaagtgagtgctttgatgttcaaagagtccagctgtgtgggagaagggaagaccctggtctgtagtctgtggtctgaactcctcagagtcctaaggatgacctcttggggaagctggagctgtacagtgacagtacatttagcccagcccccttgttttactgaagggaaatcagagccctggtagaaactcagccaaggtcccaaggaggcagctctctgtctctgaccctagaccagagcacgtttataatacag

SEQ ID NO: 1886064 - DNA, 4001 bp, Homo sapiens
gcctcccaagttcaatcgattctcagcctcctgagtagctgggactacaggcgtgcaccaccatgcctgacttattatatatatatataaatatatatatatataatatatttatatatattatatattataatatatattataatataatatataatatatattataatatataatatattatataatatataattataattatatttaatatatataaaaatatatttttatatatatttatatttatatatatattgtatttttagtagagactgggtgaaacccagctgttggtcaggctggtctcgaactcctgacctcaaatgatccgcccaccttggcctcccaaactgctgggattacaggtgtgagccaccatgcccggccccatacttgcttttcacaccctgtatgctcctggtctggaaccaatgagtgccactcaaagcccaagtgcagccatacagaaaatgctgtatttgtcctcctccttcctgaacagttggttcctttttcccttcaccatattaatcactacagagaacatgctggtcagtgacaaagtcacccaaagaaacaagaaaatcacatcaattcaaacaactgggcttcgtctgcaggtccttttgaaaccatgtttttctttgttcgtaataacttgctgtctcttttccatggccatttgccatttcagtcaaacaatgtaactggactcaaaaccaaagccggtgttctctagctgtgtgaaggagggactgattggggcagcatcttgaaacccgcctgacagagcacctgccaacacacacagatcgcttctcaatggagaaggattccagagacaggatccattatgtaactccagaagccaggactccaacattacaggaccctctcctgtgtcatcacctctctgatgttgctgttggtgaccctgtcactatgcattcacctgtaagcaatgtggcaatgacttctagacacagtaaggggaagctttcatgactacctgtttaaaccatttgcttacaccttttctcctccaaaacattgagaacagtagttctctttccagaaagcagtgctcacaaagtattttgtttgttgagagaactcagaatgaactcacacatacttcacaggcttttctataaggaagaggtcaaaaccaaccaaagaaggctgttatgtaccagaaaaaatgttttctatatcataatcccaaacttcctgccacagtcaattaggctatgatattactttccgattgttggcttattctaaatattaccaacctccactgacaagttaacctataacaggaaattcaagagttcagtcaacattatattaccttcatgagatatatttagtcctatatccaaggtttgtacaaagctcactgactcagtatccatgcagctggtatggaggatttgctttatacattctgttactgtgagtggaaagggaagtcatagaaaactgatctgtgctccttgaatttttgctgaaaccctgacatgaacttctaaattgaagatcaggataaaaatgaaccaaaatgaaacatgaatctagatgtgtttgaggctataatcctgacctttattctgtgtcacagacatgggttggaaccgttttttccaccaagcatattgaattccttaaggattcatcactgcacaaaactaagccacacagaataccccaggctcttatgaaacatcaacacttattgtttctataataagcaagtaatccagtaatactgatacaggtctcaaatgctataagaagaaatggaagataacatgaattgtaatgagtgctccatcttctaaatctacttgtgattttaacgtgttctttcctgttgccttataaactttattaggaacccccggagacagggcaagacactgtaggaatatgtttgatatatagttggattaaataacaacctaatatatcaaacatatcacacagaggcctgcagaaaaggcatccaggtttgactgagctcgagactaggcacagtattgaaggttacggctgcagggggtggtcacttttgcagcaactccgataactgtctttggagcacaagtctgcctgcagatgtggaaacggcgccattaacaatactgtcagcacatgcaccagcgctcactgacattctcatctccccaggtgaacagcagattcaacggtgcatgtctgggagatcccaggcaaaaagtgatgcttaagttttaagagcctgaggtggaaatgtaccagaatcatcatcaaagaccatgagccattctcctttaaaaacaggcaacctgagacggtggtgagcagagcattttagacaaaattactgtctctccccaaactcttcctgaaagcagtgtgaatactccccagaaggaacacacatccattttatactgaaggcatgtgtgtgtaccagggtagggttatagggatgtaataagcaattgtttactgacagtaccctgaggatttttttaaggttttgggagagaatggagagaagtgattcaactcaaaagactggctgattttggtgcagattgttgttattgttttttaattggggaaataaattcctttataaaggcaaggaagatatttcatgcaaaagttattgcaatgtgccctattaggcacaaaaactatggtttgggttgcaggttttccaaaacagtttcatagataatatccacctctggccatcaggcagagaaagacttcagaccattgtgaagcattctagaagtacccatcacccttcctaatacgatgggagtgagctaaggtaggaaccctcaaacaaaggattcacatcatcagttatgttaaccttgaccttggccgaaggactccttggctttcctgtaaaaaccctcaatgtaaacacaaaggctatatgatcctagagtactgtagggagtcctcacaggcctacttcagcagtcattaatttttaaggtgctgttattttttaaacctttgttttataaaatgttaaaacacagacccttccatcatcccaattccatcatcattcttgtacattccctacttattttcttcatctgtgagtttttagagttgtaatcataataagtacataattctgcatcctttctgttataccatgagcattttcttcgtgctacacagtcctagcaaccattatttttcatagctgcataatattatagctgcataatattccttcgaggagtagctctaagggcacacataaactacaaatggcctttgtgggactagacaagccttctctgacaatggggtgggaaacaggggctggtatggactgaaactgccacccagggccatacatagccctcccagctgagtgacagtggtcggaccctggcaaggtaattcgcctcttggtgcttctgattctaatggactttttccaaggatcagatgagtgactcccataaagtacccagaagactgcctggcacaggcttggcagctgaacaacgcgagcttcctggttttctttcttcaggggccagtggaataatttttatttcaggcatttcctagggagtaagtcccagacacacattttcagtgatgatggtgataataatggtgatatagttactatctaccaagtctcactgtatgtcaggcagtgttcttatactatcttatttaattattataacaataatcctatggggtaggaactttaataattttgttttcccatctggagtcgtgaagtgaacgaccagacacggggaaaccaggactcagacaagagctcagaaggaccctgcggaaggacaaagggaaagacattgaaacaggagctcttagaatatggtgaagtgttaatgttaaattagcaccaggctaattctccaggagaacgaatgtgtcaactgacatggcttcggcattagcggacagagccctccccaagaaaggccatcgtg

SEQ ID NO: 1886065 - DNA, 4001 bp, Homo sapiens
gcaaaggacaggatgtccgaggcacgtccgctgccatcacaaatcaccacagggatgggaggctcttcttgcaggtattccaagacgatggacaccacgttagggcccccctccaccacgagacccacgaggggcacgccctgccccagtcctgcaacacaaaccacattcgcccataccacctgtgccctgcactgtccacccagtcgttttaactcctgaagtatggggaagagtaaaaacattacgacttgggggatgttctatctggctggaaggaattcaggcatgtgataacaattttctttttcttttcttttcttttttcttttttgagacagaatcacactctgtcccccaagctggagtgcagtggcatgatcatggctcactgcagcctcaacctccctctcagctcaggcaatcctcccacctcagcctcctgagtagctgggactatgggcacatgccaccacacctggctaatttttggtagagatgaagtcttgccatgttgcccaggctggtctcaaacacctgggctcaagtgatccacctgccttggcctcccaaagtgctaggattacaggtgtaagccactgtgcccagcccagttatcattcttgcattctgtcacatattatggcctcattgggaaaaccaggacctcaaagtctgaaactttctgactcacatatggttaaactcctgaataacccacccacctgatgttggggctacttcaaggtgaccactgagaaatattggaaggtattcctggctggaaaaatatccccctggctgtcctagcctatggtctgaaattcccaccctgatggctgtccctgaagaataagatgatgaaaggggatctggaccagccagggaaattgcagttcaattcctggcttctcccttatgacactgggccaatcaccaaatcaccaagagccttagacagccatttgtaaaaggtgaacaatcacagtgcttcctttaactcctgcagttgtaaaaatatcagaatatgtgtttggctagcaaataattttgtaaacgttaagtagcatacaaatgaggtacactgttcttgttgacgtttctgtcttcagtggctggaataaagtgcagatcttggacgcagccacttggaccactagtggcccatcagttaatgacctgttcccagagtcctccctctgtctctatcagttaataggactcttcaagaacacagtgggtaccaactaacttttggtggcagaacctgcaggcatggctctgggaagcaagaggtggcaggaagattccaggaagttgggattctggaatgggaaggaaatgggagtggaggcacatttgcctacttcctaattttatgccacactggccatgacagatcacactctgagcctatttcaccagctgtccattagttgtgatgggaattagttgatcgatattaactaaaggcaagtggaagtatcgttggtctcagctctgaagggcttcagataaaaatctgccagcattggttaagagaagattggagaatttcaaatgagccatttcagagtttctaatttgcttccatgaggtgtttctacagtcagggactcttacatatgttgaataactctgctgtgtccaccagagtaattacagctaagttcatttcagcagacatgcattgagggtctgctttgtgcaaagccctgaccaggagatattggaaaaatgaactaagatatcctggactccgcctttgagatttccaacccaagcaaggattgatattttcaatctttaggaatatggtggccaaatcaccttcttttcgagcaacagagtagaacaggttcttcttggcttaggctggagtcctcgaagctccgtgctgtgggaagtgacaactgagcacccctttgctgtccctgccctgctcagagccctaggcgaaggatgacaaagggaagcccacaagtcacatggccaggtgaaatggggtgttgtaaaaacttacaagtccagaaaaattagagatgtgagaacaaaaaacattcagtcatcgaccaatgtattcttcgagatctgattctcggaaatctacaacttttcctagtaggccatccccattctacccactctgcagcatcacagtcccatacatgatgattcccaatgaccattcgccaggactagatggtctcccacaaaaatcttgccagtaatgggaaaaacaaactgctctttcagatcatttaacaattgtttgacgttaagaattactggagtataaacatgctccaagagattataccagttattgtaattctaaccagttgttatcattgtttcttctggttgaggtttgcgtctttctctctagttcgacctcagctttcgtctgacagtgacagctccccctcaggaccagcaaggatgatgccccttcaggagcagatggctcctgcagccctctccagatatgtccccacctggccatcttagtctacatgaaaggcccagcattacagagatatttaataatcacataatacttatcagcaaatagaaagaatcctactaaatctttgagaaattgttttcctgttaaaacacttaaaaaataacaactaattacagggaacaagaaccactgggcaacagggtgggcaaggccatcaccatggcgagcactgagggttatttcgtgctaacttgtgaacctggggcaaagcatccccatgtagcccagtgaatgtgatttggtaggtggctaaggtaagacatctaggtgagtcattttctgttgacctaacaagaagcaaggttaatcttctaatccccttgggcaatcaatctccttctcagccttgtttccactgtgatggcatcagcccaggaggactgcgtgcctttgccagcacttacttgtgttgatcttctgcagggagatgtgcttttccagcagccttcgcagcttcacctcggcgccatacttgcccagggtgccattgtcagccaggatgaagtgggtgtgggagttgttgagcacagagagcttacttagagggttggacatggtctggtacactcttgttacctgacaaagtgcacagcgcaaatcagacctgcaggacttggatgttaagaccaacaagggaagcaagcacaatacatatgtgtggagtgactgcactaaaacttattctcacatctctaccctgccttttgaaggttttatttttgccaattgttacattaaaatagaaagaaagttaattgttttagataatgacaacctagcaattgcacccctggcatttatcacagagaaatgaaaacctatgttaacctcaaatcctgcactggaatgtttatggctactttacttgtaacagccaaactgttcctcaacagacaaatggttaaagaaactggtgcctccatatcatgggatgtcagccagcagtaaaaaggaatgaagaccaatacatatggcaacctggacgcgtgttcagagaactatgtggagtgaaaaaaaagccaatccccaaaggttacattactgtatgattccatttacagaaccttcttgaaatgcggggtggtgcagattagttgtttccaggggttaaggaagaggtgggggtaggaaggagtgaggtatatgtatatgaaagggcaacaggagggatcctcgtgttgatggaaacattctgcaccttgaccttatcaatgacagtatccgggttgtgatcttgcattatggttttgcaagatgttaccattggaggaatgggaaaggctgcaagggagctctcttattattcttacaactgcatctgaatcaacggttacctcaaaatcaatcattaattttaaaaaactgccaacatttgcagagaaaacacttacatcctttccaaccaggtcttccttattctccacgatgccccatggagcaattcctatagcacaaacccggcctctggact

SEQ ID NO: 1886066 - DNA, 4001 bp, Homo sapiens
acatacagatgttgcagcttttttcctgaagtacaagccaactgttaaaatctttctctatgccagtactgaagtattttgagaacacacacgcatgttcagtagtctggtaccagaattaatttccactctgggttcgattctgcacacacatcaccctctggttgctttcctaacttggttctgattactggcctaactcaagtataaagaaatgaggggacactattattcatcttggcaagtgtgaggttcagtgactgcaatacacagacatcacaagttcaaatgactcacactttctttttttttccttagagtcagaaaaacttttaggctaagtacctcattttactacagcctttaaaaaggaaagaccgcaagaaaggaaccttccagataatgaatactgaacaggaagaagaaaaagaagctggtgctcccatgacagattatatccccagaggctgtaaaagaagacaataaacaaacaaaaaacaataaaaggaagaaatttgagtgtgaacagtccctacagtccctgcttgacaaccccctcaaggacttatcaataagatagtaagtgtcaaagtgcttgatacaagtgtagctcaaggccaggcacggtggctcacgcctctaatcccagcactttgggaggctgagatgagtggatcacttgaagtcgggagttcaagacgagcctggccaacgtggtgaaaccttgtctctcactaaaaatacaaacattagccaggggtggtggctcaggcctgtaatcccagctactcgggagcctgaggcaggagaaccacttggaccagggaggcagaagttgcagtgagctgagatcacgccactgcactccagcctgggtgacagagcgagactctgtctaaaacaaaacaaaacaaaacaaaacaaaacaaccacacaaatgtagctcaattaggataatttatggtcccagtcatgagcactccaccaggggtctgagggactgaagacatacctgggcaataacagaaagaacaagtcactctcggcacagcgactacacacaccctagagctgtggttccctgactttcacctgctgtgcctgccaagcacgctgtggccaacctggcttagtccaggcatggcagggccccatgcaatgacaaacaaagcaggagcttcctgttgggtttccacggcagcctcagggcccagctagccaggaagagtgtggccagcaggcactgccccgctcaggttgggacccagccagtgagctgaatgtttaggaaggccttcagaaaatcagtcagcgcctagagctttaaaaaaaaaacaaaaaaaacaatagccttgaaacctacctgaggtggggctgcaaaatggacactgcggactcatctgcttagcaactttaccacatcctgagttggcacgttttaaatacttcactgcactgcactgcctggtcctttatccagggaaattaggaacagatagaatcagaaaccacagagacacaggcaagaatggatgcaactagaaatctgttttggattatcagactggaactaggatttccagcttggtacatcagacgcctgagcacataaaacccctgctttttcctgagcgcaccagttttgccttctgtgtggagtaagagtttgacaggcgtcccaattccatgttcatgtgagagcagaacatctttaatgcaaaggcccaaagcttttcctgattaaagtagtgttagcctcagaggcccagggacacgattcttggaggaagctatggggctcaaggaggcctttcttccattcttagtcttcatggattgcgaggatttcctgtgtcagcggaacttagtctaggagttcttaccatgggaggacttcgggaggacttagcatgggaggactcctagtctgggagttcttggcatgggaggacttcttagcatgggaagacctcctatgctaagaacccctagcctaggtcccactgacggaggagatgctgacggccggcagaggagcccttctgccgagaggaagccaaggtgctgccgggaggagcaagggcccttcctgaggccttgtggaagcaaacaccactccccactgcctgagaattggagcgaagagagcatctcacgatgactccagggctacagagaatggagaccaacttgcactccctaaggaagtcccaaagaaacttccctttcaggaccctctgctcagggaaatgggtgaggcctccaacctgggtgaggtggactgggggacagggctctgaatccttggctctactgcaacaagagaaattattctctgaggtgttccatataccgggttcatttctaacacgtttcggttacaagagatctgggtcccccttgattagaggagctgtccggaggcaaccttttcttggtaccttcttcctgacatatcaagacttgctgagactagggagtcttccctttgggacaaagggaaattccattctcttgatcatgattttgacagctgggaagcccagcccggccttcctcctggctgtttggaacagcggaccgtgatgctgaggcgagaaggggcagtcctgcctctgcacctccactactcacctgagggacacagacaagatccgttctatctcgattttccgcttcaggacttctttcaccaggcccttgtctgggccctgtttgactttttctcgtccgattaagtacaagcactttggggtaaggagcaggtctcgctttacaccctgtaaggagaggagctttaagaagctggacaggccaggcatggtggctcacacctgtaatcccagtactttcggaggccgaggcgggtgaatcacctgaggtcaggagttcgagaccagcctgaccaacatggtgaaaccccgtctctactgaaaatacaaaaattagctgggtgtggtggtgggcgcctgcaatcccagctacttgggaggctgaggcaggagaatcgctttaacctgggaggtggaggttgcagtgagccgagattgcgccattgcactccagcctgggtgacagagcaagactccgtctcaaaaaaaggtggacagacatggtcaatgtgatgacaacaattcacacagtggactgctgttaccaggacagggggaagctgccttggacagtcaatcttcactactgttgagaggccattccattcatcacatgaccgggccccatgacagtgaaagagggcattgttcatgattattaggatgacatgtaaaaaatgatgacatttgactctttttgacttaaaaactggcaaactcatatggagtcacttcacatatcaggacagcaggtgtaaagggaaagtcaccaacacctgtggtgaacttagcaaggatgcactacagcatgtttctaaacagggggcagtgtctgcatatattttcttgggagttcataaaattttcattctaaaatactgatatattgtcatttgaatgataattctcaataatctaatagaaatctacttgggaatttgtgggtaaccactttataatgagtaccgctgcgagagctaagcacccctgtgtgcatccagggctgccgtcacagcagctggtgccatgcacaggttgcaaggaatggtttggttttagcaaaacatgcttccgttgtttatttcgttaaatttttttcttgacctccccgcccctggcaaaaagccaaaagctcttaacgggtccatgagcttctgaagcttcagatttttctattaggaccaagactttatcaaaaggtatctaaaggaggaggtgaaaaatcaactgttcctcctgtggctggaaaagccttacttatcagccactctgggaaaatggatgaggatactctgcaatattacttgatactctgaatcctttgattcaacgatttcactcctatcaatttcttctaaaaatattaggagacagatagatacacaaaga

SEQ ID NO: 1886067 - DNA, 4001 bp, Homo sapiens
gttcccagagagaggggtgggccatgatgggcaggtcttcctggcctgggtctccagccagccccccacttgagccttcaagccagtagcaactcagcaactccctggacagagcttccaggagcaacagaaatcctctctgccactgcctctgcagtggaactgcccttgctaccctcagaatatcaagggagcaaagaccctaagtgccatattgacacctccaacaagctgcagttgacacaaggaacaagtcagtccatcttccacgggtacaacacaccccttactgctcatcaccagacaaggaaccctggcttgggcccacagcacagaccctccatcctggggtgattacattaagtaactcctaacttacacctctctggggtggagcccccaggagacaaggaaagtggtggagcagcaagtcagctgatgtggagcccggagggcagggacatctatgtctctaggctccacttgctcttatgagacactttatcccagcacttaaggagtgctgaggtcagaccagccccatctcacgtgcaagattgcccagcacagatcaggtctaagagttctcttcctaaaaagggggacttgcttaaaaaagaagtctggccgcgtttgtgtagagcagttgtgctgtgctgaggattcacttttgagagagttctcctctgagacctgatctctgctgggcagtcttgcacatgagatggggctggtctgacctcagcaccccttagtctgcttgcctctcccaggaccccagccaggccacacctgcttagagggcacttctgggtgcccacaccatagcttctgtacaagcggaccgtggctgatcagtggagagctgcagcaaggtgacctctacagccacgtaccagcctgcacattacctctccatactgcagccctttatatggaaactttctacatcacttagctgtgtgtgtttacacaggtgggttttgttgtacttgccctaacagcatatgggaatgcagcacacaccccaacccacaccaactgccactgaagatgaagccatggtgggcacagaaccaaaaaccccacccctgctagcatctcacccttgaggtaatgctgtgcagaggaaaagggaccttcttataccctgagtgaccactgttgcttgggggggatcagagaaggcaccttcactggccagccacccaccccaaaccagaactacctccagtgcaacagcacacacagtcagcaggggccccctggcccacaccccagctgttttgcctccaccactaggtgaatgcccacagggaggcagggacttttgcatctgctagcattctgccacagctgccgcactttggtcccctcagtgcggtggactccaaacctcgaggagccagagaacaaagttgtggcccaatacaagttccccagagttaaagcacacagtccaagaattgggagctgcatgttggccccttaaaatcctccaaagacaaaacctgttggctgaatccaccttacaccacaatcaaatcctcaaggtcatcagatataataaaggaaaaataccctgtccaaaggtcagcagcctcaaagattgaaggtggataagcccataaagatgagaaaaagactgtgcaagaacactgaaaactcaaaaattcagcatgctttcttttctccaaatgactgcatcaactctccagcaagtgttcagaactgggctgaggctgagatgtctgaaatgatacaagcagagttcaggatatgggtaggaacaaagttccctgagtgaaagaggtatgttgtaatccaatacaaggaagctaaaaatcattgtaaaacattgcaggaactaacagacaaaatagcaagtataaagaagaaaataactgacctgacagagctgtaaatcacactagaagaattttcataatgcagtcacacggtgattgtgtgtgattgcattatgaaaattattgtagtatgtgtgggcacctgagagtgccctgtaagcagatgtggccaggctggggtcctgggagaggcaagcagactagggagggctgaggtcagaccagctccatctcatgtgcaagaccatccaacagaatagaccaagaagaggaaagaatcccagaacctggaaactggctttctgaaataaaacaggcaaacaagaatgggggaaaaaagaatgaaagggaatgaacaaaacatccgagaaatatgggattatataaacgactaaatctatgactgattaatgtacctgaaagagatgaggagaatggaaccaacttggaaaacacatttcagaatatcattcatgagaatgtccccaacctagccagacaggccaacactcaacttcaggaaatccagagaacctcagtaagatatgccatgagaagatcatccccaagacacataatcatcagattctctgcggtcaaaatgaaagaaaaagtgttaaaggcagctagggagaaaggcaacatcacctgcaaaggaaattccatcagacttagcagacctctcaactgaaactgtacaagccagaaaagatattcaacatcttaaagaaaagaaatttcaacccagaatttcatgtccagcaaaattaagcatcataagtgaaggagaaacaagatccttttcagacaagcaaatgctgagggaattcattatcaccagacctaccttacaagagctcctgaaggaagcactaaatatggaaagaaaagaccaccaccagccactacaaaaacacactgaagtacacagacaagtgatgctaaaaaccaaccacatacataagtctgcaaaaaagccagctgacagcatgacgagaggatcaaatccacacataccattactaaccttaaatggaaatgggctaaatgctccaattgaaagacacagggggcaagctggataaagaaccaagacccattggagtatgccatcttcaagaaacccatctcacatgcagtgccctacataggctcaaaataaaggaatggagaaaaatatttcaaggaaatggaaaatagaaaaaagcaggtgttgcactcctagtttctgacaaagcagactataccaataaagattaaaaagaaaaaaaaaaagacagagggctgggcgcggtggttcacgcctgtaatcccagcactttcggaggctgagacagatggatcacaaggtcaggagatcgagaccatcctggctaacacggtgaaaccccgtctctacgaaaaatacaaaaaattagctgggcatggtggcgggtgcctgtagtcccagctacttgggaggctgaggcaggagaatggtgtgaacctgggaagtggagcttgcagtgagccaagatcgtgccactgcactgcagcccaggcgagacagtgagactccgtctcaaaaaaaaaaaaaaaaaaaaaaaaaaaaagagagaaggagattacaaaggtggtcctgacctttgataaatctcattattgcttgataccaacctgggctatctttattgcccaaaccaataggataatgtgctgaggttagggagcttctcccctgcagagaatccctgatctcccaaaatttggttgagatctaaggttgattttgctatacaactccttttctgaagttttacttatttccaacaaggcaagttttcctgcttccgtgatgatggagagcaggcacctcctttcttgagtttcagcttgcttctgacagggaaggtgagtgtaagttttttccagcttctaagatggcagagaacaatcaccagcctgagacttatttccaggtaagtagctgaattagagttttgtcttaaaatttttccttaatgactaaaatttaagattactcaccagctgcttttaatttctcgttaccattagaacactcagtaatcatatgaattgtgcatttgtttgttttgcttaactctttttgtttgtttatgtttggggttttgt

SEQ ID NO: 1886068 - DNA, 4001 bp, Homo sapiens
tcccagagagaggggtgggccatgatgggcaggtcttcctggcctgggtctccagccagccccccacttgagccttcaagccagtagcaactcagcaactccctggacagagcttccaggagcaacagaaatcctctctgccactgcctctgcagtggaactgcccttgctaccctcagaatgtcaagggagcaaagaccctaagtgccatattgacacctccaacaagctgcagttgacacaaggaacaagtcagtccatcttccacgggtacaacacaccccttactgctcatcaacagacaaggaaccctggcttgggcccacagcacagaccctccatcctggggtgattacattaagtaactcctaacttacacctctctggggtgtagcccccaggagacaaggaaagtggtggagcagcaagtcagctgatgtggagcctggagggcagggacatctatgtctctaggctccacttgctcttatgagacactttatcccagcacttaaggagtgctgaggtcagaccagccccatctcacgtgcaagattgcccagcacagatcaggtctaagagttctcttcctaaaaagggggacttgcttaaaaaagaagtctggccgcgtttgtgtagagcagttgtgctgtgctgaggattcacttttgagagagttctcctctgagacctgatctctgctgggcagtcttgcacatgagatggggctggtctgacctcagcaccccttagtctgcttgcctctcccaggaccccagccaggccacacctgcttagagggcacttttgggtgcccacaccatagcttctgtacaagcagaccgtggctgatcagtggagagctgcagcaaggtgacctctacagccacgtaccagcctgcacattacctctccatactgcagccctttatatggaaacttcctacatcacttagctgtgtgtgtttacacaggtgggttttgttgtacttgccctaacagcatatgggaatgcagcacacaccccaacccacaccaactgccactgaagatgaagccatggtgggcacagaaccaaaaaccccacccctgctagcatctcacccttgaggtaatgctgtgcagaggaaaagggaccttcttataccctgagtgaccactgttgcttgggggggatcagagaaggcaccttcactggccagccacccaccccaaaccagaactacctccagtgcaacagcacacacagtcagcaggggccccctggcccacaccccagctgttttgcctccaccactaggtgaatgcccacagggaggcagggacttttgcatctgctagcattctgccacagctgccacactttggtcccctcagtgcggtggactccaaacctcgatgagccagagaacaaagttgtggcccaatacaagttccccagagttaaagcacacagtccaagaattgggagctgcatgttggccccttaaaatcctccaaagacaaaacctgttggctgaatccaccttacaccacaatcaaatcctcaaggtcatcagatataataaaggaaaaataccctgtccaaaggtcagcagcctcaaagattgaaggtggataagcccataaagatgagaaaaagactctgtgcaagaacactgaaaactcaaaaattcagcatgctttcttttctccaaatgactgcatcaactctccagcaagtgttcagaactgggctgaggctgagatgtctgaaatgatacaagcagagttcaggatatgggtaggaacaaagttccctgagtgaaagaagtatgttgtaatccaatacaaggaagctaaaaatcattgtaaaacattgcaggaactaacagacaaaatagcaagtataaagaagaaaataactgacctgacagagctgtaaatcacactagaagaattttcataatgcagtcacacggtgattgtgtgtgattgcattatgaaaattattgtagtatgtgtgggcacctgagagtgccctgtaagcagatgtggccaggctggggtcctgggagaggcaagcagactagggagggctgaggtcagaccagctccatctcatgtgcaagaccatccaacagaatagaccaagaagaggaaagaatcccagaatctggaaactggctttctgaaataaaacaggcaaacaagaatgggggaaaaaagaatgaaagggaatgaacaaaacatccgagaaatatgggattatataaacgactaaatctatgactgattaatgtacctgaaagagatgaggagaatggaaccaacttggaaaacacatttcagaatatcattcatgagaatgtccccaacctagccagacaggccaacactcaacttcaggaaatccagagaacctcagtaagatatgccatgagaagatcatccccaagacacataatcatcagattctctgcggtcaaaatgaaagaaaaagtgttaaaggcagctagggagaaaggcaacatcacctgcaaagggaattccatcagacttagcagacctctcaactgaaactgtacaagccagaaaagatattcaacatcttaaagaaaagaaatttcaacccggaatttcatgtccagcaaaattaagcatcataagtgaaggagaaacaagatccttttcaggcaagcaaatgctgagggaattcattatcaccagacctaccttacaagagctcctgaaggaagcactaaatatggaaagaaaagaccaccaccagccactacaaaaacacactgaagtacacagacaagtgatgctaaaaaccaaccacatacataagtctgcaaaaaagccagctgacagcatgacgagaggatcaaatccacacataccattactaaccttaaatggaaatgggctaaatgctccaattgaaagacacagggggcaagctggataaagaaccaagacccattggagtatgccgtcttcaagaaacccatctcacatgcagtgccctacataggctcaaaataaaggaatggagaaaaatatttcaaggaaatggaaaatagaaaaaagcaggtgttgcactcctagtttctgacaaagcagactataccaataaagattaaaaaaaaaaaaaaaaagacagagggctgggcgcggtggttcacgcctgtaatcccagcactttcggaggctgagacagatggatcacaaggtcaggagatcgagaccatcctggctaacacggtgaaaccccgtctctacgaaaaatacaaaaaattagctgggcatggtggcgggtgcctgtagtcccagctacttgggaggctgaggcaggagaatggtgtgaacctgggaagtggagcttgcagtgagccaagatcgtgccactgcactgcagcccaggcaagacagtgagactccgtctcaaaaaaaaaaaaaaaaaaaaaaaaaaaaaaaaaaaaaaaaaaaaaaaagagagagaaggagattacaaaggtggtcctgacctttgataaatctcattattgcttgataccaacctgggctatctttattgcccaaaccaataggataatgtgctgaggttagggagcttctcccctgcagagaatccctgatctcccaaaatttggttgagatctaaggttgattttgctatacaactccttttctgaagttttacttatttccaacaaggcaagttttcctgcttccgtgatgatggagagcaggcacctcctttcttgagtttcagcttgcttctgacagggaaggtgagtgtaagttttttccagcttctaagatggcagagaacaatcaccagcctgagacttatttccaggtaagtagctgaattagagttttgtcttaaaatttttccttaatgactaaaatttaagattactcaccagctgcttttaatttctcgttaccattagaacactcagtaatcatatgaattgtgcatttgtttgttttgcttaactctttttgtt

SEQ ID NO: 1886069 - DNA, 4001 bp, Homo sapiens
tcccagagagaggggtgggccatgatgggcaggtcttcctggcctgggtctccagccagccccccacttgagccttcaagccagtagcaactcagcaactccctggacagagcttccaggagcaacagaaatcctctctgccactgcctctgcagtggaactgcccttgctaccctcagaatatcaagggagcaaagaccctaagtgccatattgacacctccaacaagctgcagttgacacaaggaacaagtcagtccatcttccacgggtacaacacaccccttactgctcatcaccagacaaggaaccctggcttgggcccacagcacagaccctccatcctggggtgattacattaagtaactcctaacttacacctctctggggtggagcccccaggagacaaggaaagtggtggagcagcaagtcagctgatgtggagcccggagggcagggacatctatgactctaggctccacttgctcttatgagacactttatcccagcacttaaggagtgctgaggtcagaccagccccatctcacgtgcaagattgcccagcacagatcaggtctaagagttctcttcctaaaaagggggacttgcttaaaaaagaagtctggccgcgtttgtgtagagcagttgtgctgtgctgaggattcacttttgagagagttctcctctgagacctgatctctgctgggcagtcttgcacatgagatggggctggtctgacctcagcaccccttagtctgcttgcctctcccaggaccccagccaggccacacctgcttagagggcacttctgggtgcccacaccatagcttctgtacaagcggaccgtggctgatcagtggagagctgcagcaaggtgacctctacagccacgtaccagcctgcacattacctctccatactgcagccctttatatggaaactttctacatcacttagctgtgtgtgtttacacaggtgggttttgttgtacttgccctaacagcatatgggaatgcagcacacaccccaacccacaccaactgccactgaagatgaagccatggtgggcacagaaccaaaaaccccacccctgctagcatctcacccttgaggtaatgctgtgcagaggaaaagggaccttcttataccctgagtgaccactgttgcttgggggggatcagagaaggcaccttcactggccagccacccaccccaaaccagaactacctccagtgcaacagcacacacagtcagcaggggccccctggcccacaccccagctgttttgcctccaccactaggtgaatgcccacagggaggcagggacttttgcatctgctagcattctgccacagctgccgcactttggtcccctcagtgcggtggactccaaacctcgaggagccagagaacaaagttgtggcccaatacaagttccccagagttaaagcacacagtccaagaattgggagctgcatgttggccccttaaaatcctccaaagacaaaacctgttggctgaatccaccttacaccacaatcaaatcctcaaggtcatcagatataataaaggaaaaataccctgtccaaaggtcagcagcctcaaagattgaaggtggataagcccataaagatgagaaaaagactctgtgcaagaacactgaaaactcaaaaattcagcatgctttcttttctccaaatgactgcatcaactctccagcaagtgttcagaactgggctgaggctgagatgtctgaaatgatacaagcagagttcaggatatgggtaggaacaaagttccctgagtgaaagaggtatgttgtaatccaatacaaggaagctaaaaatcattgtaaaacattgcaggaactaacagacaaaatagcaagtataaagaagaaaataactgacctgacagagctgtaaatcacactagaagaattttcataatgcagtcacacggtgattgtgtgtgattgcattatgaaaattattgtagtatgtgtgggcacctgagagtgccctgtaagcagatgtggccaggctggggtcctgggagaggcaagcagactagggagggctgaggtcagaccagctccatctcatgtgcaagaccatccaacagaatagaccaagaagaggaaagaatcccagaacctggaaactggctttctgaaataaaacaggcaaacaagaatgggggaaaaaagaatgaaagggaatgaacaaaacatctgagaaatatgggattatataaacgactaaatctatgactgattaatgtacctgaaagagatgaggagaatggaaccaacttggaaaacacatttcagaatatcattcatgagaatgtccccaacctagccagacaggccaacactcaacttcaggaaatccagagaacctcagtaagatatgccatgagaagatcatccccaagacacataatcatcagattctctgcggtcaaaatgaaagaaaaagtgttaaaggcagctagggagaaaggcaacatcacctgcaaaggaaattccatcagacttagcagacctctcaactgaaactgtacaagccagaaaagatattcaacatcttaaagaaaagaaatttcaacccagaatttcatgtccagcaaaattaagcatcataagtgaaggagaaacaagatccttttcagacaagcaaatgctgagggaattcattatcaccagacctaccttacaagagctcctgaaggaagcactaaatatggaaagaaaagaccaccaccagccactacaaaaacacactgaagtacacagacaagtgatgctaaaaaccaaccacatacataagtctgcaaaaaagccagctgacagcatgacgagaggatcaaatccacacataccattactaaccttaaatggaaatgggctaaatgctccaattgaaagacacagggggcaagctggataaagaaccaagacccattggagtatgccatcttcaagaaacccatctcacatgcagtgccctacataggctcaaaataaaggaatggagaaaaatatttcaaggaaatggaaaatagaaaaaagcaggtgttgcactcctagtttctgacaaagcagactataccaataaagattaaaaagaaaaaaaaaaagacagagggctgggcgcggtggttcatgcctgtaatcccagcactttcggaggctgagacagatggatcacaaggtcaggagatcgagaccatcctggctaacacggtgaaaccccgtctctacgaaaaatacaaaaaattagctgggcatggtggcgggtgcctgtagtcccagctacttgggaggctgaggcaggagaatggtgtgaacctgggaagtggagcttgcagtgagccaagatcgtgccactgcactgcagcccaggcgagacagtgagactccgtctcaaaaaaaaaaaaaaaaaaaaaaaaaaaaagagagaaggagattacaaaggtggtcctgacctttgataaatctcattattgcttgataccaacctgggctatctttattgcccaaaccaataggataatgtgctgaggttagggagcttctcccctgcagagaatccctgatctcccaaaatttggttgagatctaaggttgattttgctatacaactccttttctgaagttttacttatttccaacaaggcaagttttcctgcttccgtgatgatggagagcaggcacctcctttcttgagtttcagcttgcttctgacagggaaggtgagtgtaagttttttccagcttctaagatggcagagaacaatcaccagcctgagacttatttccaggtaagtagctgaattagagttttgtcttaaaatttttccttaatgactaaaatttaagattactcaccagctgcttttaatttctcgttaccattagaacactcagtaatcatatgaattgtgcatttgtttgttttgcttaactctttttgtttgtttatgtttggggttttgt

SEQ ID NO: 1886070 - DNA, 4001 bp, Homo sapiens; identical to SEQ ID NO: 1886067

SEQ ID NO: 1886071 - DNA, 4001 bp, Homo sapiens; identical to SEQ ID NO: 1886068

SEQ ID NO: 1886072 - DNA, 4001 bp, Homo sapiens; identical to SEQ ID NO: 1886069

SEQ ID NO: 1886073 - DNA, 4001 bp, Homo sapiens; identical to SEQ ID NO: 1886067

SEQ ID NO: 1886074 - DNA, 4001 bp, Homo sapiens; identical to SEQ ID NO: 1886068

SEQ ID NO: 1886075 - DNA, 4001 bp, Homo sapiens; identical to SEQ ID NO: 1886069

SEQ ID NO: 1886076 - DNA, 4001 bp, Homo sapiens
aggctggagtacactgaggccatcatagctcactgcagcctcaacctcctgggctcaagcgatcctcccacctcagtctcttaagtagctgggactacagctacacgtgccaccgactgatttataaaacttttttgtagagacagggtctcactatgttgcccaggctgttctcaaactcctgggctcaagcaatcctcctgcctgggcctcccaaagtcctgtgattacaggcatgagccactgtgcccggcctccaacccacttctaatagttcttttacttcatgtatatatatatacatatatatatatgtatatatatatatacacacacacacacacacgtatactatatacatatatacacatatacatatatatacacatatgtactatacatatatatatactacatgtatataataaagataatacatactggataaaaattcaaacaacacaaaatgaatgagagaaaagacaaaaggcctctgtacttggggtaggcactagggatgggggaagggtcaggtctgtgagccatacacattaattagtaggtaataaaaaacagttgttttaccttttgaagctgctgattcaacatatatttggctgtgctttggctgtaacatcctttaatccctccctttcagaatctaccccaatttcctgttgccaccttacctccctgatttaagggtgcaattcttcaagtgccttctttccaattctagaatttttaatttagcctttggtgcggcagcagttttgttttctaattactttctttgcaaacaagcatgagttgggcccaacagtgatacaggctttcatgggctagcctggcaacctggagctattcacaaggtgcttccttgggaaaatgctttctatgttttacatgaacaactggggagatgcttacttgtaaagtgggggtgggggtgagcctcttcatctgtgctaccaaaaaagagctcgcccctagtcctgcttgccctgttactagggtaggctttgcaaccagcgactctgggaccccagtgcctgggttctaatcctggctctgaggcttactagatctgtgacctccagaaaggtattcaacctaaatgagctaacagtatgtataaagtgtttacaattatgcctggcatatcgcatgtgctgtataacaagagagttgggtgaggttagtccagtaagacatttgacaaattcttagagccgcaatctcccttgaggccagtgaaagctacggctcctcttcccagaaaagtgcacacatgtaaccttctgcacagtttcaagtacccctgacccttgaagcccacccacacactgcaagagtccaggacccctgatttcaaccgtctggtcttctctacagtgatgtgaaggtctcagggataaaactctgaggcaattcttaaaagtattatgttcccatgcatggaactattgagcaggtgcctctctctccccgttttaggttccgcttttggcagaaacgttacacctttcctccccaaagcccttttgacccttgccagtttttctcttgcttcaggccaaatcctcccagggtcaccttaagacaatctctgtgtgcagctccacacacttttagggaattattctgatccttatcaaaagctctgatggttcagcccatcttcagtgcttacagaagtcagaccagagcatggactagagtctgcagggtctccatcaacagcaacacaggggtgggtcaccctcaacaagcaggtagacagcacaaactggaaaaagccaaacatcagagaagtcaccccagggtgactttcccagcgtcacccaatgagctcccagcaaagctgagaacctgtcatttcagtacttttgagtccatcagtgctttacagacattaccatgcatgtgaattaaaatgcagatccagtaggtttgctgaggagcccagggctctgcatctctaactcactaccaggtaacgctgatgctggtccatggaccacatatggagtggcaaggttcacatcaaggttaatgaactgtaccaccctggttaaagcctcttcatccacactgcaggtggctatttaaatgtcctttcttcaggaaagcctcccctccccctctccatgattactggcttctatgcctctgtactttttcctttgaagcatttataaccactgtaattaaagagtatttgtgtaattattagtttaatgcctgcctcccagggagactgcaagcttcacgaggacgggacctgcacagtgtctagcacatcacagactgccaatgaatgaggagctgctgtggtctggaacaggctgggccagcatcctggagcaggcaggtaatgtttacacatgtggcaaacagcctctggtggtatcaaggccaaaaaggacatttcttagttttaaaattcccactagtttcaaatatatgccaactaaactttaacctgaaaagcaatctttgcccataaaaagatctcctacatctttatcaagtgcaaaatagccctaatctcacaacagccactctgcttgaggaacagttaggcccctaaaataagcattcccttataggcctcactgggtgaaccctcttcaggcacactccctgaccagcctccctctgctgcagacccacaatttcttctttagtttttctgctgctgtccttccaaggaaccccaaagtgctgaacgcccaactctttggcatgggcagagacatatgaccacatcatcgttcctgagaggcaaagtttgaagttagacagcctgggtttagataccagctctgtgcccttggacaagttatttaactcctctgccaaatgaggataagaatgcaagagccagcacctgcaagaactaagagagacaaatacacaaagcacgtagcataattctggcctaagacacatgattattattattctccctatattctgagtccaattcaaaacctattgttttaggccgggtgcagtggctcacgcctgtaatcccagcactttgggaggccgaggcgggcagatcacgaggtgaagagatcgagaccatcctggccaacctggtgaaaccccgtctctactaaaaatataaaaattaggctgggtgtagtggcgcatgcctgtagtcccagctactcaggaggctgaggcaggagaatcgcttgaagccaggaggcgaaggttgcagtgagctgagatcgcgccactgcactccagcctggtgaaagagtgagactccgtctcaaaaaaagaaaaaaaaaatctaaaaaaacctattgttttgcacaagtctccacccaggggctccaccccattcaggatcctctcttcccagccccctcctgcctcacctgtctggagcttgtttgaagcaatgactcacagcacaactctgcagctcccatcaatcacctccctgtccctgcctgtgtcattcatgggttccttctggcaggcaaatcttccctaatgtccagtacattcattcagcaagtatctactgagggcccactatagatcagaccctattctaggcacaggggctccgcaatgaacaaagcaaagacgtctaccctcacaaacgttctagtacatttaacccacagatggaaatcagttcaggtcttgggtccttacactccttctcttctctcctgaccaatcctaaataaatcacatacaagtcaaagtatgaagaaagcattccagatcaaaaaatggtgtgatgtgagaaaatcccgatgactaaactgcttctctgattgttggactttgaagaagtcagtgttgaaacagcctgaatcacccagttccccctagttgtctcactggccagtcacatcctccagcacagtttctgtaacacatctggaaaatgaggcgctccatttacccaactcgtgtgcggcgtgagcgcacggtttcatgctctcatagctacattctttgaagtgagc

SEQ ID NO: 1886077 - DNA, 4001 bp, Homo sapiens
tcacaaccaaaagtctttatcaaaaatattatttgcccaccttcctctgctgacttaatctttacaaagatactaactccctaacggccaaatactagttggaaagtgcatattttaaacggcaaggatacagagagagagagagaaagagagagaaatcgatcaacactcttttcttgctgcttgatgctattccccacatcaaagggaaaaaaagtagaaggctcaacaaacatacctaagaacactggttctataaaaaacttaattggctgcaagattgtcaacagttaataggtaaattgttatatcatggtatgcattttaactcataatggtatttaggttaaaatatcttaaataacagaatagttcatatcctcttcaaaaataattaactgcaatgttgactactttgaccccagttttaggaattgaaaggtattcagcaaatactattaacacaactaattagaattcagtctctacacaaaaagggaggtgagattattactttcgttcttgtggcaggtatactttaagttggaagctacagttaaacgttcatcaagttctataaacacttaattctctgttagcattttatacgcaatatacatttgagcatataattttaaaatcaggtacaaattatttgatgaacacttctctgtaacagaaaaagcaatttcagctagttttcacaaactatccaaataattcttcccaaagaacctagattatgagaacctacaaaactcactatcatagtgaattctaactttcacagactgtattcagaaacttgacatacgcccaagcaaatatcacctgcactgaagggtcaacatctcctttgaagtaacacactttactaaaataactctaaactatggctaactacaggacagcctactccaactgctaaaaaaactctagtatggcaggaaaaaaactttgtccacagtagataaatccactgaatttcttgcttgcttaaattcagtatgtgtaatttaattattaagacatcgttgctgaacgatgaagttttaaccagaaatccttgtaaaggtttccaaacaaggcaaatcagtgagcataaacccaaccgtttaccgggactcagaattcccgaaatggaggcctagggaagataattgcgaagatttggccaagtgaccccactatcagccaagctgtcagtcaccctgcattagcaagtgctattaacacttaaaagagtagttttctgacatttacttacatagtaatggttgcctaacgctgtattctgccactttttaatgttattgaacgtgaaattttctattttctactaaactatcccactgtgaatcttaaatatatagtacttagcacatactgacctgagtttttctccatcaaatgccaactgagaaaatgtacggtaccaagtaaaaacgcatggggacaagttcaaataatcttccctttgtttatgagccatgtattaaacagctgttaacacccgtcaagaggttttcactaaaataaaagtatccgcctctgacactcaaacgttttggtcaattgtaacaaaattaaacccactcatctcttcacactgaacgggggcggggagaagggacgctaaggtatgaaaagggaaaatgtaaaactgggcaaattttctattttaagatttccaaatagtgcctttaaaatttataaatagtgcctgcactttttctccaaaagcagccgcttctcaaagaggataaaccattcccggaaatgggcaaaagaacacactacagggtgcggaccgctacaggcaagggcggacaagactgccaggagcaaacgcgtccaggaaagaagccgcccaccggaaagtcccaactagagttcccttccttttcccctcggcgtgcggctccctgggtagggggaggagaaagcgcccgacatgcgcacgcggccagacgtcactgcgttctctccccgccccccaggggagccgtctgacgtcacggggcggaggctgccgaaggcgccgccgttgaccctgctgttaccaggcgcgcgcacagccaatcagcaccccgcgccggcgccggccggcctttgaactcggcacggcaacttcctgctgtttggcgagtacacagtgcaatgcagtatgtctgtcagcgctgcggcacaaaggaacagccattttgtgactgagctggacctgcatcaagatgccaggggctcaaagagctgctgcgtgccctatcgaactgccttttatgtcggcaccagagttccccagaagagcagagagggggaaggaaataggctttggtatttcagatttctattagtttagattcagtcttctccaaaatcccgttttttaatgtattatcagcgtcataaaatggctgccagttaaactgcctgttctagtacacaagtaactgcattatgccatttctaatcatccccagccttttagaatatctggtaaagcgcccctgaaaattgtaggatttacccgcacctcaggttataaaaataaatctggctcaaaggcagacgatttggagataaatttaataaactcgttcaattcttaagataaattgctaacgtggtgccgtggagaacacactgaactctttgtgtgcacacagtcccgttttcattctttgatgttacttaagttatccccaagctgcaaattattcagataaaaagtatggtatacttctcgtatgtccatcattagaactttgttttaaatacttagaaattttacaaatatcaatcaaatgtttttaaaatcgcgttttttaaagtttttaattttcaaaaatcgtgataaagtataacagactttagcattaacttcaaattaaaatacaaacttatataaccactattaactactgcactatttccaaaaacagggtattaccagatttacctaaacttgcactcattctttccagatactaaagtaattctcagaccaaagtttacttgacctgcaaactcatttcctcttctgtggctcaggctgcaaaggtgattttcgtagtattccctaaacactatactttgggcaataaaaactctgatggcagaaggaaccaagtactaattacagggacagttcagctcagtagaagtaatattaatctaccacattaaaacaccactaacattctacagctgcacattttaaaaggaagtgatgtcataattatgtacatgtattaagatatgaaatttagggtaactaatttaaaagtaactatcttcttttcaaagagtcttaaatatttttggacatccatcaggtatatgattcaaagtatacttgacaaaccaatttaaaagtacagtcagtacatgcttcatgtacagctgtaacctccactaccagtaagcaaatgcctgacaacttccaggtagttttccaggtgagagtaaaaatactgaaagaataccaacactgctcaattttttagaattagaaagcacagtctgatcaatgatgttaaccacaaaccttgcataagagagccaaaacccatgtgagacctatgcaaatgatacactcaagggagcaacaattttagtgctgaatctttaataatttgccaaatatatctggaggttctcatttcttcaaattgtcattactttccagaaaaaaacagcttaggatgagtaaaaaacttttctgtcctcaatttaatctagtaatttacatgggcaattcaattaagacagcactacaaactgggtgacaactcaatgcaaaaaaatttggtaacttattttctaaagcaaggctcaatatgctttcagtcaaataaaataaatagaattcagcatattagtaacacatcatgttcaaaactttcaaattcactagcctaatagaaaagtgtattatttataaaaattagaaaagtaaaaattgggaaggaaaaccacataatgaatcacatccttgttaa

SEQ ID NO: 1886078 - DNA, 4001 bp, Homo sapiens
gaataatgagtgagagtccctgctctcatagtgagcttctagcagggcagtggtttgggtggtggctttagggccagggttgctcatgtaagctagatcagtcagtcctgcaagctgacatccagagagatgctgtggttctctccaaactctctttgtggtgcattttagcttgtctattacttctcaaagtttatttgccaggtccctaagaaaggcctgtttttcctagaaatacctagggtgctaagctctcctattaaccaaggggttaccttagttagcattgttctctaatggtaccctcaggtccttgtctctaaaacaattcaaggttgaaggactaaccctcctctcaacagtggcaaagaggcacggggctattttttttttttttttgtaaaagaaattaaagaccacacatccatctctgtttcttgatagattaaaggatggggaaaggaggtctcagttttctacagctgggaatttcagagccagcacctcactgcggggtagactgaagagggtcataaagagcctctgggggaggaacacctctcccttacatcttccacaaaagaacttcttggtttttctcagacccatggcagagatgtgccctgtctcaggctgacagctggaaggggctgggactcagagctaggtattgccagtcttctccatgactccccccactcctcctgctcctgagcgtctccatcaccaggcaagcccccacccccattctggatagagagaataaacccaaggatggaagggtgggctaaagaggaagtgctcacaattaaaaagagaaagaattaaaagcagcaccaatagggaagggtaattatccttcagttgctgcagaaatacaattagggccatgctctctgagccgccaggatattgtggcttttgctaattaaggagcggatgtgtcctgccagcgcaattagaggctggcccaggcagcaggggctttgcctctcctccaccagtgccacactgcaagggaaattaaccagggagcccagcgctgtgcctgcagggaggggatgactgggccaggattccaccagcctcctgtccacaaccatttccccttttcctcttcctgctctgcttaccccagcaccaccactctgacttcattctgaagcttccagggctcagtaaccacaggaagaattttcaccatgggccatgcccataggcttccagaagggggaggcaccagtagagaggggtcaccatttccaagctctagtttctcttctgcatggtggttcaatgctttatgattagtaaaggaaagagagaaatgagccacttgcctgcttctctttaaaaataattcccctgtttgtaaaggaaatatgctcaaattgggtgcagtggctcacgtctataatcccagcactttgagaggctgaggcaggaggatcacttgagcccaggagttcaagaccagcctgggcaatatactgagaccttgtctttactaaaaaaaaaaaaaaaaaaaaaaaaattagctgtagtctcagctactagggaggctgaggtggaagaatcacttgaacactcgagtctggaaggttgaagctggagtgagctgtgattgcaccactgcactacagcctgggtgacagagcaagaccctgtctcaccaaaacaaaacaaaacaactgtgtccattatagaaagtagaacactccagaaaaaagggaaaagtaagaaaaaataatttctccagggaattctgaggtgaggagaggtgttcaaagatgaacttagtaataggagcggagacaacgcctcgcctgaaggagcatccagaccgctgacctggtggcgaggggaggggggtggtcctcgaacgccttgcagaactggcctggatacagagtggaccggctggccccatctggaagactagtgattttgttgttgtcttactgcgctcaacaacaaatcccagtctacctaatggtgccagccatcgcagcggggtgcaggaaatgggggcagcccccctttttggctatccttccacgtgttcttttttgtatcttttgtgtttcctagaaaacatctcaggtcaccaccctaaacacccatcggcagactcttccagaaacatggacaaactatggtgtgagcagggaagtggggcagggtctctgttttcagggagcagtggactgcttccataccactacctgaagggcagggggagaaaaaccctccttaattactaattcccccaacaatcactttggggcacctataatggaggcaccttgtgactccacatcctggggctcagggcctcattgtctgtggcccgacagccacagtgtatgcgggcaccgagaggtatgcactggagaccgaggttcccggatgttcagtgtacctggcagcaggggggacacacctgacctcggagcttgtctggtgcctgctccacagctgagggagtggacttgtgtgtatggaatttcttggtcccagtacctgcctctgtgctgctacatccagaggtgtggccaagggaaaaaagcccagtgcttggggaccatcccccactgtggcaggaatacaattagaattagtgatcagaaaaagcatttcccagccttttatttatttatttatttatttatttatttatttatttatttatttttgagacagagtctcactctgtcccaggctggagtgcagtggtacagtcctgactcactgcaacctccacctcctgggttcaagtgattcttgtgcctcagcctcccgactagctgggattacaggtgaatgccaccaactcagctaattttttgtatttttggtagagagaggggtttgctatgttggtcaggctggtctcgaactcgtgacgtcaggggatctgcccacctcggtctcccaaagtgctgggagtataggcatcagccaccttgcctggcctcccagcctttctgcctgggatccctctgcctggggggtaccttgccctaaggtgagcaccaagttacagtgatgacactttcagtggagattaattttcaagcaacaaatccaaatgccctccctattcctaagtatattcccaccctcctccatccatacagcagaggagactaaagcatattacaaactaaagttgggggttggggatcgtactcatttagggaatgctaaaaatgcaaccattagctgagctcattctacctcttccggttgctagctgtgtgacctctggcaaggcacttgacctctctgaaccaagtcagcccttcacttctacccagagactttggctgcctctgcttctgctgctccctatcctacaaactggctctcttcttctgcacttccagtcttaaatttccctttactcctaaccctgcctgaagccagtgggaagccagtcctattagaaatctcatttacacttcagaagtctgcaaattggtgtcactcagcaggtatctgtccttcacagcgggagagaagcccagattgggcaggaagggcagagctggagaacaggagaggaggggagttgagtctctcctgggcagccctcagcctctggggctggtttggagatggaacggggagagattgtgtctcagtgaaacaagcatctcggggggggatgtggggtgcattcctgatttgagggatggatatgacagcctttgttaagtggtggggggagtcctggctctgaagtcaaacatgtgccagtttcaatcttggctccactgcttacgagctgtgtgactttgagtcagtcacttaacatctctgagtctcagattcctcaactgtgaaacagaattgatcacatctaccttgctaggttattacgataagtaggcaagtgaagtgtcataatataaaatagcatgggtatatacccaatattggtctcttctgccttttctttcatagttttcatggttgtcctcttcaccagccttgtg

SEQ ID NO: 1886079 - DNA, 4001 bp, Homo sapiens
gcaaccaacagcacaacaaatgggatagtacctcacatctcaatactcacgttgaatgtaaatggcctaaatgctccactcaaaagatacagaattgcagaatgggtaagaattcactaaccaagcgtctgctgacttcaagagactcacctaactcataaggactcacataaacttaaggtaaaggggtagaaaaagacattccatgcaaatggaaaccaaaagcgaataggagtagctattcttatatcagacaaagcaaacttcaaagcaacagcgattgaaaaagacaaagagggacattatataatgatgaaagatgttgtacaacaggaaaatatcacaatcctaaacatatatgcacctaacactggagctcccaaatttataaaacaactactgctacctaagaaataagagagacagggccgggcgcggtggctcacgcctgtaatcccagcactttgggaggctgaggcaggcagatcacgaggtcaggagatcaagaccattctggctaacacggtgaaaccccgtctctactaaaaaatacaaaaaattagccaggcatggtggtgggcgcttgtagtcccagctactcgggaggctgaggcaggagaatggtgtgaacctgggaggcagagcttgcagtgagctgagattgtgccactgcactgcagcctgggcgacagagcaagactctgtcttaaaaaaaaaaaaagaaaagaaaaagaaatgagaaagacagtagcacagtaatagtgggggacttcagtactccactgacagcactaggcaggtcatcaagacagaaagtcaacaaggaaaccatgtatttaaactatatcctagaacaaagggacttaacagatatttctacccaacagccacagaatatacattctattaatcagttgtatggaaatttatccaatgtagaccatatgataggccacaaaacaagtctcaataaatttaagaaaactgaaattatatcatgtactctgtcagaccacagtggaataaaattggatatcaactccaaaaggaattttcaaaaccatgcaaatacatggaaattaaataacctgctcctgaatgatcattgggtcaacaatgaaatcaagatggaaatttaaatattctttgaactgaacaataacagtgacacagcctatcaaaatctctgggatacagcaaagaggaaagttgttcatagtcttaaatgccttcatcaaaaagtctgaaagagcacaaatagacaatctaagatcacacctcaatgaactagagaaacaagaacaaaccaaacccaaacccagcagaagaaaagaaataaccaagatcagagcagaactaaatgaaatagaaaccaaaaaataaatacaacagataaatgaaacaaaaagctgattctttgaaaagataaataaaatcaacagaccattctattgattgggaagatccaaataagctcaattataaaacgggagatattacaactgacaccacagaaatacaaaagatcattcaagggtactatgaacacctttacgttcataaactagaaaacctagaggagatggataaatttctgaaaagatacaaccctcctagcttaaatcaggaagaattaggaagcctgaacagaccaataacaagcagtgagatttaatgataatttaaaaattatcaacaacaacaaaaaaaaatccaggaccagacagtttcacagctgaattctatcaggcattcaaagaagaattggtaccaattctactgacactattccacgagatagagaaagagggaatcctccctaaatcattctatgaagccagtatcaccctaataccaaaaccaggaaagaacataaaaaaaaaagaaaactacagacaaatatccctgatgaagagaccaatatccctgatatttagtagacttgagcatctgattttggtatccatctggggatagtgaaaccatccccaaacggataccaaggataactgtatatgtaatatacacacacacatttatacacacatatatatgtatgcatatgtatatacattcatttatttattttctagctctgttcattgaagaggcatgaaaagaatgcccaactcagtagcaaagagcatctctagtgctcactgatttggggtttgaaatatcttttctcagtaaaagaaacaagagcttcttggggaaatggctaattcctgatctgaatgtctaaataaagccctaaatttatttaattaattccagatatgaatgtctcaaaatagctctaaatttagaccatgtaccttccaaatagaggatatgaaaggttaattaatttatgtcttcctatccattatgctaaagaacaatcttagttcctaaatggaccaagtatctttttttacacttttacaaatcttctaaatgatcctagtggaccaccccaccaccccatgcaaacttaactatgataaaagttaggaattctgggagagatacttttacatttcatatttaccaatgacagacttgagcttagagttgctgaaatttgttccagttttaagaagaaaatattgatcttacagcattattcacaaaaccatttacctgacagatacttctcatattcctaggttgggagatacaatgccttcacttcttcttttcatgctagaaaaattatctgccagaaggaatccaaataaaactttctgttgttaaaaactacactctctaagcagctcctgtttttgcactgtgaggaaaatatagctctcagagcttgacttctctgacattctataattatttatagtatgaattaaaatctagtgcttttttctttacaggggctattttatttgttgtacttctgtgaaggcagggaatgagacaggggtgtagctcaaattaccaaagcatccccttgatttggcattctttcttgaaggataggttcagaattgatttacctcagggtgaaatacaagcctcttgtattctgtgaattaaaatggtccttgtgcctccctcagtactgctgattttcagtcaaatgtcagcattcttgttaagaatagtgctagattcatatatatctgttgctatggctgcatatttagttacatggtatgcagacattagccaaaagctgaagtggctacttacctatcacacagtgaagttcactgccaataatcttccacataaggtcagtaactttaattggatgtgactctagcccatatttgattggaaggtaaaagaagtatgctgccattactcaacttttttttttatttttaatattctctttttccatttgttagattgagacatactatcagtgaacagtaataatagtcgaccatttattgaatgtctactttagtgtgtggtgtcaggattattatagtaatcatttctaacctcccaaagctctgaaaagaaatatatattatcctgacttttaagatgaagaaactgagattcagagaagttaaataacctccccagggtttatacacatggtgtgtgctggagccagaattcaagtataggtacttttgattttagagtttctatttctgttctttgacttatcaaagtaagcttcatgtaaatagctgaggcttaaactgaagttcaccagtgcctttttgagtggcatttgttgttgtattctttgaaaaattttaacgtttacataaatttttagatgaaattgtattctgggaatatagtcttttgtgaatagaactttcttatttaaattgaggctggacatggtgggctcacatctgtaattccagcactttgggaggctgaggcaggaggatcacttgagcccaggagttcaagaacagtgtgggcaacatagcaagaccctgtcttttacaaataaataaataagtaaaaattaaattgactaatacggtaagaacgcaaaagcataagatttgaagattaaaggcttaggtttc

SEQ ID NO: 1886080 - DNA, 4001 bp, Homo sapiens
gtgctttgtaaaagacactgttaagagaatgaaaagacaaaacatagaatggtagaacatatttgcaaatacatatttgataaagaactgttatccaaaatatgcaaagaactcttaaaactcaataataagacaaaaaccccaattaaaaatagtcaaaagatctgaagagacatctcaccaaaggagatacacagatggcaaacaaacatgaaaagatgttcaacatcacatatctttaggtagttgcaaactaaaacaacaatgagagaacacttcagacctaccagaatggcaaaagtccaaaattcctacaatgctcaatgctggtcaggaggtggaacaacagaaactctcattcattgttggtgggaatacaaaatagtacaactactttggaaaacagtgtggcagttttttttacaaagctaaacataatcttaccatatgatccagtaattgtgctccttggtatttatacacctgaaaaaaacttatcttcacacaaaaacctgttcatggatgtttatagtcgctttattcataatcgccaaaacatggaagcaactgagatgttcttcaataggtgcatggacaaatgaaatgtggtagaaccagacaataaaattttattctacactaaaaaaaaaatgagctacatatacatgacaagatacagagaaacctaaatgcatattaatacatgaaagaagccaatctgaaaagctatatactgcatgaaaagctatatactgtatgatttcaactacattacattctggtaaaagcaaaactatgtacacagtgaaaagatcagttgctaagggttaaaggagagggagggatgaataagtaaaacacagaggattttttaaggcagtgaaattattctgtataatactataacggttgacaaatgtcattacacatttgtcaaaacccatattatgtacaacaccaagagtgaaccctcacgtaaactatggactttgggtgataataatgtgtcaatgtaggttcatcagttgtaacaaatgtaccactctattataagacattgacggtaggggaggctgtgaatgtgtggaggtagagggtatatgggaaatctctgcattttctgctccatttttgctgtgaacctaaaactgttctaaaacataaagtctattttttgtaaaagttttctaaggtcaacatagttaatactgaaaaacagcattttaaaaatcagttataaaataacttgtaagagttaaggacattcttcctaattgtccaataacgttgaaacacttcaaccatgaatatatttaaaataaaaatgataaatcgctttggcgacacccagtagaataagcttgactggctaaataaagtgaccatcttttcatcttcattttcaaatgcctctgcatcatgacattattggtagggattggagcaagaaagagagaaggaggaaaagaaactagtgtgataaaaaaagaaatgctacagaaatggggtttatagatgaaataaaagaaaaaaaaggtcatagggaagatgtgttaacgaaagagaaagagtgaattccaagaaagttggcactattaatgaacatgccgtcgacattttcccaattaataaatggttccactaacctcttctagtgaaagtatgtttctctaaaaaaataagagtcatgagaaaaaaataaactagtcatagtaactgagaaaatactatgcaatttttttgtatagaaatggtggtttaatgaacaatgttccaaaacacttttcaaaaattatatatataattagatgttctgtagttgtcaggcactgaggacacctaaaaaaaaaagggaaggaaagggaaggaaaatgcaccatatttattcagtgtcagtgaatatgacacttcaaagatgtaatactgttatctgaaatactgttatcttcgcagcctatttcaggtaacagtattgcttctttgaggtgtcatactgaagaccaatcaaataccaaaacaacgaggtgaacagtgagctattcgggtagagctgaacatagaatggctggaatgcctacacatgaattcagtgcttttgactttgtgtgtgcgtacatggtagcaaaagtagcagaaaactacaagttaggggttcaagtaaatctgaaaaacatttggatagtgtaacttaattcttgtgggggttaccagctttttgataaaaggtcaccaatagtcatcatccagcccaattccacaacctatttttaatcctgcccattgtcattcttctggagaactggcacctataattatcctcacctgtagaaaccctctcatcttgagatttttggcattaccactcttttcctacttttgccgaattcttgttaatcctcttactccttcagatttcctatgatgtaaaatatgtaactgtgggtgtgcctcaagacttgggggaaagaacactaaatatacagaagacattttctaatccttttctgtcactacactcatttcttcacataatttcagctatcatttttatggtaactaatataaagcaacatctgaaggatgagacctctcaatcaaggaatctaatccagaactttattccacaagatatctttaaattaaaattttactgtatcttgacagtgtatttaaaataaaactctttattgtaattttgcttcactttccatcttccatttttacttctcttttcctggatatttttgtaaaggttttatttctccttttcctctcttaagctttgaataatgacaatccaatttatcctcaaacccttcccttaatgcttatgtacagtaacttaaatgtgatcctgctagatgatttaatatttgattttatattgtcctcccattgtttaatgtatatactattccctttttaactgacctgcaaacttttcataaatgtagtatcttttgtatcatatataactcaaaactataagcatttgtaaaattcttagttattgactgaggagctgaaaaaaaaccactaatgataaaaatcaattttctttttcctgtcatctgttgttacagaattatatatgcaaagccaatgtatatatctcaaatttctattgaaatcactgtgaatcttagatttacttgccttgtcctccaagtgcaattctaaaaagcgtagataagccacaggtgcaaatgcatcagctgaatgtatgactacttctgatgaatccctgaaatacaaaaattttacaatacatttatatgctacaaaaattgtgacaaatcattcctcctactgactagaagagactaaacattcttgttttatatttatctccattggtatacaacatgtagtgattaataaatatttttaataacccagtatttaattgggaaaaggttcaagtatactaagcttttaagaaaaaacaatgaggctttctatcttcataagaacataagagttcaactttcaggttcactcaaagctctctgaacaattttaagacttaaattcctgttcaatttcattttcacgtatttgcttggtataggctaagcattaaacattagtgctttatcttcattattcttttcattttcaagaggtaattcattcaatgtttcacacaaaatctcaattatccttcacaaaagcagtactggtgatgattttaagctctagatgaactcttcacactgcagtatcattgctattaaaattgattgtctgacatagtaatgaccacattcaggtaaaatggtatgaactgcatgctggcaccatatggatacatgtaaattaactcaacttttatcaaagataccctgtaaagcacatttgaataactaagattatgtgtaaagttctaataatgaattattttttattgtttattaagagagtaataatgttttgaatttcaactgaaaatttaaaaatagaaattcctcatatcactttagtgccttgggaagtacttc

SEQ ID NO: 1886081 - DNA, 4001 bp, Homo sapiens
tttcttttttcctgtctggagttcagacttgacttctaattggtagggttttgtcctcacttctttggaccctctcctacaagaccctctcctacaagaccacccaccagtctgggtcctaattgtttgtgactctttttcagggtgggagcagggtggttatggaatgaccatgggtcccggcatgtaataagtggccatgacctctaggtctctgggctaacaccaagtgtccctgtttagccagttctcattgagatgtattgaatgaataaataagctcatgaaaaaaaaatcaacctagacgatattcttctcatcaagaataataatacaaaatcaacctagacaatattcttctcatcaagaataaaaataaaataaacctagacaatattcttctcatcaaacaaaaacaaacaaacaaacaaaaaactcataattatccccagtgttctctgcttcaaaataatgtggaggtactcaggaggctgaggtgggaggattccctcaggccaggagtttgagaccagcctgggcaacacagcaagaccccatctttaaaaaatttttttttaattatccaggtgtggtggtatgtgcctatagtcccagctacttgagaggctggtgtgggagggtgatttgaacccaggagtttgaggctgcagtgaggtataatctcaccactgcactccagcctggatgacagagcaagaccttgtctctaaaacacacacacacacacacacacaaacacacataatagtgaggaggacttgaatgctatgagaagtggggagcttaggaggagagaggaggccaatttgctatgatgaaaagttcagtgccctaagttgaaatcctaattccagtcgcttactgtgtggccctgggcacatcacttaacctctctgagtcatatttttctcatttttgaaaaggggataataattcttgcctcgctgagatggttgtgaggattaaataaaatgaggggtgtgaaggtgagagcacagtctccagcacacaggagaaatgaggaagcagagagaatactggatggatgaatgacctagcaaacagtacaatatagaatctgtttaaagaagtgagcttaaaaaatcctcatgtgatgtatgttatcttttggggctataaatggcattaggcaatgaggtatgtcaacgaacaattatgactcaccgtggaaataccaagtctttaaaacccaagaaccaattaccaaatccagcatcaaagacacactgaagcacttaaaaaaaaaaaaaagtcccatagtctaggatgtgacaaaattgctatgtgtgggatagagcccttgattgctaagaagattctgaacattcacagtggaaaatttttctcttccataggatcaagtgagaatcctatattctatatgtggattaggaccaattaggatgtcagggtctaaatgattttggtgatcttggccctaaggattgcaggcaaaacccaaaagccacagtctctgagctcctccactaagggtgtgcccaaccccctcctgctccccctccgaagcactggagctcctcgctgccggtgccaacctcctcttccaggaaggagctccccactctcccatgccctactctggagctctgggtctgatgtgtgcctgggcctccatgctcctggcctgaggtgctgtccagatgctgagagttgggagactttgctgtctccaggaatattaatagcatgggagctgtccagcctagggagccagcactgagaacaggagctgggcagggagggcctcggagctcagagcccaggacccagagcttctgagccaagctaggatagccaggaggggccctggaggccatgcctaaatgaacaaaggaggaaactgaggcccagggaggacaaagcttggctcagggacagagagcccatctgcagcagagagactcaggccttctgaccctaagtccagtgcttctctcgtgtcctcacattgtgggcttcccccagcaacatacagtattatatgctcaccaatgaggtatgcatctgctgacacatacctaccactgaccatgacactcactgatacagccccctcacaaggtgcttttatcatctcatttaattcttaccactaccctgtgattagctatggtagtaccgtcatcatcatcgtattttccagctacagaaactgaggcacagagaggtggggtgccagacctggggactggagtcagttgtgagagcagtgcgccagggaaggttgcctagaagaggggacatctgagctggatagagaagcaggtgttcactaggagggtaaaggaagggaaagacattgtagggagagggaccagcaggaacaaagcctagatttatgaggttggggagagagagacagaggcagagagagaagagcactgcaggagcatgaggcatgcagaggatgatagagggtacggtggagacagtgggcagggtggggctggggactgtcttacacagccatccctaaaggctctctctgagggaacatgtgcattagtcccggggcagcagaccctctggaccccagcctgaaaaattttggagcagagcttccctaagtgttttccctgacggtgttcccaaggggtgtggcttaaccttccaactacgcagtaacctctcctaagtaagaatagtatctggccagacgcagtgactcatgtctgtaatcccagcactttgggaggctgaggcaggcagatcacttgagaccaggagttcaagaccagcctggccaacatggcgaaaccccctctctactaaaaatacaaaaattagctgggtgtggtggtgcacttctgtaagcccagctactcgggaggccgaggcatgagaattgcttgaacccaggaggtggaagttgcagtgagctgatatcacgccactgtactccagcatgggtgacagaaagagactatctctcaaaaaaaaaaaaaaaaagtgatatctctccttctggggtctccctcctccatcccagcctagctgtgggctgaagccccatgtcatcaggataaaggctcaaggcctggctaccaaaacacaaaaacacaagcactcaggccctggcctttagggccacttacttgcctcctatgtgtctggctggggagagggaagaaggatgactgaaggacaggctggggagaggagtcatatcgctgtgccaaacttgcctcaagatggggtacaagaagacaaggaagggaatttatgttcattgaacatttattaggcagttgattccattctaaacacttttttttttttttttttgagacagagtctctgtcacccaggctggagtgcagtggcgcaatctcggctcactgtaagctccacctccagggttcatgctattctcctgcctcagcctcctgagtagctgggactacaggcacccgccaccacgcccggctatttttttttgtatttttagtagagacagagtttcaccgtgttagccaggatggtctcaatctcctgaccttgtgatccagccacctcagcctcccaaagtgctgggattacaggcatgagccaccacaccctggctgtaaacactttaatttaaatatgctattttatttaatcctctcaaaaaccttcactttataattgaggaaaccaaaactcagagaggtaagataagtcacctgaggtgtttcccctgaggccatacttcccactagtatccgcctatggggatactaaggccgacctggaagttgagattgacagcactgctctgaaggaaatctttagctcaaggacccccttaatccactggccttgttgacctttcttagaactgcactgccgtgtaagatactttgatgtaaccttccttccttccctctctccatcacatgggtcagacctgcattgacgtctgacgcctctctcagccttgccagctccctctccag

SEQ ID NO: 1886082 - DNA, 4001 bp, Homo sapiens
gatctgcccgccttggcctcccaaactgctgggattacaagcgtgagccactgtgcccagccacagaaacttttaaaatgaaaattcggcttcttggttgaagagaagcaaagggaggttgtggaatggaacagtgagctctggcttcctggggtttgggtgtccccaccccaggactcgtctgagctgaggctggtgctgcttggacactggatggggtttaaaggtacgcagggagggggtccaccgcagggtgtgattgcagatctcctgcctctggcttctgtagagcttgtttaaatttccaaagcactttcctatgaagtgcctcatttgcaaggtaggcagggaaggacattcccctccttttatagatgccggagcagagctcagaggctaacctggctcctttgcggcagagccaggattcaagcccagctcctttggagtctagctctcttcctactgcagcatctggcacagcgtctgtgaaattccaccattaacaagggatgtcttaggtttaagcactgccgcctcttaaaaagtaatacatacatgtaccgggggacaaggttagcacatttggtctttaacacctgattgtcaatacatttgccatttttttcccctgtataccacataagagaaatagatgtttggtgtgtgtatgtgtgagggggcgggtgtggggtgagaagacgctgagacgctgaaatagtcacactgaaggtgggcgctgattatctgccacatccaggcatatgtcctatctttttaagattttttgaaataattatagatgcccaggaaattgccaaagtcctgcagagaggtccctgtgcccttccccagcttcccttacagcagcatcctatataatgataacattaaaaccacaaagctgacgttggtgtaatactaccaactagaccagacctcattcagattttattagtttttgcaagtatgcatctgtgcggggcagtgggggataggtctatgcagttttatcacagctagagattcacgtacctgccaccacacacgtgctctcttacctctgaggtgggtgctacccccattctaaagaggaaggagtgaaggcgggtgagaggagggagcctgcccgagggcataggaggagcaggcatggcgcccacgccctgctctacagcccacactctttccctgctctcagttggattttcagtgcgggatgcatggccaacctctacccagcaaggccctcttaccccggccgagtttcctcggaactcgcggagccgccgtcggagctgcaggcagtgctccaggtcctggcccaggtcaccaacattcatcttcacctcctgtgaaggccgagggtggggagggagcgctgtgagcaccagcccaggctcctggcacctgctgctggggatccctcctgtcaagggagggctcctccccccatctctcagcccccacccagctggggctacaccttctcctggatccaggcctctgcaaggtccactctctgcaggaactccaggaagttccgcctgtcctccagctcctggcccctgagggccattgcctgcctcaggtcctcccagtgcttccgcaggccctgcagccgctgggagacctctccggctcgagggtgactctgtgccaggagagcctctcccttctggagggagagaggggacacaggacatcttgcctgctgcacttcctcctaagactgacattgcccctgggccacactttggggcaggcatggggctgagggcccggttgttaccttggcaacagaggtcatgacctcctcatgggcctggacttcagcctcaaaggcctggtgtttcagcaggggcttcagcttatctctcaggtccccaggagggaccggctccttcagctgctgggcccacgcctggatccagtcctcagcctggtgggggtgggacatgaatgctgcaatgttctgcagcctcaggccccagacgccacaggcctagcccccagccattcccaggaggctggcctcaggggtggggcgggcagcacctggtaaatgagccctgaaggttccagctccggaaggttgctgcaggaggcagccgggcagggccttgggtgggctctcgttttggaggtgtggcccctactcctggggccctgggctgctctgctcccttccccacctctcttgccctggcgctgctagagctcgggacactggtgaggtctccacacaaaggggcttagatcccatgttctgggctccagcacagcctctgggaaagccatccacccccgaacctgtttccgcctcacagtgttgcggtgtgaaggcggctgaaaactgtcgagtgtggttccagtggaaggccctgggctgggggtgccctctgacctgggttgcggcctgggtgaagctggccatcagcagggaggcatgcagggcgtgtccccggctctccgccagctccttcactctcatccggcgctgcagcaggatgggaagccggtcccgcacccgggggcgccggagcgtcttcagccgctcacgcagggctgcctcctgtggggcaggggcacagctgctgctctcccaccctgggctggggcagggcctggcctgcagggctcacagtcctttctttgagggccccggagccctttcctcagccccacatggctgaggggtatctgatcctcccagccacaagccagaccagtctgctccccaaggaccacacggtgtggacagagccaaatgccccgtgtgggtctctgcagtgtggcccatctccccctgggccctcttcttgagccacacatacaacttgctcagtcaaccccaaccaggaccccagccttgcaggctcatcagcactgcctccaggaacacaccaagcgccccgtgacccccttcaggactctctcccaaccaccacactctgaccacgcccaggcctcctgactccattaccttcttgtcctgggcagtcagaaccttcaggaagacctcgtgcttgcgaatcaactgctctacctcttccaccgagctccccaaggcactggttttcagggagacctggatccacagaaaagtcagaggccaccaagccttccagccagccagcccctccagctgcagtctgtgcccatgggcactctgggtatggcagggccttaggagtgcccactgagcttggcatggagctgtgaggagtgggagtccaggttgggaggctgcgatacctcaacctctgcaccatgtggggagcatgaccagcctctggccaacttcctcggggctcagtctgggataggggctggggatgtcagtggacgctcaggggcctcagcacttcaccatggccacctggaaggacttgtgcacagctgcctcatattagagaaaaagccagagaggcaggaggaaagggactgagcagagaggagaatagaaaggaggagcaggaggctgagcggagtgtgagggcgggaggggacctgcctcctgggccgcgaggatctcctccaggcggccgcactctctgaggaagagctgctcctgctgctcggcctgcagcctctcttgcttccgtgcccaggtctgatacacctggtcccgctggtcctgcagggctcgaagctcttcctggacctggggatggacacatgaggagcctcagctggggagggtggtgtgggtgaggtgaggactggatcctgagggaagctcctgaggagaggccagcatggcacagtaggacggggcaccaggtggccaggcacaggcttggtcagctagggtatgtgggggcaccaggggagggggcccacctccttggtgggtgtccctgcagcaagaagtgcctgctgccccagctgggtggcctgctgccacagcttctcccgggcctccagctccgcccggagccactggtgggcactgagcttcagcgggccactgctaggctcttgcgaactctcctcca

SEQ ID NO: 1886083 - DNA, 4001 bp, Homo sapiens
ggaggctgagacatgaaaatcgctgaacctgggaggcaaagtttgcagtgagctgagatcacaccactgcactccagcctgggtgatggagtgaggctctgtctcaggaaaaaaaaaaaaaaaaaagggaaagaaatctgtgcattctgtctctgctacatgaccaaatacctccctctaattggctctaagttgttgagctagagccctccttgtcctgggggtcgaggatcttgtacatgaacccttatgatcagaaaagctgcttaagggtcaagagaggcaggatgatttggtttttaagagcatggactcaggctgaccctggtttagatcccagctctgccacttccttgctgtatgaccttgagcacgtaacttagctactctgtgtctcatctgttttctcatctgtaaaatgggagtgatgatattatgagccctaaactcagagggtagttagaaggcttaaatgagttaatacagggattggcaaactttttctgtaaaggaccagatagtaaatattttaggttttgcaaaccacatacaaggtttctgtcgcaacgattccactctgctattggagagcaaaagcagacacaggtagcatacaaagaaatggcctgctgtgattcataaagccttatttacaaaaacaaatggcaggcagggtttgacccagaggccacagtttgccaacctttgaacagtacatcggaggcacctagtgcaatgtgcagcgcaaggcgaccctccgtgcatgggggcagttgttgtggagcacagagccctttctcatgcacagttccattcactgtcatggaaaccctctgaggaaggggttgtgggtacccccactctgcagacaggaaatctgaggtccagagaagttcttcatcttgttctgtagtgagcctaaggcagagagcttgcattttctgcccagcagtctgtgagccttaataaacacagtttatctcttgcccagtcgatcaacttaccaaagacctgttccgtgcccagagctgtatccagcttagacaggaagaactgttcctgccccaattttcaaaagtcagcttcttatttaccaattgggaaaaacaaacctgcccatctcaaagagttctttttgccatgcagtcattcatggattcttgcttatgttcattcatttatttattttcattcaggtatttatgcaccaaacatgtactgagagagatatagccaggaccaaacaggcatggtctcgggcagggctattgtcagcctaagtggcctctttgtgaaaaccgggggggaaaaaaaaaaaaagtcccttcctctgagtggatacgaatctatagtagggcagttgaggactagatttcagccccattttccccttggccaggtaccttgagcagtgcacaacatacataaccatgcatggtgttcctgttccctggagcttcagtctactagaggtttcaaccatggaagtgagtgatgacagtcgtgatgtgagtgctccgacagccagatgagggacaggccctggaatgccctccactcctctcctcatccactggcttcaccctccccatttagcactgccacctctgtgcccacataatcagcccttggcatgaaccttcctcccaccaccactgtagacagcttcctcaccttgtaggacttggagggggccctacctgaaggacagagaacgtatcgctgtgaaatatacttcccggtgtacccaatctgcattagtgtgtgtcattaaaagatgattgttatgtgagaaagaggccgggattgcattagtgaaacatctggaattgttttagtgtgctgacgaagagccagtccgaagtgcctcactttctgcagccaccaccaccacaggtgctgaatctgagggccaaagatcgaacctgtaacctgccacctcacccaggaagccctcctgagctgctccaggtcacactcagctctctttcccctctctgaattgttaaaccactcactttggtgtctagccacttactgtctgccattggcaactgtttcgactgggttacatttgtcttccttgttggacagtaagccctctgataccacgtgaggcattttcatctcttaaaccccagcgaacatcattgaaagaccagcagttcggacactgtaactgacacttgctacgaggtagggatgagagaaggctgaccgtcaccccaccgccgcctgacccggctcaggaccgtcaccccaccgccgcctgacccggctcaggaccgtcaccccaccgccgcctgacccggctcaggaccgtcaccccaccgccgcctgacccggctcaggaccgtcaccccaccgccgcctgacccggctcaggaccgtcaccccaccgccgcctgacccggctcaggaccgtcaccccaccgccgcctgacccggctcaggaccgtcaccccaccgccgcctgacccggctcagaaccctcagccaaatggctcacctctgctctgtctggaggtgccgggctttgagacagtccaggcttcctagaggatgtagtccggtggagaaagcaggggtgggaggggtgaaatcgagacctaggttgaaacttaaaccctggtgcagccacttaacgtaacctgagttacgttgggcagtctactcaactcactgtgtctgtttctctgtctgtaaagtagggagaatgcctatctgtgagaaccaaatgaaatgataacagtaaaaggtctaactcagtgctcagcacattagagagcaaatgcacatatccactctcttccctcttcccgtaggcaggagacgtggtccccaggctgaagttaggctgagatcaagaatcactgaactcccctcctcctcagctgtcaggacctgctctgagcaaagcctctcccgccacctctgggagtgggtggggtcaccgcagttccattcctgggagcatttatccttgctgacctcttcgctgtggaatggaagttcctctgtcttttcatgtctgctcaagggcgatgtttttcggtggagtgatgcatcccatcgctgccatccctcaaattctatcgcataggtagtcacctcattaccctgtagaaaatggacccatttatcattcatttctcctttggtagggctgaggtggagcccgagactgcatttccagcaagttcacaggagacagtcctgctggtgctgctggcctggggactgtaatttgagaaccattccctagactgcactggcaggagtatgtgccctgagtgaactgttaagccctacaggtgcccaagggttaaactaagccttccctggaatgcccacttcttttttcccctcctgctttggatccaggtgctgctcggcacagatgccagtgagacccaggtgattggatttgtgaacttggctcaatttctcatcatctgccctaggaaactgcattataaggtgggaagaacacaggactcagaggcagaaccggggttcagcctggtatctgtttcataataggtgtgaccttgggctgctagtagttgtaactgaagcaatggggacttagcttgcctgggcctcagttttttcatctgtaaaatggggacattactgttctcctggcacaccgcccatgtttttatgggatgtgcttgaacagcctcgttaaattaaagtgccgcaaaaagactataatcttattatccctggtgtgaaaggagaggaaatagtgaaaaacagattctaacatcacaaagatgcaaagccttagccactgaggggactttagggcatcgctcccttaaccatccctcgattttataaaggagaaaatggaggctcagaggcaggcagggaagtgacatgcccatggtcaaatagcaaaaccaggagaagaatccagctctcccctgagccctgctctttcctccataccaaagtatcaacatctccccaaacctgggctcagaaattct

SEQ ID NO: 1886084 - DNA, 4001 bp, Homo sapiens
ctaagatcagagtgcaggaatcataaagagacagctttctccccagtgtactttgtaagaaggtctctagatcattatggctgtctcacaaaataatgggctgctctgaaaacttgggagcttcctgtccctgtatgaatcacaaggctgttaagtgaccgtgggcaaagagcttcatacataaagagtgctggatgcttattagatgaattaataatattgtatgataaagccctgcaaagagagctctgagtcttttcccctcttaaaatgctatgatttgattctttcttcttaagcattacttgctttaggatgcaggcccgatacaatcattcaacagtccgtacagagtatttactacatgccatgccaggtactatgctaggtgttaaagataccgtggtaaacaaaactaggtgcctgtctcacagatctacattctagcaggggagccaaagaataaaccaataaatgtatacacatgtatataatgtgtatgaatgctgcaaagaaaaaaaaaaaaggacagaaaggcaccgggcgcggtggctcacgcctgtaatcccagcactttgggaggccgaggctggcggatcatgaggtcaggagatcaagaccattctggctaacacggtgaaaccccgactctactaaaaatacaaaaaattagccaggtgtggtggcgggcacctgtagtcccagctactccggaggctgaggcaggagaatggcgtgaaccagggaggcggagcttgcagtgagccgagatcccgccactgcgctccagcctgggcgacacagcgagactccgtctcaaaaaaaaaaaaaagaaagaaaagaaaaggacagaaaagcaatagtgacaagggacactactttagagagggtaaccaggaaggcctatccaaagtgagctttcagcagagacgtaaggccaagtcaacaactaggagggccttccagacagaaagaaggaaaagccagggcaaagatcctgagtgggtggcatgcttggccttattggggaacagctaggaagccaggtgggtacgagagaatttgtggaagggaagaaaggaggtggcagcatgagattggggtggagagaaggctgctgtaggttacacacctttacccacaggggacattccacatgcaactggtggtaggatagtgggtttcacaggcaatgcaagaagaattgcttagaccacaggaaagtagttaagacctgagatctggccataagcctaagagttaccttgctctgccttaaaggaagaagaagaagaaaaaaaaaaaaaaaagcaaaggaaaaaagtgaaggagaagaagctttaatcaggattgtgcttgccccatgtttccaggtagaaatgggcctaatctacaccccggacatctcctatgggagaatgttttgattatgggggtttggacacatgagaagtagtcggaagatctggtttggtttcaggctttactgcttacaaactgtgtggctttggacaagacttcactgagattcagtttcttcacctgtaaaatgggacgagtccctaccaatcccacctgtctccatgggacccaatgagatcatgggtaagccaggctgtcctagaggttactatgataaattttataagcatgtttcttacccaagactttgcaccccagaaagcagaggtgaggtattatgcaactgattcccccacactgccttgcacttagctttcaataaatgtttgcagaactgaaaagcattaaaaataacccggaaaatgttctgccatttttttccttcctattaaactgtagcactttgccagaatgctccagaacagtctctcttcactgtaatccttcactttggaggaagaaccaactgagtcacaccagaggtgtgtgctcagaggataaactctgaggaatggggacaggaacaaggcctgactcctctggggaaggctccttgctctctgtgcccccaacctttctcaaacatcctgagagggccaggccaggctaccaacggaagggactgcagattaccctagcacaaggtcaggatctcctggaaaagtccatgaaagcctgagaaatacaatattcacaacattccacttcagactaaggagtctcaatctggtccaactgcctcaccatacggatagggaggctaacacacaggtcagtggactcgctggttcaaggtcacctctttttttttctccttttcaattttttgactaacacattcattctcatggttttaaaaccaaaatatataagatatacagttaactctccctcctatcttatcctctgtctgcccagtcaactataccacctgctaagcatctctctagaatgttcacacacatacaagcaaattcagaatcttatttcttctctcttttattaaaaacctagcatattatactaatcattgccttgcctttttttcatggagtttgtgtaagagtacataaaaaccctcttcgtttcttctttgcaactacatagtgtgtcatcatttttcttaaccagtctcttattgatgagtatctgggttgcttccaatcttttgtgtaataaataattttgcaatatcaataagcttgggcatgtcagtttgcattcacctagcttacggataagagctggaatcagatcccatttctgacctacagggtggcagtcatacagcctcagagtcctattatcttatttatttatttgagacggaattttgttcttctcgcccaggctggcgggcagtgacgccatctcggctcagcgcaacttccacctcccaggttcaagtgattctcctgcctcagcctcccaagtagctgggattacaggtatgtgccatcatgcccggctaattttttatatttttggtagagacggggtttcaccatgttggtcaggctggtctcgaactcctgacctcaggtgatccacccaccttggcctcccaaagtgctgggattacagacgtgagccattgtgcccagcccagagtcctactatctaatgtctaagttacttaacctccattcattcaatacacgctcctcagaactactaaatcccaggcactacaccaggtgctgagggtacaatgataaaggtgtctttgacttctgctcccaaagtgtccagcctggaagggacaaacagaagggaacattccgacacacaagggccgctcagtgtgccccggaagccatctgacctttgtaggccaatctctgtcaggaaatgggtggccttacctacacctcaggggtgttttaaaaggtaaaaaagataatgcttgccaagtacctagcaagcaaggaccacacaaagctcatggcagatactcaataaggggtaagcctcctcttgtcccagaatgggtcttagtgatggcagcagcaaggtgttccaggcaaaggcactgcattgccatgcctgttccacaatgagcaattctcttttcttagaggagtctggaatacactgctacttattttttaaagcagcacctaagcccctaattatgtcttagcctacttttattggaaagccatttgcctctctcccacattccagaccctcttcaatatctctgaggcacctgggtatgcttctcacctgcgtgcacaagccctggtgtttgatggagtgtcagagccacagaggaaacccacacacatttcttaagaccctggcacagaaaggcacaggcaggcacatggaaagtcgcttttactaggatacccctgaaagtattaaataataaatagaaaaaaaataggacaaaaatcattaaatctcacacatattgtttggttttatgtgctctatttcacaaacttttttttttttttttttttttgagacggagtcttgctctgttgccaggctggagtgcagtggcacaatctcggctcactacaacctccgcctcccaggttcaagggattctcctgcctcagcctcct

SEQ ID NO: 1886085 - DNA, 4001 bp, Homo sapiens
tacagtgctgccccacccccaccaccacagcctcctgggggtgcagtcaggggtgccctccttcaggctctgcccctgcacccactcctacacaactactctccctgccggcagccccagagaccagattggtttgggcctctgcctccgcaggcccgaaccaccatctcttctgctccccagaaagccagctcccagcacacaggcagcgttccctcttcattcctcaacacagagggcccctcacaaccctctcagcagatggtagagctccccacgcatcctcttaaagaggcttcaccgttgatggccacaagccccaccatgacctcctcccagggagtgaattttcttacatgtctcccaccagagcagggacaaaataaaacataaaagcagcagctgttaaattatcagcaacatttcctactaggatcaactcacggagtgggcagtgtattccattaggtggatcagtgcaggggttagcaagcgttttctgtaaagggccggatgggaactctttaaggctctgcaggccactgggtctctgtcaccacctactcaaaccctcccctgtagcaagaaagcagccctagcaacatgtcaacagataagcgtggccacattcccagaaacctttctttatggacatggaagtttgcatctcacgtaattctcatgtgtcacaagatacgactctactttccatgttttcaaccatttaaacatgtaaaagccattcttagcgcgtgggccacacaaaagcaggcagcaagaaatttggcctttacaccaacagcagctgacccctggatggagcattagagcttgggtgtgtgtcccactccagggcttccaggagaggggatgcaggccgatgccacctccacccctgtcgctctaggggagaaggcagagctggtgctgtatgaagtttggctgcagatcctgggccagccctacaccaaggccttggaggacaaaaccagccttgagttctgggcacttcaggggcaaccgacaagatgggtgaagtggcgggatgaagtgggggggcggggaagaagcctcgggaagatgggggatgactggacaagactttggtagagctgtgaccctcttcatcctctcctgaccccccagctgaccctcgtcctcagatctctgcagaactttgaccagtggtggtggaggaattccggtgggtccagggtggccctgggtgacccagggctcagacctgggttctggggttgaaggcaggaggctggaagagatgacctcccttaggccccccaggctgcccagccccctgaagtgggatgatcctcccaccaggctggacccactgaccgtcagagtgggtgccaccttcttcagggcggcatcagcccaggctctcgtgtgggtctgcacaccctgggggaggcagagggcctcttggtagacacggtcatctcagacctcggtcagtacctccttccctctgcaggccccctccctctgtccatctgcctcctcccttgggcttgctgcctctacatgccctgatctgaaacctgcctcccctcctcatggagccctccaagatgctcctagccccagctctctggtcccgcagcaacttctggtgccagattctgccttctcagaagtctgggaggcagggccccacctggccatagccttcttggtctgctctaggcactgctagccttgaagcctccagcctgctggatgcctccatccccggctatgctgtggctctcctcattctaggcctcctgctcgtcacattcacccttgtcctggtgagtgtctggctgggcccaggctccttcctgaggggcaggctgagcctttgatgccttgagccttgagccaagctgaggagtgagcaggcccctttacacccctgattcccccacccaagcccagcatctcctcatcctccagctggggctgcagggtttggggccagggggctgggcctgatcccagtgtccccacccttcttgtcaaggtgctaaagtggagggcctcccatggggtgttcagcctgggtgtgtagaagcacacagtgtggtacagaggaccctctccagacaggtaagtggagggcggttctccctgaccccaccccaattgtttgttctgggtggggtccaccgcgccccctgccaaggccttctgcaaacactccccaggggctgttgtgggcagcacctgggtggtgcagttggtgtgccagaaaagctccccagtactgggcagtggcccaggcagtcaagcagactccctcaagcaggccccacctacccctcgcctgttcccagctgcctcccaccaaccctagaaatgatgctgggagctgacagaaactgaacttaggagcacaggaggccaggagacctgggacagagaacaggaggtatggggagggaatcttccttcccccacttcccactgcatgagggccagacagtggcacctccaggtcctggaaggacatgtgtggacccaactcagttggccctttgtcttatggcctttcttctccctcccccggggccaggtggatgtgggaggagacgaaccaccatcctgggtgcactcagactcattccccactcctggccttcactccctttcctctacacacaggtgacccctcatgctgctgctccctctgctgaaacccaaactgcaaacctctcctctccctgccttcaccttgccccacggcttccacagacagtgcctcaaccccgaggaatgaatccgaagttccaacaccactgactttcccaggaactcagagccagagagggccaaggaccagctcgaggacacacagccagggcttcttccctccgaaacccccaaggactggacttgcagggctgggacagaggtggggtgggggaaagcaatgccttgtcaacccacgtggggagccccactcccatccccaaggtgcataaagttgaggaacacccctgctcccacgtccatgctcattcagggccctgctccaagtgcttggcactcacaccagcctcctgccctccacaggtattggtctcgtttacagatggggaaatggtggccaagagcctcccccagcacatatagctagaccacacagaggacttaggcacagctggggggtccgcagtctctgctgcctcacctgccaccaaagtgtggtcctgctgccaggtggcaggaaggggacagaagcccgccccaaagagggctggggcaggggcacccttacgcctgcctggtctggcccagtagggctggagagactgtcagtcctaagagaaacactggccttttgggagtatggaaaagtcaggaagcaatccaaagttggtatttaaaatattgatttctagatatttagatggtcatctggtgtgaggagctgggagggccccagggtagagtccacaagaggaggaagattgaaaaggggtcagagtggaaatgggagctgctgagggcaaggcccaaccccctccttgaccccccaaagccagccacagagccagtcagcctcaggccagagggtgtgagcaacggggaccctggctgctctacagtggatcagagccactgggtgtggggagtcttccagggcaggtgtggggccgccggggcaaggcaagctcccagggcagagactgaggccaccccctgcagccccactgcaggggggaacaccgggataggcaagggtcttaacccagaaagccccagcagctcccgggcccatcaggacaccattgaggcttggcggtggtggaacccaggaatggtctttgaacccatgacctggaagggggagccaaggatagtcctggcctgaaggctcctctacctgcaggcagtgtggaggcccagcgaggggaccccaggaacccagaccatgagcttacgtggccaaagacagcagccagcaccaagacatcaaagagggcgggtagaaa

SEQ ID NO: 1886086 - DNA, 4001 bp, Homo sapiens
tttttatatattgcacactctaaaaagaggtgtaaatactcctacaaccacttagttttaagatcgtaaaagatattgcttgtaaacattttactgatttatctatattgtactcaaattttcaactaatcttctggatacttttctacagatgtcaagaattaaactacatttatacgttaatgtggttaacagaattttgtcatattgctatgacaaagtagagtgtttttacatacatcaattatgtcagtagtattaataagtgaataaatatctttacattactgtggtcttttccctttgttattcaatcaattacctatccaccctctcgtggtcatatatattaatggactttctaatcttttatgtaggacatgaacttcattgtctggtcatgcaggtatgattgtacgactgtacgactgtacaattttctttactgactgcctgaacattttggaggaggaaaggaacatgtaaaattatgagtattttttttaatgaaaattgctcattctccaagcaccaaattccagttaattctgtcctttttcccagtggcctcagcatgcagatctaagtgtacgaatggcacatggtttatgaggatgcacctcactggaccttttcctgaagaggaaggagaaaataggactccatcattttcatttgacattcttcccatgccctgtcttcattttgacatttttcccctttttggaaatgggcctttttcctttcttgcgaatgcatttaagaatttaagaatgcattaaattttgcctctaagcatgactttaagtgcaacctaagtcttttaacatgttatacactcattactgttcagttgaaaatattttccagttttctttgtgattgcttctaccacccacaggttatttaggttacttaaggccatctttttttttcccctgagcactcaccacattaactatttcctgtcttttaagcatttacttcatgtatagtaaccagtttctatccttgttccggataaaaatactagcttgagataagttatttcatctgactacaaattggacattaagcatgttttgtatgtataaaatacagcagtatgacaaaattctgttaaccaccttaaagttgaaatgtagttgaatttttgacatctgtagacagaagatttcttgaaaatttcagtgtttgattacaatatagaaaaatcagtataagcagtatcttttatgatctttaagtggttgtaggagtacttacacctctttttcatattcatattgaaatttaaagccattttaaagtaactttttgttatccagttattcactcagggtgatcagatgtctattcaaaacagccaacaatgagctaaaggagtgctgttccagccagaatcctactgctaccacaagtgatgaaagcacaagaaatcctccacaaaggtattctacaactaaacttctgaactaagggttggagaaaactggctctttaaatttcaaaataaaaatcagtttgtctatcaatataaggcaataaatactcattcaccacctctcatgtgccagtaatttctagggcccctatagaaatctgactgctgtgcacatagagggactgacacaaagacttcagtcacaggattctttgggtggttctaaaatagaagagacacttacaggtatcttaaagatcaggcatcgttccaatcactttataagaattaatgaattattataaattaattaatacagcaaacctgtgaactagtcggtgtaattcttgctgttattattcccgttgtcagatgggataaaagaaggtaactaatttgtgacaggggaaagtctcagatagtgaccagtggattcaggatttaaacccacaatgcccgattctggacactcgcgtttaatttctgcggcccttgcagctgccggcgcaggcgctgcacccagcgctgctccgcgcgcccagccccgctgggtcctggaccccgccggcagccggcagtgcctaaaggttagatctgaaggataggagagtgctgagaaggataatgcttttaggcaattaattgtgtgttctttaaatacggacatgttaaccacacggggctaggcagcgcatgcctgagctgtttggagtaaaaaactgcaggactttgcagcttctctccatcctgcagttcacttctgaacttgctccctcctcttaggatattcttagactgcccggacttcacctcagctctgccatcgcccagccttgcactcattccattcggacccccaaatgctgaccggccaggggatcccatgctaccctgcagactggtgtgtgcacaaggaaaccaggtcccagcctctgaggctgtcagtgttttgttagaaaagaaggcacagctgagccaaataactagacaaatgactaaatgtctactttctgagaactgtaaaaacaatattgatgctcaaaaaatatacatatgtatatatcatggcaggaatatagacaatggcagtcagaggaaatgatctctgaagacatttggataggatgggaactagtttatttttctcaagatgcactgcccagttatttccagttattcaattttttatggtatttaaaatcatgggatacaatattggcttataacagtttatatgaaatattgtcacgacaaaactaaaagataaagtcactatcagactataagacatgaacaccagtggcagccacacaggtgggcatttggaagcaaacactgcctggcaccagctgcatagccttgggcaggtgaggaaacatatgcttctcagttcccttgtgttaggagatgagatggtcaaatattgtatagaacttcactccaatgcagtaactactagcctcatgtggctatttaaatttataatttaaaaaatggacattcatttcctccgtcactctagcctcatttcaagtgcccaagaaccccatggggctagctttcatactgtacagcatgcatatatataaattcttcacagaaagttcctctggacagtgctggtgcatcaagagagggtcaaatatgatttagatacagtgctgggaaaatatcacaattaagcaaataatagatgcagtgctaggaaaatatcacaattaagccagtaataattttatattcaggattcttatgtttgtgaatttgtagagagcttggcgtagaagcctgagagctgtgctgcaagtctttttcttgtaaaaatcactggggctgacaaacaaatcctgataaagagaaagtttgtttcagaaagttcaagtgaggcagactttgggacagcttgcatgcaaaatataaaacttggtaactatgaaaaggagaaagataaatccaacatttcctacattcacgatgaataatcagcaccattttcaaataattatcaaattaggaaaagactaccttttaaaaacattgagccttctactgaccgactataaagactatatataaagtatcccacaatttatttaggtcttctgaagctaaaatgtttttaattttattgtataaccttaattagtttaattcctaggttagctaacttttaatgttgttatgaatgttattaattttaaatgtttacttcaaatgttattgatgatagagaaataaaaatgattttcatatattggactcctgtccagtgtccttgctaaatgtacctattaaatctaatagcttatctgtaaattattctcaattttctgttgcattccatcaataatttctttccagttataacatcttttatttctttgctattacactagctaggacttgcaataataaatacagattttttttgcctttagatttatttcagagagaaagttttagagacctttatttagataattatctaaattacagatgtaatttaacagatccatattcacatgtatttctgctcctgtcatttttactaatagat

SEQ ID NO: 1886087 - DNA, 4001 bp, Homo sapiens
catgggagaccaccacttgcgtcagtgtgacctgcatgtgagacacggagtcaaaggagatcattttggaactttaacgtttaatgactgccctattggatttcagacttgcatggagcctgtagcccctttgttttgaccaatgtctcccatctggaacaggtgtagatacactgggggtacccaatgcctgtacccccattgtatgtaggaagtaactaacttgcttttagttttacaggctcataggtggaagggacttgtctcagatgagaccttggactgtggacttttcagttaatgttgaaacgagttaaaactttgggggactgttgggaaggcatgattgattttgaaatgtgagaacatgagattcaggaggcgccaggggaagaatgatatggtttggctatgtccctacccaaatctcatcttgaattgtagctcccataatccccatatgtcatgaaagggacccagtgggaggtaactgaatcatggggatgggtttctccctgtgttgttcttgtgaaaccgaataagtctcacaagatctgatggttttataaaggggagttcccctgcacatgctctctctcttgcctgccaccatgtaagacatgtctttgctcctcctttgccttctgccatgattgtgaggcttccccagccacgtggaactgagtccattaaacctttttttctttataaattacccagtctcaggtatttcttcatagcagtatgaaagtggactaacacagtatcaaaccctggtttggggtaataatcactaccttctaggtaaccagaatggaaaaaatataacagaaaaaaaatcctaaaaatcatcctgcgtacaagaaaaatgaaactgtatgctgaattctcagggggagaaaacgtatttaaaaatatatgactttcaaaccacaagaaactatagaccattgctttaaactatttgtctatgaacagtatgtagaaacacatggaatttaggaaataggagatgaaggctacaataacaaaagaggctcatatcacaaaatgggagatagctgagatgaggcttctatgaaaactaaagtgcaagggcagattttccatccacagggaaatccgtggagaaagaaactgacacactgaaaagttcaagcagcaattgaatcagagctctggagggcaaaggaagagatgaactaatgacagagaagaaggcggatgggtatgccagagaccacaggttccacctcgagaatagtttgtgtactggggaaagacacaagggcaaggagatctgaaacaataatcaaagctatcactgaagtacgaataataaaagcaccaaccagcttctaggcagggagggggaagaaacaaggaagagttctccatatttaaataacaactagccaaactcctgaattttacaaataaataaaaaaacttccttaaaaataaaaagtcaggcttagataagactttttttcttctctgttaacattattagaagacataaagattttaagagaataaaaatatgatcaagaggatcataaatatcaggttgtctttacctgagtacgaagcaatggcatctgtatatccagcactgatttgtccttccaataaaaatttactcaaagacatatgggtacatattagaaaaataatcaaaattaatatttcaaggattaggaagttgtgaagccaaaatcctgcaaggggacaattgattcagttaatggaaagatttatttttcatattttatgattatttaccaaaataatatttttaaagtataattataaaataaaaataaaatatttaacaatactataattataatcatgttccaagttataaaacaagatagtgagaattgtcagtaagatagtaagaattctaatactatctcaaaataaaggatacagaaggtttcagggcaagagaaagggaaaaccttctatatcctttagtttgagatagtattaaagctttctgtaggctcactcaaaatgtccggattctgaccacatttgaatgagcactcccaacctgacgattcctagtctaagccacacatatttcctcttatggttattgcaaaagctccctaactggtctcccagcttctgccgttgattcctttcagctattttttacacaagtgccagagaaatctcagaaatgcaattcagatgatatcacttctttgcttatatctttcaatgttgttcccctctacgtgttcatgtattctcccctttgactctcgcttctaagtgggaacatttggttttctgttcctgcattagttggctaaggataatggcttccagctccatccatgttcctacaaagggcgtgatctcatcttttatggtggcataatatgccatggtgtatatataccacattttctttatccagtctaccattgatgggcatttatgttgattccatgcctttgctactgtgaatagcgctgcaataaacatatgcatgcatgtgtctttatgacagaacaatttatattcctttgggtgtatacccagtaataggattgccgggtcgaatggtagttcttttaggtctttgaggaatcaccacactgtcttccacaatggctgaactaatttacactcccaccaacagtgtagaaatgttgccttttctccacaatattgccagcatgttattttttggctttttaataataaccattctgaatggtgtgagatagtatctcattgtacttctgatgtgcatttctttaatgatcagtgatgctgagctttttttctatgtttgttggctgcatgtatgtcttattttgaaaaggagggtgaaagctgggaggagggagaggatcaggaaagacaactagtgggtagcaggtttaccatgtgggtaacagaataatccgtacaacaaacccccatgacacaagtttacctacataacaaacctgcacgtgtaccactgaacttaaaagttaaatttaaaaaataaaaaataaaaaaatctttcaatggtcccatgtcagtttgaggaacagccaaagtccttaaaatgacgtacaaggtgctcgttccatcatccgtcttctcatgtttatttctctgccaccatctactaatactcttcccccttctcattctactccagctataatggcttcctcgatgctgttctaagaataagtccacatgattccgactcagggcttttgcccaagctgtggtctctctttggaatgctcttttttcagcagagcacgattcctcctcatttccttcaagaagtctgtcgccaaatgccttctacctggtgtgtaattgtcatgtgtggcagttttaaacatagtccaaaaacaggttgatattcttctcatcaaaaaataggtctatgtctcccttccctaaatctggacgtgcttgtgactgctacaatcaatagagtatgacaaataattctacctgacctttaaggtgagataaaaagagaccaggccttttccacctggttcccttggagtgtttgatctgcggaaagccagcagccatataagaagtttaccctgtgcaggccgggcgcggtggctcaggcctgtaatcccagcactttgggaggccaaggcgggtggatcacgaggtcaggagatcgagaccatcctggctaacacggtgaaaccccgtctctactaaaaatacaaaaaaatagctgggcctggtggtgggcgcctgtagtcccagctactcgggaggctgaggcaggagaatggcgtgaacccgggaggcggagcttgcagttagccgagatcgggccacaccactccagcctgggggacagtgagactccgtctcaaaaaaaaaagaaaaaaaaaaagtttaccctgtgcaggcactataactaagagtccttcccatctgagccttgccttccagacaactccaccaatttataagacagaaaaaaagcaccttgcaccttc

SEQ ID NO: 1886088 - DNA, 4001 bp, Homo sapiens
ccatgggagaccaccacttgcatcagtgtgacctgcatgtgagacacagagtcaaaggagatcattttggaactttaatgtttaatgactgccctattggatttcagacttgcatggaacctgtagcccctttgttttgaccaatgtctcccatttggaacaggtgtaaatacactgggggtacccaatgcctgtacccccattgtatgtaggaagtaactaacttgcttttagttttacaggctcataggtggaagggacttgtctcagatgagaccttggactgtggacttttcagttaatgttgaaacgagttaaaactttgggggactgttgggaaggcatgattgattttgaaatgtgagaacatgagattcaggaggcgccaggggaagaatgatatggtttggctatgtccctacccaaatctcatcttgaattgtagctcccataatccccatatgtcatgaaagggacccagtgggaggtaactgaatcatggggatgggtttctccctgtgttgttcttgtgaaaccgaataagtctcacaagatctgatggttttataaaggggagttcccctgcacatgctctctctcttgcctgccaccatgtaagacatgtctttgctcctcctttgccttctgccatgattgtgaggcttccccagccacgtggaactgagtccattaaacctttttttctttataaattacccagtctcaggtatttcttcatagcagtatgaaagtggactaacacagtatcaaaccctggtttggggtaataatcactaccttctaggtaaccagaatggaaaaaaataacagaaaaaaaatcctaaaaatcatcctgcgtacaagaaaaatgaaactgtatgctgaattctcagggggagaaaacgtatttaaaaatatatgactttcaaaccacaagaaactatagaacattgctttaaactatttgtctatgaacagtatgtagaaacacatggaatttaggaaataggagatgaaggctacaataacaaaagaggctcatatcacaaaatgggagatagctgagatgaggcttctatgaaaactaaagtgcaagggcagattttccatccacagggaaatccgtggagaaagaaactgacacactgaaaagttcaagcagcaattgaatcagagctctggagggcaaaagaagagatgaactaatgacagagaagaaggcggatgggtatgccagagaccacaggttccacctcgagaatagtttgtgtactagggaaagacacaagggcaaggagatctgaaacaataatcaaagctatcactgaagtacgaataataaaagcaccaaccagtttctaggcagggagggggaagaaacaaggaagagttctccatatttaaataacaactagccaaactcctgaattttacaaataaagaaaaaaacttccttaaaaataaaaagtcaggcttagataagactttttttcttctctgttaacattattagaagacataaagattttaagagaataaaaatatgatcaagaggatcataaatatcaggttgtctttacctgagtacgaagcaatggcatctgtatatccagcactgatttgtccttccaataaaaatttactcaaagacatatgggtacatattagaaaaataatcaaaattaatatttcaaggattaggaagttgtgaagccaaaatcctgcaaggggacaattgattcagttaatggaaagatttatttttcatattttatgattatttaccaaaataatatttttaaagtataattataaaataaaaataaaatatttaacaatactataattataatcatgttccaagttataaaacaagatagtgagaattgtcagtaagatagtaagaattctaatactatctcaaaataaaggatacagaaggtttcagggcaagagaaagggaaaaccttctatatcctttagtttgagatagtattaaagctttctgtaggctcactcaaaatgtccggattctgaccacatttgaatatgagcactcccaacctgacgattcctagtctaagccacacatatttcctcttatggttattgcaaaagctccctaactggtctcccagcttctgccgttgattcctttcagctattttttacacaagtgccagagaaatctcagaaatgcaattcagatgatatcacttctttgcttatatctttcaatgttgttcccctctacgtgttcatgtattctcccctttgactctcgcttctaagtgggaacatttggttttctgttcctgcattagttggctaaggataatggcttccagctccatccatgttcctacaaagggcgtgatctcatcttttatggtggcataatatgccatggtgtatatataccacattttctttatccagtctaccattgatgggcatttatgttgattccatgcctttgctactgtgaatagcgctgcaataaacatatgcatgcatgtgtctttatgacagaacaatttatattcctttgggtgtatacccagtaataggattgccgggtcgaatggtagttcttttaggtgtttgaggaatcaccacactgtcttccacaatggctgaactaatttacactcccaccaacagtgtagaaatgttgccttttctccacaatattgccaacatgttattttttggctttttaataataaccattctgaatggtgtgagatagtatctcattgtacttctgatgtgcatttctttaatgaccagtgatgctgagctttttttctatgtttgttggctgcatgtatgtcttattttgaaaaggagggtgaaagctgggaggagggagaggatcaggaaaaacaactagtgggtagcaggtttaccatgtgggtaacagaataatccgtacaacaaacccccatgacacaagtttacctacataacaaacctgcacgtgtaccactgaacttaaaagttaaatttaaaaaataaaaaataaaaaaatctttcaatggtcccatgtcagtttgaggaacagccaaagtccttaaaatgacttacaaggtgctcgttccatcatccgtcttctcatgtttatttctctgccaccatctactaatactcttcccccttctcattctactccagctataatggcttcctcgatgctgttctaagaataagtccacatgattccaactcagggcttttgcccaagctgtggtctctctttggaatgctcttctttcagcagagcacgattcctcctcatttccttcaagtctgtccccaaatgccttctacctggtgtgtaattgtcatgtgtggcagttttaaacatagtccaaaaacaggttgatattcttctcatcaaaaaataggtctatgtctcccttccctaaatctggacgtgcttgtgactgctacaatcaatagagtatgacaaataattctacctgacctttaaagtgagataaaaagagaccaggcattttccacctggttcccttggagtgtttgatctgcggaaagccagcagccatataagaagtttaccctgtgcaggccgggcgcggtggctcaggcctgtaatcccagcactttgggaggccaaggcgggtggatcacgaggtcaggagatcgagaccatcctggctaacacggtgaaacccagtctctactaaaaatacaaaaaattagccgggcctggtggtgggcgcccgtagtcccagctactcgggaggctgaggcaggagaatggcgtgaacccgggaggcggagtttgcagttagccgagatcgggtcacaccactccagcctgggggacagtgagactccgtctcaaaaaaaaaaaaaaaagtttactctgtgcaggcactataactaagagtccttcccatctgagccttgccttccagacaactccatcaatttataagacagaaaaaaagcaccttgcaccttccagactg

SEQ ID NO: 1886089 - DNA, 4001 bp, Homo sapiens
catgggagaccaccacttgcgtcagtgtgacctgcatgtgagacacggagtcaaaggagatcattttggaactttaacgtttaatgactgccctattggatttcagacttgcatggaacctgtagcccctttgttttgaccaatgtctcccatttggaacaggtgtaaatacactgggggtacccaatgcctgtacccccattgtatgtaggaagtaactaacttgcttttagttttacaggctcataggtggaagggacttgtctcagatgagaccttggactgtggacttttcagttaatgttgaaacgagttaaaactttgggggactgttgggaaggcatgattgattttgaaatgtgagaacatgagattcaggaggcaccaggggaagaatgatatggtttggctatgtccctacccaaatctcatcttgaattgtagctcccataatccccatatgtcatgaaagggacccagtgggaggtaactgaatcatggggatgggtttctccctgtgttgttcttgtgaaaccgaataagtctcacaagttctgatggttttataaaggggagttcccctgcacatgctctctctcttgcctgccaccatgtaagacatgtctttgctcctcctttgccttctgccatgattgtgaggcttccccagccacgtggaactgagtccattaaacctttttttctttataaattacccagtctcaggtatttcttcatagcagtatgaaagtggactaacacagtatcaaaccctggtttggggtaataatcactaccttctaggtaaccagaatggaaaaaaataacagaaaaaaaatcttaaaaatcatcctgcgtacaagaaaaatgaaactgtatgctgaattctcagggggagaaaacgtatttaaaaatatatgactttcaaaccacaagaaactatagaacattgctttaaactatttgtctatgaacagtatgtagaaacacatggaatttaggaaataggagatgaaggctacaataacaaaagaggctcatatcacaaaatgggagatagctgagatgaggcttctatgaaaactaaagtgcaagggcagattttccatccacagggaaatccgtggagaaagaaactgacacactgaaaagttcaagcagcaattgaatcagagctctggagggcaaaagaagagatgaactaatgacagagaagaaggcggatgggtatgccagagaccacaggttccacctcgagaatagtttgtgtactggggaaagacacaagggcaaggagatctgaaacaataatcaaagctatcactgaagtacgaataataaaagcaccaaccagcttctaggcagggagggggaagaaacaaggaagagttctccatatttaaataacaactagccaaactcctgaattttacaaataaagaaaaaaacttccttaaaaataaaaagtcaggcttagataagactttttttcttctctgttaacattattagaagacataaagattttaagagaataaaaatatgatcaagaggatcataaatatcaggttgtctttacctgagtacgaagcaatggcatctgtatatccagcactgatttgtccttccaataaaaatttactcaaagacatatgggtacatattagaaaaataatcaaaattaatatttcaaggattaggaagttgtgaagccaaaatcctgcaaggggacaattgattcagttaatggaaagatttatttttcatattttatgattatttaccaaaataatatttttaaagtataattataaaataaaaataaaatatttaacaatactataattataatcatgttccaagttataaaacaagatagtgagaattgtcagtaagatagtaagaattctaatactatctcaaaataaaggatacagaaggtttcagggcaagagaaagggaaaaccttctatatcctttagtttgagatagtattaaagctttctgtaggctcactcaaaatgtccggattctgaccacatttgaatatgagcactcccaacctgacgattcctagtctaagccacacatatttcctcttatggttattgcaaaagctccctaactggtctcccagcttctgccgttgattcctttcagctattttttacacaagtgccagagaaatctcagaaatgcaattcagatgatatcacttctttgcttatatctttcaatgttgttcccctctacgtgttcatgtattctcccctttgactctcgcttctaagtgggaacatttggttttctgttcctgcattagttggctaaggataatggcttccagctccatccatgttcctacaaagggcgtgatctcatcttttatggtggcataatatgccatggtgtatatataccacattttctttatccagtctaccattgatgggcatttatgttgattccatgcctttgctactgtgaatagcgctgcaataaacatatgcatgcatgtgtctttatgacagaacaatttatattcctttgggtgtatacccagtaataggattgccgggtcgaatggtagttcttttaggtgtttgaggaatcaccacactgtcttccacaatggctgaactaatttacactcccaccaacagtgtagaaatgttgccttttctccacaatattgccagcatgttattttttagctttttaataataaccattctgaatggtgtgagatagtatctcattgtacttctgatgtgcatttctttaatgatcagtgatgctgagctttttttctacgtttgttggctgcacgtatgtcttattttgaaaaggagggtgaaagctgggaggagggagaggatcaggaaaaacaactagtgggtagcaggtttaccatgtgggtaacagaataatccgtacaacaaacccccatgacacaactttacctacataacaaacctgcacgtgtaccactgaacttaaaagttaaatttaaaaaataaaaaataaaaaaatctttcaatggtcccatgtcagtttgaggaacagccaaagtccttaaaatgacgtacaaggtgctcgttccatcatccgtcttctcatgtttatttctctgccaccatctactaatactcttcccccttctcattctactccagctataatggcttcctcgatgctgttctaagaataagtccacatgattccgactcagggcttttgcccaagctgtggtctctctttggaatgctcttgtttcagcagagcacgattcctcctcatttccttcaagtctgtccccaaatgccttctacctggtgtgtaattgtcatgtgtggcagttttaaacatagtccaaaaacaggttgatattcttctcatcaaaaaataggtctatgtctcccttccctaaatctggacgtgcttgtgactgctacaatcaatagagtatgacaaataattctacctgacctttaaagtgagataaaaagagaccaggcattttccacctggttcccttggagtgtttgatctgcggaaagccagcagccatataagaagtttaccctgtgcaggccgggcgcggtggctcaggcctgtaatcccagcactttgggaggccaaggcgggtggatcacgaggtcaggagatcgagaccatcctggctaacacggtgaaacccagtctctactaaaaatacaaaaaattagccgggcctggtggtgggcgcctgtagtcccagctactcgggaggctgaggcaggagaatggcgtgaacccgggaggcggagtttgcagttagccgagatcgggtcacaccactccagcctgggggacagtgagactccgtctcaaaaaaaaaagaaaaaaaaaaaagtttaccctgtgcaggcactataactaagagtccttcccatctgagccttgccttccagacaactccatcaatttataagacagaaaaaaagcaccttgcaccttcc

SEQ ID NO: 1886090 - DNA, 4001 bp, Homo sapiens; identical to SEQ ID NO: 1886087

SEQ ID NO: 1886091 - DNA, 4001 bp, Homo sapiens; identical to SEQ ID NO: 1886088

SEQ ID NO: 1886092 - DNA, 4001 bp, Homo sapiens; identical to SEQ ID NO: 1886089

SEQ ID NO: 1886093 - DNA, 4001 bp, Homo sapiens; identical to SEQ ID NO: 1886087

SEQ ID NO: 1886094 - DNA, 4001 bp, Homo sapiens; identical to SEQ ID NO: 1886088

SEQ ID NO: 1886095 - DNA, 4001 bp, Homo sapiens; identical to SEQ ID NO: 1886089

SEQ ID NO: 1886096 - DNA, 4001 bp, Homo sapiens
ttgattgtgcccaactggttggttttcacctgaggtctctcaagcacttacaggcagctgtcatctaggcctgcagtcacccaaaagctcagctgggctagaagttcaatatggtacgcttacatgtctggtagttgatactagctgtcagtttttgaaagcttagctaggctggagcagctaatcacggctttgttgtatggttcctgcttctcactgcagagactgggttcttggaagaaatgtcctatgagcaaatattccaaaatgtagggatcaggagttgctgggctacttaagggccatatgcagaacctcagttgtatattattgaatagagcaatcacatggcctactcagattcaaagtggttggaaaaataaacttctaatggtgtaaggacaaaatcacaatgaagaagagtgtgtaaagtagcaaattatattgtgaccatctttggaaaatatgatctatcacatcctccaagagctctctgtactctggaatcaaagcagatataaagaatacaaataagtattttgggaatattatttaaggcatggtataaagttatgtaagcactgaactgtaagatgtagtgactttgacatgtaaagaaattgattatttaattgtgaggacaggaaagagctctagaccaaaattctccttctggctgtatattttattagctatgtagccttgggatagtaactgggccttctaactgtgtctatataacaagaggtctggattggataatctgtaagagacattatcattcttaataactaggaaaccatgggcttgatgcctatttgcttactgcgggtcagggagaataatatggtgaatgaattgcttataaatcaaaataacacattttgaacagggtttgcttttctgggaatcaataattgacattaaatactgtagagaaagttattgatgacattgattgttagattagtcctttggctctagagtcaaaggaaggcatttcctaatgatcttctataatatacaaactttaagtttcttttctatgtatttcactctaatgtgaactcaaataatctctgacctgctaacagatgtggaagctgacaaatttatttgtaagcagaataattacctcttaatattgatttgtaaatccatgttgccattcattgaatttctccaagtagaaacaagatatatccaggtctacgactgtggatggctacatgtggatccctacttaatattgaatgagacaatgcatatctgtcacaaggtaatatatgatagctgtatctaattgcatataaaagaggaccaagccaattgacatctctctgctctcaagaaaacaatgtgagcaggacatagatgtgtcttgtgttccacacagggggattttggagttgtggtaaatgagatggattctctccagcgaacaaaccaagaaagggttggaaaacaatataaaatggtcagacatcttctggatagagattgtagcggagtttagcataggatatgagccttgctaggtttttctataatgacaagtttaaacaggaccaatttgcatttttataaacagcaatcacttcctagaattctagggtttcccaaatcaaactcctgaatgtcagtctctcccacttcagtcatgggtaactgccctctctctgagcattacccctcatttatcttaaggaaaatgatagaccagtttgtagcatatcctaaattctctacttaaattgtgctgcaatagacacacaatgagacaccatcaactaagcaaccactgaatgactattacatacaagacactgtattggaggctatcaaagggtatattcattcattcattcttcttctttttttttttttttgcttattccatgaacatttctgagtgcctacttaatgacaggctctgtctgttgtgagaaaagattgtagttgtctatctaacaaccatacatcctactccctcacatacacactattccacagaggcaacctggtattcatcttaaaggcaacaactctggggccagatcacctgagttacaaccctgctgtcactactgaataacagtgtgaccttaattaattaattaattaattaattaattaatttatttatttaatacaaggttatcttgctgtctcaccaagggtgaagtgctttggcatgtccatagctcactgcaccctcaaactcttgggttcgaaggatcctccaggttcagcctcttgagtagctagaactacaggtccacacaatcacacctggttaatttttaattttttttgtagatatggggtttcactatgttgcccaggatggactcaaactcctggcctcaacccatcttcccaccactgcctcccaaagtactgggattataggcatgagccgctgtgcctggcccttaagttacttaatatcttgataagttatagataataaccacctcatataatttttgtattaaatgatttaatacacatttctatatctctttatgtatgtttaataactcttagaatagtgcctcccttgttgtaagtgctgtgtaagagttgattttgttcaagtcttggtaggccatatccttcaaaggagactaagtcccttctcagctgaaggtgcatatcaactctggttgaaatgactcatgtaaattccattctcttgtccatgatgtaatgtcattctgtccagtaaaatgtgaggggaagtctggggtggatttctagtacagtttttctgacttttatgaaagaacataaggaagagatggtctatcttctcacctctggaagttattgttgaggatataaggttggagtaacttggggatgtgaggggccacgtaaggacaaacacgaacattccaaagatggcagaacaaaatgtggaaatgaaatggatccctgagccattcattgagcccttgaagtcagtgatcttggaacatacaacaggacttgtcagacaataaagataacaaagccctcattgtatgagtcattttgcttgttttctgttacttgctggtgaggtcatcaggtgaactgacacatcgttcttccctgatcatgaggattcatggtatcattaaaatttcttttttatttaaacaaatatgagaaacgaaacacgctcagactttctagtaaggaaaaacaaaagcccacctcagaggacgaataagcaagccatttaccctaattcaggtgtgtggtatttattttaatatgtataaaaattacaatagatacaagtgtaaaatggtgtgagattgatttcatcagtcttgtcacataagaagaataaacctctgggtcactctccgctgcacgatggcataataaataaggaaaacatggtcatgactccttctctatgagagatgcgatagttgattaagtgcaatctattagtagctgccagtaacaagaaaggttaatttaaaccagatagtctcaggtttcaacctcttctatggctgcaaatctggataggtgtcctttgcttactggttcaagctactgacaggcagacctgaaatggttttggcttctgtctgtggccccagagccaggcaatccaataacagtcttttccctttaactctcaaacatagggatgatagtggctttttgctactgtaatgtctgggttgccttattatcatttgtttggcttctcagcacctccctctattaaaattcctcctatctggagtgactattgttgtcctgattgatacgctatccttggttttattctgaactatggaaatcatagacattagttgtaacatccaagactcaaccttgacttctcccagtgatcctacctttccaatcattggtgatcataccatcttcagttgtatttcagaggggacttacatgcccctgattgcatgtattccccagacaaggtcaacctggttgaaacacagcctcagtctagtatatcaatgtgt

SEQ ID NO: 1886097 - DNA, 4001 bp, Homo sapiens
atggcacagataggaaatatttgtaaatatttgtaaagtacataatatttgaaaatatttgtaaagtatactgaaataaaacaaatgaggttattcaagcctggaggtgaccatctcaggggttcctcttatccccaacactgcctgctgctctgaaagctgaaagtatcagtatctcaacacacatgtgacacaaaagtgtagtcggtatatggttgggaggctctatacttttcttctgcatatctgctaatgggattatatctaatatgcctgaaaaataactagtcctatggaaatgggtaaccaacaaagctagtattcagattctcctcaaaataggtatgtattctcataaatatgagctattaatacagacagcaaatgaatcatcacaaagttaagctcaataacctgaaagctttaaaactatgcagtcactcaccttgtagggcaaagagagaggctgcatctgtggctgtctcagatggggcttgtgttattggccttaagtatgatctgtaaccttttaaaatagaggccatgaaaaacaaaaatgcctcttggatttccaaatctatcatgtgcaacctctttccagaattaaaatcatagtcatttattgctaaatccatgagtccatcatctctcggtctctgctgcactgtgaagacatacagtgttagtgttttctccaaactcacaaaacactcatgatggtaccaatataattttgttgtattttcaaaaggacccaagctacctcaactctttgtttacataacttaatcatacgtaaaccttagcaaagcttgccatagcattttgtagtctccgttgagtaaattttatccaaattaaacacaaagctacccgtttatctcactaccaccaggaaaaaaaaagctcaggtcggtcatggtagctcatgcgtgcaatcctagaccaaggcaggaggatcacttgaggctaggagttcaagactagcctgggcaacataagagagattctgtctttacaaaattttttttaagttcatgttctaaaataactatatataagttaataatgattgtaaccgagaaggcaatagaatataagaaagctgttcaacataaatatatatcactcataggctcaccaagtattggcattgttcagaaagaatctgaacaaccatgtcatctatacctcccacaccactactattttgcacatgccctgagaggggaaatgacctgacatacgaataaggagaataataaaaaaggaacataaacccagatctctcaaatcttcatacagaattgtctccattgttctctcaccatcaagtgattatggtgagattatacataaactagtacatttgaaaatatttcaaaaactgcccccctttccctcaaaagttttgcatgttttttttcctttttttttttttttttttttttttttttggttttttgagacagagtcttggtctgtcacccaggctggagtacagtggcacgatctcagcttactgcagcccctacctcccgggctccagagattctcctgcctcagcctccttggtagctgggattacaggtgcccatcaccacgcccagctaatttttgtatttttagtagagacggggtttcaccgtgttggcgaggctagtctcgaactcctgacctcaggtgatccgcctaccttggcctcccaaagtgctgggattataggcatgaggcaccatgcccagccactttgcatgttatgtgcacatacttgctctcacactctttccatatgaatatatataaaacatacatattttatataatacatatatatgtctttttcaaagtggcagtgacattccctcttgtattcattcatgtttttgtcttacatattgaaaacagacttttaaaaaaagggaaagaagaactattgcatttaccctgtgcaaactgagtgcagggcaaatgcaacagttcttctttcccttttttttttttttaatataagtacctgcaggaagaacacacaaggattaaaatataaaaaacaattcttcttcctggacaattcaatgctaaagccattagatagtaaacatgtaattttatagtagagaagtctagtagacaccaccttaatcaagtgatcgaagtgaatatcttcatcaataatgggacaaagcaaaatagtgtgcgatctgatataaggacgcaatgagagagacacagcatcacttctgtgatattcctgtcaaagatgtgtgacctgggccgggtgcagtggctcacatctgtaatcctagcactttaggaggctgcagtgggaggatcacttgagcccagaagttcaagaccagcatggcaatatagtgagatcccatctctacagaattttttttttttttaattagctgggtgtgatagcttgtgtctgtagtcccagcttctcaggaggctgagatgggaggatcacttgagcctgggagcttgtggctgccataaaccgtgatcgcgccactgcactccagcctgggtgacacagtgagacaccctgtctcaaaaaaaagaaaatagatgggtggcctgtatttattatgagaatgctcagacaaacccacaccatggacaattctacaatggtaagtataatcttcaaagatggcagagaatctgaggaactgttcagaaggaaaggcaaataaagagacttgaaactacatacaacacctgatttggaactggatccttttgttataaagaacattaagatgataactggcaaaacctgaatgtggtctgaggattaggacagcagtaattctcaatgttaattttctgatttttatggttacattgtagtgatgtcaaagaatgtactgggtaggaaatacattctattcaaatgtcatgaagcatctaatgtcaaagggtcaggaaaaaagtttgttattacttcaaaattttaaaatataaggaacaattaatcgtcttcgagagtttttggaggagttcttattgtctaaaaaagtgaaaatactggaagaacgtaaggcattggaaccagaaagcctaggattttttttttttttttgagatggagtctcactctgtctcccaggctggagtgcagtggcacaatcttggttcactgcaacctttgcctcccaggttcaagctattctccagcctcagcctcccaagtagctgggacaacaagcgtgcaccaccacatccgggtaatttttgtatttttagtagagacggggttttactatgtcggccaggctggtctcgaactcctgacctcaggtgatccacctgcctcggcctcccaaagtgctgggattacaggtatgagccactacgcccagtcaagaaagcctaggttttaatcccagcttcatccttgttaactgtatgatctgtgagaagctactatacgcctccttcaatctcattctcatagctgtaacgtaaaagaatgtatgtgaatgtgctctgaagctataaagcgttagagtccttaattatcagtattatttaaatgtttgtagttttaacctttgagattctgcctttcacaaaagttgaatgggctgtttcattgattatatatatatatatatatatatatatatatatatttgtactttttgcagagacaaggtttcagcatgttgcccaggatggtctcaaactgctggactcaagcgatctccctgcctcagcctcccaaagtgctgggattacaggcctgagccaccctgcccagccaatgttaataatatttgaatattgctacaatagctgttgggcttcttagctattcaaaagaagtgcaaacacttttagaaagcaattaactaggtaacaaatgatattacatgcatgatttatttgttccataaggcaaaattttgttacgttttatgtaatttgtttaatatcccaatacttatgagctactttggaatcatctacttgttatgaagtgt

SEQ ID NO: 1886098 - DNA, 4001 bp, Homo sapiens
tcctacaaaaatctccactctcccccgggttcatctgagtaactagacagaatggatgacgaggaggatggaggtaaaacattagtaactacttaattaattagtgtataactagctggtaggaaggtggttaatggagagttgccaccttattaaaccagaaaactgttatcagcacttctcagagccctttgggctaggtaatgtgatttacaacagttcttcaccacccaagcagcatgggagcagagcagactttgcattctctcctaggcctgcacttgattaagcttacatcatgtgactgttcaggtacagtgtgagaagacagcatctcatcccctcttctagaactgatcattgattggagggctaattcttcaacctagaaaagaagagttgaggacacttttccttactatttcactggactactgatgtgggtaaactgctgggcacactatgaaacatttgcatcaagagagggaatgaaaactatctctgtgttgctctagagggaaagttgagggggtaggctcttaggttttctctcttttaaggagatgagtaaagaaagactctagcccttctcccctgggctgaacaggtgttctggctgagtcatggcttccacttctacagacctagcaactcaaagtacaagtgtgtcattaaaacagccaggtgtcatctgattcctcagagagagagattccctggacctgaggctgttactcagtaatgagaacgtgaaggaaagaagaatagaaaacagaggtgtttgctgaagcataaggaaatctgggctttggaggtggtcatcaatacactcattaagtacttgtaagggtaccgtggcaatatagaaacacaaataagtggagggcattatgacttccctaaggaggccgggcgcggtggctcacgcctgtaatcccagcactttgggaggctgaggcgggcggatcatgaggtcaggagatcgagaacatcctggctaacactgtgaaaccccgtctctactaaaagtataacttccctaaggaaaaatgcttatgattttgatatgtcacaggtgtacaatacttttccttttacaaagggctttggtaatcctcacctcatatggacttaaagtttctgaaaaagggccgagcccagtggctcacgcctgtaatcccagcacttagggaggaagaggcaggtggatcacctgaggtcaggagttcgagaacaccttggccaacatggtgaaaccccgtctctactaaatacaaaaaattagcccggcgtggtggcacatgcctgtaatcccagctacttgggaggctgagacaggagaatcccttgaacccgggaggcggaggttgcagtgagccaagattgcgccaccgcactctaggctgagcaacaagagcgaaactctgtctcaaaaaaaagattctgaaaagaatgctgagcagggattagcataataacctccctgggacttttttttttttttttaaggcagggtctccccatatagttgcatgctggagtgcagtggcacaatctgggctctctacagctttgaccacctggactttggccatcctcccacctcagtttcccaagtagctggactacaggcacgcaccaccacgctcagctaattttaatttttttttgtaaggccggccgcagtggctcacgcctgtaatctcagcactttggaaggccgaggcgggctgatcgcttgagctcaggagttcgaaaccagcctgggcaacatggtgaaaccccgtctctactaaaaatacaaaaattagccgggcgtggtggtgcacacctgtaatcccagctacttgggaaggtgaagcacgagaatcgcttgaacccagaaggcggaggttgcagtgagccgagatcatgtcactgcactccagcctgggcgatacagtgaggccctgtctcaattttttgtagagacgaggtctcactatattgcccgggctgaggggctgcattaagcacaggtttgggaagtggcccacgtgggcctaaatcccgactcctcctcaaggccatggcgtcagtaacaagagccaccggaagctccagacgttaggacaagtctcttctcccagggcctcagtttcttccttggtagcatgggaggatctaggagttccttctggcttggcaaaactagagcatttcaagcgccaaaacaaactagaaaacagcagctcaggaggaaggggtcggtggccagaggggtctaggcgagccttcgggagggagcacttcctcagcgtgctgtctgagggcgatgaacatttacaggaagcagcaggtaggactgcacttgccaaacacagatccctgagcctcaccctagacttgcgaggtcacgattctgaaagatagggcctaagaagcgcacagcaaactccccaggtgattcagatacctgtttgtttgtaaacctctaaattggcgccaccacagctagtgagtagcggagaactggccgcagcaggtggtcaccacagaggcccaggttggggggaaatggtcgctcgggaggaatggaggaggggcaggagagggccgcggggtcaccttgaggcggttcagctggtcgtgcagggctgccttcaaccgcagcagcgtctcctcctccttgcgcagttcctgaagccggctcagcatgttgcctggtcacatagccaacctccgggctgctgtcggcccggcactcggtgatgacgccatcgccgccgactcccggaaaccgagcggggaggcggggctgcccgacacattgaggaaaggcgaggagtgcgcccccttccggcgcccgccgtagcctggccactccgcgggggacgagctgcaggaaggggtacagcctgtgtcaaaacaccttgattcatgagtaatgatcaggattttgaaattagatccatggagctgtaaagaacctgaagaaatcttgggtttggctatcctttaatccgataggccatttgcgcaccaagtggtcaaacaccgtttcaaatgaccgggtgaacagcacttccaatgtggtgtgccaccaagtggctatctttaaccccacaaaacttgcacatgtgtttgaaggcaggcaccaaatcagtagcacatgaactctactgtgttaagaggccctgcagggtaggactcacagtggactttaaaggggtaaggctgcacaaaatagagaaataaagagcatgaaaataaagccgtgctaagaaacgacgtgcttaagaactgagatttggccctggaaatggggagggttaacagatcaccttggctgtgaactgagactgtcttgacagttcgagactgtcagagagaagctgacagtttaacaatccagatgcaaaacaagacttttgacacaggacaagaggttaattctagggtaatatttgcagtttagctttatgggtaaaaaaaaacacccttatatctggaggcatttcatgggtacttcttttgaacacagttggttaacataatcaccaagacacacaggcagtcctgaaaaatgcttctggtacttttcagagagtcttgctctgacgcccaggctggagggcaatggtacaatcttggctcattgcaacctccacctcccaggttcaagtgattctcttgcctcagcctccaagtagctggggttacaggcatgcaccatgactggctattttttatattttcagtagagacgagatttcatcatgttgaccaggctggtcttgaactcattggctcaagtgctctgcccaccttagggtcccaaagtgttgggattacagatgtgggccagtgtggccttctggcactttttcaaaccatgggtgaaaatactcaactctattgttatagctggttaaaaagaacacttctcaagaggtaatcaattttactgcagtaccaaaaaaattgtgctctccagttgtgccctcttgtggttaaagtta

SEQ ID NO: 1886099 - DNA, 4001 bp, Homo sapiens
caaccctgggcctaagagactgtagccccagatgaccctagggtggcccaggactaacctaaggaaggggtcctcccccaggtggcccattcagtgcagaggtcccttgggcacacgacttcagactccagctgccaaactttggcctgtggagtatctcctcctccctggtcttagtgtaagggaagtgggcatgacaactgccctcctgtcccacagcttgggatgggatgaggtcacagggtggggtccgccccaagatgctggcctggcctggctcagatgagagccctttgggtgtttctcagtttcccccgcccttggttggggacaggatgggtggaggagcaggccacccccaacgcccggcagggagcactgcctcccttccccctctcctctgggtcccttcatccaagggctggaaatagaatccgctaagtaatgattaaagtcaaattcagacctaaaaataaagagctggtgaaggaagagctggtgctccctgcatggctgaggggagaagtgagcagggagaggctggctttgggtggctgagcccctgctcctcgggatcagaagtactccaccagttgggggggtgctcttttatctgccatgatgtggcccattaagtgtagacggcaccactcagggcagactggcaggacccattagaaaaaaaatcccatttttcccatggggaaactgaggcccagaaaggagaagtggtttgtcaagcgactatttgagagctcccctcagcaggcccccagggactggagggccctgtgcagcccagcctgccctttctgcctgctcagtttctcttcctggttttgaggtgctaagatgaagtcagcttctcatcacacactagctgtgcacacaccctccaaccgcagcttccctccacccctccttctgtggtctgggcccagagtcgaaggaacaagtagaagagaggctgcttggtgcccccctggctgtcctgatcatggcatggttgtaagcctcgtgggcaggcgaaaacctgggcatcatctgccccccttggaccctggctgctgcttctcagcccagcctgacacctggtcctcatgcagactcgcgcatctatctatctgcagcttgtgctgtccgtgctgcagggagacaggagggaaggatgaagagcaaaccctgagagcgcctctgctggcgggtagaggagacgaggagtcagtgaggggaggcctgtggttctcacttcctggcagagctggtaggagctctgaagctggggctctgcgtgggctggggcagcctggagggcctcctggaggggaaggtcctgtgaaagttgagaagtgtttgaagaagaagcgtggtaggaggagaggtccttgtttgaagcttctgccctctctagggctgctggctcttttctgtgtgtccctcgacaggctcttggcctctctgagaggctggggtatgcagacaagcaagaagtgggcacagaagtacctctgcttcccagagcagaacagccaagctctgggcagacctcccctcggtgccccccacctgtccattttcagggtgtcgtctgtcctgcacaaggaaaggtgggaagaaaggtcccctaaccaaggttcagacaactctgagctcaagtacccacacagctagttcctcctctgtcagagatcaccagtccttgccctatggggtgtttgaaggattaagtaactaatgcagtgccccaaacccggttgggtcagtcagctgtaattcccgtgttctcattctgcagcccatcctgctggaggagtgtactggtaacacccccatctcccttaagtagtagcaagtctgtcctttgtgttgatccccacagctttaccttctgagctgtgtgttctgcagatcctggttctgaagtggggagaccagaaatctgggggccgaagttttagacagcttatgggcctccagccgtcagtctccccacctagaatgtggccaggagacttccgggtgagggacaagaacatgactttgaagggtccattgaaggctagtgctgagaggctatatgcaaatgcaggcaaatgaagatgcaaagaccacatcctgtgctaagggggtgggggagcagaggcctgggttagggccctggggaggcccagagtccccattgcccagcgcacataggtaattaggctcctgagcggtaattagaaacctttctgggccaggaatggcagcctcaagccgcagcggtgcctggggagtaggctccccattagcctgctctaaccccagcccccacctctcccaaaccactagacgggatttccggtcccactgaaccattgggggcaggggaaaaaaagccagtgtgttgctataatttggtatttatccattaaatccgcccttctccttaggtcagggtgctgacgggagccccgggatgggggtagggcagcgtgccctggagccagagcaggcattcttctgttccttcgtaaccgccccgggaggtgtaggcatctccaagaccctggcgcccaattctgctgctgctcaccctgagacacctgtgcagtgggggtgctgagggaccaccagcgcaggctgcgggggtcagtggaagccctcgggcacccttccttgcctgatgtgtggtggggaatgtcacagtgcctcagcctggtgtcctctgcagaaccagaggtggagctgattttattgctgccaaacttgcccaactgctggtgggtgccccgccctcctcaggtgcactgccctttggaggggcgggcccaaatctgaaacttaattctgcctgtatctgtactatgacctgtaggccctgctcggaggttccctgggcccccatcctgaaccttcttcagtcttcattaactcgctctgtaccacagtttgcagtcttaatcctggtttacttcaaggcgcccctctctcagtcactttcccctaaaatccttctagctcctgctcccctcacccatcttcctggaagccttcccgggtggcccctgtctcacaatctattgaggcactgaacataccaggccatggctgaccatccagtaaccaggaggacaggagccgggtctgcattttgtggtggttcccagcatccagccctggcttgtgcacagaggagaggtgtgtgagtggtgaccttgggtccccaaaggcaggacctcttgagtcctttccttctccacccggatatcctggcctaccaagcatggctctgggcacacaggaaggcttctaaaacactggctcaaagaatgagaaggcaaggtggaccttgctgttgcctgttttgcctccagtggctgtccccatcccccagagcatccagctaggtcctgtggcagcaccagaatctccgggggccagggccctgagttcccccaggtcttttgtgcacttcccttttcagtgggtatttttagctgggcgtaaacagttactgaaggctcccacgccccattaggcagcagagttttggcaagggggaagggcaagggagccccttgacctcccctggccctcagcacgtgcctggccttgggggtctacagctgcttccagggtaggaaaagggcagcctgggagtttctgggctcccagttctttctccccactccttgtcagcctgggctcacaagaaaggctgcctgaggctgcagccactgacctcagcgcttgggcacaatgccagcctgttcccgggaccccagcacaagggctgctgggagccgggtttagggcaggaagtcagagtgaagcactggtcctgccacatcccaagccccttgtcccctagccctgcgggaatggggtgacagctgctgtccctttggggttaactatagtcctattggttatgagacctcggtgtggtacagccagcctggcgtcccctttttttcattcgttcattcattcattcattcagcactcatttactgagc

SEQ ID NO: 1886100 - DNA, 4001 bp, Homo sapiens
gaaagatgcatagatcaagtccctgcccttacagagatgatagggttgtggagagagttacaccaacagttacaagtacttgacgccactctgaagctgagcaggcatcatagtagctacaagggggggaagaaatacctgggtctgtctgaaagatcagggaacctccttgtgaggcaccaatacatctaatcactctgtagttactgactactaggcaccatgagagatgtcaaaacttggtcaggcatgattagtgttaagaccagggtgcctgaaacttagcacttgttttttctcttcttcaggatgctggaaaatagaaaatacatccaaagatggctggccagtaaatgaatggggtacagaatttattaatctgtgcaagcaaactttgcctccatggagggtgctctggtaaactaatgcagaaaattccagctctcctagacttcaggacctgcatgctcaggtgtgcctgccaaggtataactggtccagcacacagggctccctcacacacccagctgcaggtgaacagagagaaagcatggagggaggaagggagggtggaaagtggggctggggaggaaatgggagtgatgtgtgaggtactgcccaggtgttcttactggatgggaacaaaatatgccagagagcaagaggacatgccaggtaaggagagcgaggtgttagacagtgatcttgctccctggtgaaccaggggctgttgtcatgcatcacctatgacaatgaaggaatctggggaaaagaaggagagatataaattcctctcttttacaacagatagtgaaagggaaataatgcatatgtataagaaagatagcctgagatgtaattggcccatctgtgtgcacaaaagcaaaacagagggacattgctccaaagggaaaaataattagggcagagaatgcctcttactgaccaacaggtggcactacagaccaaacacagcatggttgttggtctgtaaagtgtggggtagtgtgaaagttgggtatcaaaacccagagtggccagacaggctcacacctgtaatctcagcactttgggaggctaaggtgagaggaccacttgaggccaagggtgtgagaccagtctggatatcaaagtgagactgtgtctctgagactttctcgctactaaataaataaataaataaatttttgatagaatgaaaagatccggagtgcttacaatggaataccgttcacccataaaaaagaagggaaattcccatgtatgctataatatcaatgaatcttaaagacattatgttaaggctgggcacgtggctcatgcctgtaatcccagcactttgggaggccaaggcaggcgcatcacgaggtcaggagatcgagaccatcctggctaacacagtgaaaccccgtctctactaaaaatacaaaaaaaaattagctgcgtgtggtggtgggtgcctgcagtcccagctactcgggaggctgaggcaggagaatggcatgaacccgagaggcggagcttgcagtgagccgagatcgcgccactgtgctctagcctgggagacagagccggacctcgtctcaaaaaaaaaaaaaaaaaaaaaaaagatattatgttaagtgaaataagccaggcacaaaataacaaatattgtatggttccactaacatgaggtacctagggtagtcaaattcatagagaaagtagaatggtggttgccagggactggaggaagggggagtggggagcagttacttaatgggtatggagtttcagttgggcaagattaaacatttctggagatagaggatggtgatggttgcacgataatgtacttaacaatgggtaagatgatattatgctattttaccacgatttaaaacataaaaacaaaacagaatgcccataatgttctcttataccaagtggtggatgcaccttctaaaacaggcaagagacgaggtaaaagatgtttccccaatcctgcctgtctcaacctgtcagttcctcttgtcctgcccaaatcctcagttctctctttgcaacttgttcacttacttttcatcagatgcctatttcagtgtaggccttgagccagtattgagaatgcattctctaggggccaggccatttaccagctccctctcatccactccatttaccttccctcagccaatcctcagtccacacattttccgctttcttctctcactcaacatccattaaaaaaaaaaatacttagtccatttgagctgctataacaaaataccttagactgggtaatttataactaatagaaatttattgctcacagctctagagctgggaagtagaagatcaaggccccagcaggggcccattcctcatagatgatgcgtcctctatgttgctgcatcctcccatgatgaaagggcaaaagaggtgaacaactctctcacacctcttttataaggccactaaccccattcaagagggctccacctcatgacttaaccatctcccaaaggctcaccttgtaatactgtgacactggtgattaagttttaacatatgaatttgggggtcagatcacagcaaatacttttgatttatatttattttaattttgagagggttagaaggggtaataggtggagttttctaaagaaaaagccattgcttgagtgactctaagggcagacaccaacaagccatcctctaattagactaaaaatatgcaacagcaacagacaaccctcaaatctctgtgacttaacacaccaataatttactttgtgttcacattgcatgtccactacagatcaagagggtctgctccacatggtcacctaagcttacagaggctccaccaactagaatgcagtctccgtggtagttataggagggcaagagagtggagaattacagattggcttttcattgtctcagcctagaagtaacctgcatagcttccccttacatttcattggtcagacagaaccacatggccctgcctacctacaaatattgtatctgtgaagcctgattatctctgctataggttttttactctgtgctctcactgtgccaatagtgaaattgtggctgtttcttgtgaatctactcctatccctggactctaaagagtgggggcctcatattacaaattatgtaactttggtgcctagcacaagactggtgcccagtgattgtggagtgattgaacaatcggacaaagtaaaggtgaacctaaagaaaggtggaggcagtgcctgggaggatcagtttaggagcttccctatctgaaaaatgaagcagggaaggccgagaaaacaatgctatcagttttaaaaatgaaaccaaacctcactgaatagagtggacagtctgtgtgtaacacaactcattgtcggggtgggtttccatcaacaacaaaacagactgcatatgtagaagaaagggaaaatgggacccccaggggcactacgtggctttggaaaaaaaatctgatcttagagcagcctcaagaataaactaggcacagaacagtctgacttccctctcataagttttatttatttatttatttatttttttttgagacggagtctccctctgtcgcccaggctgcagtgcagtggcgcgatctccgctcactgcaagctccgcctcccgggttcatgccattctcctgcctcagcctcccgagtagctgggactacaggcgcccgccaccatgcccggctaattttttgcatttttagtagagacggggtttcactgtgttagccaggatggtcttgatctcctgacctcgtgatgcgcctgccttggcctcccaaagtgctgggattacaggtgtgagccatcgctttcggccccctctcataagtttttggagcttaagaaggactaaggtgcaatccctgggtcaccatggaaaaaccttgacttatccagctgttttttttttctcttgtagaagaaaaaaaggaattaaccctacataattacttcct

SEQ ID NO: 1886101 - DNA, 4001 bp, Homo sapiens
catgggcggggacaaataaggaagtaaaagctgactccaccccccccacccccgccggcccctcccctcctgcccccacgcccagagactgcaaccacccgttggggttcctttccatgacataagggctttgttcttttgctcttcagaagaagtctttgggtccctgccatcttaagagctataaaactcatcaggaaggtccacagctccattcttgaagtcagcaagaccacgaacccaccagaaggaacgaactctggacacactaaaaatacaaaaaaaaaaaaaaatcagcaggcttggtggcaggtgcctgtagtcccagctactcgggaggctgagacaggagaatggcgtgaacgtgggaggcagagcttgcagtgagcggagatcatgccactgccctccagcctgggcaacagagcaagactccgtctcaaaaaaaaatttttttagagacaagtggagaaacaaatattaactgtacattaaatattatacataggaccaggcctggtggctcatgcctgtaatcccagcactttgggaggccgaggcgggtagatcacgaggtcaggacttggagaggagcctggccaatatggtgaaaccccgtctctactaaaaatacaaataattagctggatgtggtgacacgcacctgtaaccccagctactcgggaggctgaggaggagaatcgcttgagcccggaaggcagacttcatgccattgcactccagctttggcaacagagcgagactccgtctcaaaaaaaaaaaaatcatatatagatgatttgatgatatggttaattttgttaggtgtgataatggtatcattagtagcatgatgtccctttgtctttaggaattgccggctggcaatggggaaggggttgtgcatccactatttcagcccctactactttaagtctcttcccaagcacgttcctctcccaaagaagttaccattctaaatgcctaacagctggaagtcccctctggtggtttcacaagtggagtgattttacaggagaaacccaggtttggggtttactatttacttgacggcatttgtaatctgtaaggctcttcctgcaaagaacaggtgtttccaactatacgtgcctggtcaaggactatttcttgggttttctacgttctgcttttgacagctgacttaactcagggcctgcctcactgaagggagaaaaaggaaggcctcggtcccccaatcatgatgaccgggttgtaaatactgcctgggaagggataatacagccttttccattgtgtgtgtgttttagtttttaattttttaaatttcaagcttaggcagtggttcagtgcaaggactgaaaagcgctacaagagaaggtgggcaagcacgaggggtttcaaatacaggggtggaagcagtagaaggaaatgtctcttaggcccagaggacggaaccaaagggtcaattagaagggaaagggacctgcggacctggggagaggtcactggggttctaagccttccacctctgcttccggaatttccacgggtttcgcggccttctggagcggcgacttggccacgcttggggtacagggttgtgggaagtcatgtcatcccctccctcacgtgttcccttggccatactttcctgcccctccacttccaggcaaaacactcctcgggacaggccttgggacatgtcccagatacacaatgggggcgctggacttggtgataaggggcctgcaggaagaaaaaggcagccgtgagagccgcctgcagatccacgatgcatcttaaaattacaaattctcaggccctaccccagacctactgagtcagaatacccagggcactgagccagggggtgggtgcccgtaggcccggcagcacccagcctgcagaagctccacctccgggagcgctgagctaggaccagctccccacgcccctgccctggggctgccgggagtccagtcctgttacacctcccgcggccgcgcacagcggcaacccgggcgtgcgggggcgcgcgcggtcagggaggggcctgcggaggcgcgaggcccccggaagcgcctttcccggaaggcagggaggcagcgccggcctccggaggcggcctgggcgatggcggcggagttttgtccataacgtgggcaaccgcgcagctggaggatggcctcactcgggcctgccgcagctggggagcaggcgtcgggggctgaggcggagccgggccccgcggggccgccgccgccgccctcaccgtcctctctggggcccctgctccccctgcagcgggaacctctctacaactggcaggcgaccaaggcgtcgctgaaggagcgcttcgccttcctcttcaactcggagctgctgagcgatgtgcgcttcgtactgggcaagggtcgcggcgccgccgccgctgggggcccgcagcgcatccccgcccaccgcttcgtgctggcggccggcagcgccgtctttgacgccatgttcaacggcggcatggccaccacgtcggccgagatcgagctgccggacgtggagcccgcagccttcctggcgctgctgaggtgagcggcagcgcgggccgggccgggccgggccgggccgggccgggccgggctgggagatccccggggcccggcctacccggactcccggatgaccttgggctgggctcttctgacccgcccggggcctcagtttcctcccgagccgttgatgctccggagggtcgaaatcgaaatctgtgaaccaggacggctcagtcgccaactaaacgttagtgtcttcattaggcaagcgtgcgttttaccattgaaaggcgtttcgcattccaattatggattgtcgctcagacttcagaattagacaagtggcaaggatagaggggcagatcaggttgtcctgattgcccatttgcgaagttttatgtttttgtttgggggaagagagtagttgaaaaatcttgcaggactgatgttttggggttattgtcacccccttccccccgctttttttgagacaaggtcttgctctgttgcccaggctggaatgctgtagcgcgatcatggctcactgcagcctcgacctctccgggctcaggtgatgctccgacctcagcctcccgagtatttgggactacaggcacgcgccaccacgcccggctaattttttttatttttatttttggtagagagagggtttcactatgttgcccaggctggtctcggactcctggggtcaagcgatccgtccacctcggcctcccaaagtgctgggattacaggcgtgaaccaccgcgcctggccacttttttgtttttgtttttgtttttcattaacgtattagttgtcaagacccaggaaagtaaatacgaaaacagacaagtgaggctttacctgctttgtgtttctacacacaaggtcacatttgcttataaatgaatccctcccttgatgttagaatttgcttgttggttatttgaggatagtagattgacatctaatgaaaaggtgattgtttggcattactagcttttaatcacagccatcctgttagggaggcgtaagaattgtttaccccaatttcacaaatgggactgaggcccagaagagtcaagtatcttgcccaaggtaacaaacagctaactcacactgaagaccatgtctgtttcattatactaagatggttttaaatagctgcctgagtagaacgtgttgttattaaaatggcagagtcttgggtagtactgaagcaaaaacaggcaggtcagtgggacagaattagatacaaaggttcacagttgaatcagaaagatgaacaagaaaatgaatgtaaagttcacacaactagaaacaaataataagattccattgacgaatggataaaggacaggatagataacttagagaaagaaaaaatacaactaattaacgaatgttttacctggctggtaattaggaagtgcaaattaaaagacagtg

SEQ ID NO: 1886102 - DNA, 4001 bp, Homo sapiens
aggatgagattttgagcctgagttctgcagtgtcttttgcacctgtctcgcctttccttcaccattgtcattccccagaattcaggcctaccttatctttcacatttgtgatgcatttacagaaaaattggctcagtcagggaagtaatagttggtagtgtgtatccagcattgctcacgagttttaaaaataaccatgaaatatataatatacatactgaaagtacatttttctccaaaaaacctacttctcattaagtcatagagtgctaacactcatgtaatcccagtgtcttagaatgttcggcttatttggctcacggttttgcaggctgtacaagaagcatggtagcagtatctgcttccagtgagggcttcaggctgctcacggtggaaggcagacaggagatgacatatgcagagatcacatggcgagagaaaggagagaggaggtgccagtctcttaatgaactcactccttacagaatacgaagccactcatgagaaatccactcccacaacccttcccaccaggcctcacctccaacactggggatgaaattttaacatgagacttggtagggtcagacaaaccaaactcaagccatagcaccctacttaggaacagaacatcaacagcactccagaagcacctattacctcccaagcactactccctgcaaagctaactatttcttttctttatacttttactacctaaacatatatccctaaatctagattggtttgcctgtttgttgaacttcccattttccaaagtggttataccaatatacatttccagcagctgtgtagtttcagttactccaactcttgaccaacatctggcattttctgggttttccattttagccattctgttggatgtgagattaaaatatcatttaggttttaatttgcatttctctaatgattaaattagttgagtatcttttacatgtttatcggccatctacacgccccttttatattttttaagaaactaatatttagatacccttttttgtgaggtgactgtttaagtttctacctttttttttttttttttttttgagatggagtcttgctttgtcgcccaggctggagtgcagtggcacgatcttggctcactgcaacttctgcctcctgggttcaagcaattctcctgtctcagcctcccgagtagttgtgattacaggtacgtgccactacgtctggctaatttttatatttttagtagagacagggttttgtcatgttggccaggctggtcttgaacttctgacctcaagtgatctgcctgcctgggcctcctaaagtgcttggattacaggtgttagccactgcctggcctctacccatttttttattggatgtcttcttttttattgatttgtgggagtctacaaattcaagatagcagcaaagagatgtatttctattgtagacatgaatgcatttggctgggtgtggtggattacatctgtaatcccagcactttgggaggctgaggtgggaggatcacttgagctcaggagtttgagaatagcctgggcaacgtggcaaaacacagtctctacaaaacatacaaaaatgagctgggcgtggtggtgtgcacctgtagtcccagctactcaggaggctgaggtgggaggatcgcttgagcccaggttgaggctgcagtgagctgagatcacatcacggccttccagcctgcatgggcgacaaggtgagaccttattccctccacctccccaaaagatgaaatgaattcatttgtttgatgctattagaataccagtaactccccttactttggccccaaattcacaaatgaaccctccaaaaggtaatgcagttaacttcatgcattctctttaaacaatgtactgagtctttatgccagggaatttggaattaacagatacagtacaggtctctcatttcaaagtagtattcctaatcatgaaggaaatgagagacctgtactggaatcctgtctttaacacctttgaggatggtgaatttaggtaagttattcaacctattttagcctcggtttcttcattggaaaaatggggcaaacaatacttattttacagagttgtgaggattaaatgagacaatatatataatatgctttgcacagtggctggcatacaggaaacgtttaatatatggtagctactataaactcggttatttccgtgtagctttccatgtctacatggagggagaaaatgagcagatgtccattataatttagctattacagttttcactctaaagtaaaaaaggcatttagatttatatgtcttctgggagtttggttcttctgactcccttcatctgtgagaccataggtacttttatgtaatatgataaaaattattagaaaaagaaaaaaacggccgggtgcagtggctcacacctgtaatcccagcgctttgggaggccaaggcaggtagatcacctgaggttgggagttcgagaccagcctgaccaacatggagaaacccgtctctactaaaaatacaaaattagcagggtatggtggtgcatgcttgtaatcccagctacttgggaggctgaggtaggagtatcgcttcaactcaggaggcagaggttgcggtgagccaagatcgcaccattgcactccagcctgggcaataagagcgaaactctgtctcaaaaaagaaaaaaataaactaaaaaggaaaaaagggccgggcacggtggcttacgcctgtaatcccagcactttgggaggctgaggcaggcggatcacaaggtcaggcaatgaagaccatcctggccaacatggtgaaaccccgtctctactgaaaatacaaaaattagctggatgtggtggtgcacacctgtaatcccagctatttgggaggctgaggcaggagaatcgcttgaacccaggaggcagaggttgcagtgagccgagactgcaccactgcactccagcctggcgacagaaaaagactcccatctcgaacacaaaaaacaaacaaaaaaagggaaataaagaatatgcaaagtacaatccctcaaatttttattagacccacagaaataaaattagtctgttaaactgctataagtttctaaattcttactttctgtaaatgccttgacatggatgtgtaacaaagggcttacagactggcactgccttgtggaccacacttttggtgagactgctctagagcgctgacaaaaatcagactttgaatccacagggctgaagtcaaagcaactgaagggtgtcctgactcaccagctggccacctagtggcctccttctagtcataagcacaaccttgtgtcactccttagttcaaaaaccatccattattctgcctgactcaagggtaaaatctcagtcctttaatctgacatccaaggccttccagagctggttctaaacaactttttaagtctgactttccactatcctctacttcactagactgcattgtccaatatggtaataacttgtcccacttgaaatgcagaagtgaaatgaggctaatttaggaactgaattcataatcctaactttaatttaaaataaaatttaaaaatatacacgattcgattaccgtaaaacttttaagtatgcttggaacgacttgggtacgtgaatctattttttcagctggaaattttatgaaatcaagtactgagatatgctataagtataaaatacacaccagatttcaaatgcttagttatgagaaagataatgtaaaatatttttaatatttagtaattttttatgttgatcacatgtgaaataatatttggatatgctaggggttaaaagtgtaattaaaattaattccacctagacaacatgccccaaacctaggcatcactattgattcctccctttcctcatttaattggtaagcaagataggtcagctttttggatccatccacttccctcatctctactgctactatcctagtccatgatactccatt

SEQ ID NO: 1886103 - DNA, 4001 bp, Homo sapiens
tccactagaatgtgccgattacaatattttatgcagtgtttcaaggaatacacagagcccccaatatccagttagaagccctggctgtgaatctagaattttattacaggtgaaacccagcacaagtctgattgagagccattgcaagtcacagaaactctaggccctgtctaagtaaaggcaaaccttggagtatgtcatctgccactgaaaatgcatttaatgatgactcactctttcctcactatacaagtttgttcaacctacacctcttcagctacagactacctaccatccctgaaactctgttctgagagtaaagggattacaaaacctggctgaaaagacagattcaatggcatgttgaaaaacacagcagaaccagcacatcagactgtaaattgattgtcttgcacaggatgttagctgctcttcgaatgaggttcctgagtggcacctgagcctattgctggtggcatcctattctgcctgttctctctttcttcctccttccccattcctttcattctcttctcccttattcttcctctgcaattctttttttccacactaccgttggccggtccctagggatactgtttaatctggcccatggtacaagagattttagatcttcattgaagtcactagagatggcctgagtgagtcactttgaattcaatagacaaactgatggaaggctctgagaagacctcaacgatgcccaagaaatgtgttcttactgtagaaacttactattttgatcaaaaaagtcattttggtcaaaaaggggagttgggagattgcctttttgttttgaaattgatttggcttcaagggaagaagattgcctaaacaaaacctgctgatgaagtcacaaaatgactccacctctggaatgagctttattttcttataatttggcaagaaatttggctttcaattgggaatgcacgtcactctacccactcaagggcaagatgataaggttctatcagaccaagcgtctaaaggaacctgagactctaccaaggtcagaaatgctgcaattcaagccaaaagatctttcttgggcttccttgttttgacttgtaaccataaattagtcttgcctaaatgtctgatcacattataaaacagtaagtgaatctgtactgtacagcaccctctgaagcaacaggagctatagatgaaccttttaggggattctgtaatttttctgtccctttgatttccacaggactctaaattgccccctctgaggtcaaggaacacaagatggttttggaaatgctgaacccgatacattataacatcaccagcatcgtgcctgaagccatgcctgctgccaccatgccagtcctgctcctcactggcctttttctcttggtgtggaattatgagggcacatcctcaataccaggtaagtcagtcatttatttctgtatctaaggagattatttacttgggattttggtccatgatggtaaagaaaattttgcaaaaggacaaaaagcaaacctggaaagatctctgaagactatgtctgtgttagcaaatgaggacttgggagaaaattttcagaccaattatctgcacattttaaatgaaagcacttaaaaaatatcttagataaacccttccactctgtgctgtgctttcgtaaagtagacttggcacaagtaccctttaaaacaagctcaagatggggtggagtaaagtaaaattccagggttttctggttaacttttaaaaaatagattgcaattttgctctgaaggtgaaaatgtctctggaacatcttcttcactgcttttcttctccctttcactttgtttccgccatgccccctctttgtcttgtatttatcccttctctttattccactcatcattttctcttattcttgggaatgtggtgatagtggtccccatttttctcccactgtctggatcccattcgacccttatgggagcctggtagtgggagaaaaatggggaccactccagtgctcttggaacatcataccccgggagaatcttcaacaagatctgtggttcaatcaaaagcagagaataatataattattcagataatcccaatagaaaaccccacccttccacccttaaagccgcaatgatcagatatcagattaattcagaatgacttgaaatttcagactgcttctttaggtttcagtgaaaatgcttcattgcagacacatctgttcccaattccataagatatccaatgagactttaagagcatagttacacactggtaagtgtggtgggcctagtctcagtgggatcagaagtgggagcatggggctagcacaaaatgctctgtgtctggattctttttaacattccagataattgcctgtctctctgcctgattcagcctgatattttagattactttaatgcccagtttaaaggaacatttagttaattttgttctctgctccctgacagggtcaactctagagaagggaggctcagagctaagggacaactgtttcatggtctttaacttgaactctgttccccagtgtggcccttcctcactggatttctcctctcccaagggggcttctaggtcagggtcagtgaatggtcggggtggggtgagtaagtggtgggggtggagagcctttttttcctcttcttcccttcataggctcaggtgctaaattccaatttgtctgtgttagcagacaatcaggccaggagagtccagcattgcccacgcagcattgcccatccagtgagccacaggttctcaagcttttaagtctatgtaagaacacccagcaggtaggagcttgttaacatttctgttcctggaccctgctcctgactttttgactcagactcttcaggcctagaaacatgcatttttaaaaagtccccgcagatgcttatgttaatcagcactggtggaatttccttggacccttgaccaaggaggtcagcctgttaggacaagcctgagaaccagcagccctgaagctctggatcagtgggagagtaggcagcacctcactctgtccaccatttctgggccagggccatcatgctgatccactgacagtcagatcaagtagcacagtgattctcagcactgtctgaggtaggagctcagctagtttggggttgctatttttaaaaaaatctcccttcctgattttttatgagcagccaaggttgagagccacaaatatgagcctaactccttcatttgacagaaggggaaactgagacccagggagttgatctgccttgcccagacaaaacactatgacaagcatgagaagccatggagttcaaacttgtcgttttacaagtgaatggttaaagcccagtgaagggaaatggcttgtcatctccccagctggacagaaagtgggaatgtagggggaccaccaggaagtcctaaagcccaggttgatgatcattttgctagacaggtagtttctagtttcacactttccttttgaaaacagaaggtctagttagaatccactagtagcacagactgtgagatcctatggtttctggttgggggagggaagataagaaaattggccttgtttggggtggcttttgctgatcaatactcctgagctcctgccagctccctttaatcagtggctctctaggttcttggttttagaggtttaggggaagcacagagtcaggaaagctcaggaacagtgaaagctggagggacttataatgatttaaagcccttaagtgagttataatttacaaagcagtttcgtgcccattttctctggtgaggttggtgtgtttgtgtctgttttgtagttggcaaaactgagactcaaagagtcacacaactagtaatgatgaaactggggctcatatctaagcttcttctagccgtatttactgctaagtaaacaggctgccctgttttcctgcttaggggcaggaggatgtgtgaaaagattaaagagatgtggtttctgcccc

SEQ ID NO: 1886104 - DNA, 4001 bp, Homo sapiens
ccagaaaaatctagaggtgttttcttctttgtttaataaaaaaaaaaaattaactccctggttaacaattaaaccactgagtaaagacaatttgcaatgtggctaatcattctgactctgcattagatgagccaaggaaaccacactgtatgtaccctcaggttttcctccaccttgttctaagtgtcctggcttcaaacaggtgctgaccccaaatgactggaaccaacaaaacctgcactgaggtcaactggtggggaaactgaatactcatctgtagacctaggcaacttgctttccatgtctgagattaacaaggctgtactcgctgaagcctaggagtgcacgtgatttctggggtagccacagaccaagccctaaaagggagggtgagagaggcagagtctgcaggggaggggcagcagctgaaaggctgagcgctgggaccatccataattggattagacagccgcaaccaactgactctttcagcagaccgagcccacattgtgctccagctagtggtcacgtaggtgtgctttgttttaaggaaacccaatacctacattcctgatttacaatacagatgctttattggggcacctcacatggtcagaccctcctgcctctctttcctttactgcttgaggtgggtggggatcacttcctgagctccaaggaaaaataatacaggctagagaatatttgcatcaatagcacaatcacagcaggctagactgctttaccaacactatcgaattcaatcttcaaagtacttccaaaggcattccatttattcccaatgtactggtgaggactctggaaaagttccacaaaacctttggggctaaagtcctctgaacgctaaagcctgcggccctggggccaattaacacacctcctataagtattaaaatctaaattttgctacccttccttatgaacattatttttaactctggattacctgggactgaaatcatgaatgttttctagagattctattacttgacattctcaaatacagtgcacacacaactactttcatatgctacaaagggaagagggaattgtgacatctgatagaaggataaagaaactcaagtccaaaagaactgcaagtatctgactgtgtacaattagttcttggtacaaactagatatacagtgtattgtttccaaaaagcattctgtatacaagaaaagtagattcaattacctaaataacaagatgacattctgatgatttggaggttaattactgtaaggcactaaccaatcaagtcaaattccagttgcaaaattgaattttaaaattgtaatcataaaattacaaactactagcaactatttcccatgtttaacagcttgctcccttctaaacacatacacatatatatatacacatgaacttctgtgtgttcatattctttctggtttaattcaagttgtcgaaaatctagacatgttgtaaatacagtcatccctcagtatccaagggggattggttccaggactcccacggatacaaaatccttggatgctcaagtctctgcaataaaatggcagcgcttgcatataacgtatgcacatcgtctcatagactttcagccatctctagcttacaatacccaatacaaatgctgtataaaaagttgttatactagtttttaaatttgttgtctttattgttgtattgtaatttttttttactgtttttccccccaaatattcttaatctgtagttgaaggaatccgcagatgtagaactgaaggagacaaagggctgactacctgcagttttacataagagattagaattacaataactcaggtaaagaatgttcacaaactggacgctaaactagggcatatggtcaagtatgacttaacctagactaaattgctcagcaggaaaatgtgtattttggccaactctgaccacctaggttggtacacctcattctgacatcaacctaaggggtcagagttggccaaaataaaaattctactagcagaaattctttctagcagtaaaaagaaaagggagatgctcagatatcctggactccccagaggggtaagattacccctaggacttctctgtttactgccatgagaagaatatcagcttgcagcaccataatccagagctgaaaaaagactttttatacttaaaaataggattcaggggccgggcacggtggctcacgcctgtaatcccagcactttgaaaccagcctggtcaacacggtgaaactctgtctccactaaaaatacaaaaattacccgggtgtggttgcgggtgcctgcaatcccagctacttgggaggctgaggcaggagaatcgcttgaacccggaagccagaggctgcagtgagctgagactgcgccattgcactctagcctgggcaacaaagggagactccatctcaaaaaaaaaaaaaaaaaaaaaaaaaaaaaaaaaatttcagatgccatagtatttgcaatagaccaatcaaaaactctatgtgcatatagcacataaataacttctaatctagcctaggaagaaggatagcgtggtactatctataaacccactttgtgacagcagcactttctagcaacagcatcggtattctccacaaaatgtagcaagtgacacctaataaaaataaaaggagttgacatatcttgagcatgtattgataattagtaataaactagcataaactaaaaagtgagttcaataagttgtatctctatatactggcaatgagcaaagaaattaaatacttagggtgtaactctaccaaaacatacacaggactacaaaaactacaaaatgctaatgaagtaaatcaaagaaaaactaaataaatggagggacatgccatgctcatggaatgtagtacatttacaccacagaataccattcagcaataaaaagaaacaaactattgataaacacagcaacctgaatgaatctataaggaattatgctgatggaaaaacttcagttccaaaaggttacatactatgagtctatttacagaacattattaaatgataaaattttatatagagagaacaggttagtttgtaaccaggcatgaaggagagaggagagatagaagggaagtaggtgtacctttgtggtgatgacatatatccttactatattaacgtcaatatcctagctgtgatactgtactagtttcacaaaatgttactattggaggaaaatggtgcatggaattactctttattatttcttgaaactgcatgtgaatctacaagtatttcaaaataatttttttaatgggggcagggggaggtctcccaacaacaaataaattaacttgccatcctccagcagcctaggcaggcagagagcttctcgcaaatcacagcatcatgatgttgggccatccagatgtagaacatattcagcctgtgtgctgccacttcatcaggaagtcacagctccaaaaaggttaatttttaagtctctatttagaaatcctatctttaagccacattgctttcttagctcaaggactatttcagttgtaacagtttaggattatatactatgaaaacaataaaaggagatcttaaaatgagcaattacagtaattagcacaaaagaatttctaagtctattattgagcaactttctgaaggaacaagactattttaaactaaaagaatgcatacccaagacacgtttattgcagagttatttgtaatactaaaaaactggaaacaactaaatgactaatttggagtgattaaagaaatcatgtccatcattccagctttatgcaatggttaaaaatgcataaagagcaggtccgcaagcactgacaataattataagcaaggtaaattattaagctgaaaaaagatacagaacaatgcaaaaagataaccccatttaagtatttaaaattatacagtagaacatatgcatatataatataaataaatgagagagtattttcaaaattagt

SEQ ID NO: 1886105 - DNA, 4001 bp, Homo sapiens
tgtggtttattttattttcatttatattttgtatgtttcaatagatataagatatttatgcattacatgccggtaatttataaataaatacacacacccccactttgggtgcacatgcccactttttactgatagaggtgtgagatcaaaaacatctgaagactgtggctgtaatgaaccagctacactaaaaaggatcaataacatatacatttttctaaaaagcatccatagagcatctttgtcagctatccttgttaaattctgggtattggcttttatcaggataactatctggtgttagacactttctcaaaagccagaaatatttaaacaacttgatctcatccacacacatcaaagatcaaagggacacaggaggctctgactgagcagcacgcgcaggcactcagccagtggccctgagtaacatctcttgggaccccagagccccagggccacctgttctgctcccaggctctgccccttttggactgaaacctccctctctgggctcccatttcctcacaggaacaatgaagaatttataagctcttcacagagctagctaagaatggtaccatacaaattcataaaaattcaggcaagtatatggtgctagagaaatacgtgaagttttatcactaagtatttgaacaacaattttaaaaagcaccttttttccaccgtatcatgatctttgcgggtcacggggtcttcatgatcccactaagcaatttggagctattccatatattcctagctaattcaaacagctacagcctttttttttttttttttttttttttttttttttttttttttgagatagagtctcactctgtcacctgggctggagtgcagtagtgcaatcataatcacgtctcacagcactcttaaccttctgtgctcaaacaatctcagccccgcaagcagctgggactacaggcatgcaccaccatgcccagctaatttttcgtattttttgtagggatgaggttttgccatgttttccaggctggtatccaactcctgagctcaagcaatccacccaccttggcctcccaaagtgctgggattacagatgtgagccaccacacctggcctacagccattttttaacggaaatcatcttaatcaatattaacacacaaaaagctgtagttaagaaggtggtttctgccaggcatggcagatagagcctgtatttccagctacttgggaggctgaggcaggactgtgtgaggcccagaagttcaagaccagcctggcaacacagcaagacctggcctctaaaaagtgttttttttttttaatcatctgtaaaatgaggatgcaaaacaaacaaaaaaataaacatggtatctgtttgttaaactctgcaatgaacacatgtattagcttcccgctgcggcaacaaattatgacaacttggtggcttgaagtaacacaaatttggggagttttattttatttatttcattttatagagatggggtcttgcccaggctggagtgcagtagcataatcacagcccagtgcaaccccagtctcctggtctcaagtgatcctcctgcctcagcctcctgaggacctgggactacaggcttgtgccactgcaccggctaaacaaatctgtcatttcacaattctggaggtcaatctgacatggatcttactgggtcaaaacgatggtttcggcagggcggcgggagagaatgtttccttgccttttccagctcctagaggccgcccacactccttgactctaggtcctccactttcaaagccaacaatggcaaattaagtagtattcatatcggatctctctgcccgcttttcttccacttttacagacttgtgattacactgggcccacaattcactccagaataatctccccatctttttccaagagaaaggggaattagaattggctgcagttaaggtggcaccatcagctgattagccaccttaactgcagccaactttcattcccctttctcatgggacctaagggagggcagtagctccagggatgttttacaatttaagttctattattattcaagcactatggggctgacaggtcaggagaggactgccattgaaaagaggatttgttactcagagtcctccagagaaggagctcgccacacctaccgctgtgggagggggaacataggggagaccagcgtcctaggaggcagagaccttggtgagaggagggagagtcttttctgtgccttccatgggaaagaacaggagaggcggggtaagcaggtttagaatccattagtttgaataacctcggtggaccctgggacaaagggctgtccctagctgcttggtggctggacctggggtgatgagagcaggtgcacagtggatgaaacacagagggggccgagggtgtggacgttggattgggtggcttgcacacgtaaggcatgctgcagcaatgctgtttgctatctctaggaattatctagccctgggagggcctgtccctccggaggcagcaaggctccagatgtcaaagcaccagacaagagaaaataaaaagacatccttagtacaggactgaataagcaggaactgagtttagatgtcactgcatgcagtagttgggaacagagccaagaattacagacaccaccctccctccttctacgccttctccaagtcccaagggcgcattatgaaggaattcccattaagtctggccagacgctttacagaggaattaacacaggataggaaactgaaaggagaaaaagagaaaagaccagaaacggaggaatttaaccgtgatcaaggaggagcacggcgcagctgcaggactgagctcaactctggctctcacctccatgccagagagaacctgagggtctctgtcagcatggcctcctggcccccagacatgctccccatggatgtgaaagaccacaggcagcagccagatttctatggaatgaatcaaactttccatcctgcttaaaagcaatgattttctttccaaaaaaaaaaataaatgtgtacatggaaaatattacaatgcaagtcacaatgagagttaaaaaagacacacacatctgatttgactaaagtctgtcctggcaacacgaataaataaaataatgacaatgacacgatggcactatgaaatgccattacctaggtttctaccaattaattatgagggacaagacatacataactaaatataattaaatcacgcaggtcgataagattaccctttttgagaaaataattacatgccacgtatattttgaaactgttcagtggaggtgaacaattgtagcccattatgtgtatgagacattctggaaaatatcgctttgacttatgttcaaaaatggttggcttgttcagagagagagagtcagtggggagcacccagcaggaacaggggcctccccagctcgctctctccctgcctcgtctttcctctcacaatgctctcggttttctgagtcaaccatgctcctgggccaaggtgcagcactggagatgaccgagacagacagcgtggatgcgttttgtacggggaacaaaactgatttccaacttggcaaaaagcaacaggagaggccccggctgtgtctggtaccgcctcagccgagccctgaagggaaaggcccagaaaaagggatgtggccacaccctgggggccagcccacaggcgaggcgagtccccaggcgccattctacgcggccagttttggagaactggaactgtgtagagcgtccggcggcagcggacccagcgctgctccattctccctccctccctccccccccagccccggtgactcactccgcggcccgggcagggcgagaccacgcccaccaccccccaagacctggccgcgctcacctcccctcctgcacagagcacctaagggcccaaagatcacatctgaacaaaggatggaacttggaacttacatttacctttcctgcccctgactttttaa

SEQ ID NO: 1886106 - DNA, 4001 bp, Homo sapiens
tggagactaatatcctttgaggagaaacaatttcaagtttattaattaggtttctgtttaagactccatcataatataccatttattagtttataattcagattctaaacctattgtaagagtgcctacttgcaaaaagcaaagaaccagaggttcaggatttgtgaaaataaaaatactgtaaaatataaatgtttaaatattttcttttctttttttttgagatggagtttcgctcttggttgcccaggctggagtgcagtggcgtgattttggcttactcaatctccatctcctgggttcaagcgattctcccgcctcagcctcccaagctgctgggattacaggcgcccgccaccacacctggctatatttttgtagttttagtagagatggggtttcaccatgttggccaggccgttctcgaactcctgacctcaggtgatctgcccaccttggcctcccaaagtgctgggattataggcatgagccactgtgcccagccaaatgtttaaatgttttcactattagatatgtctaataagaactaaaggaatatcttcttgaaattgaaaaggaaataatatttttctatcccataaggattgttggaaaggtttaaagagacaataatatacgcaaagtgcttacttagcaagatgcctagtataaggaaggtagtataagaaagtaatgttttgtttttggtgtccatttggggttctctagtagtttggacaggttattttaagagtaatcctttatgaaaattataatgtacacattttattttgggacaaggattctaatcatttcaataatttatttttaagcacagtttactggggtctcaacaaaagtcacatattcagaagtagtatggcctctaggctaggagtctagagacctaggttttagttctagctctgttaatcctgttttactttgtgccaatcatttcaaaaaaggatgctttactaattgctctgtaaggtgctttctagtctgcatcggttttgttgagactgcaatagcaatgtatccaaggtccaaactaatgatttgccatctggtttcatttagcaaagttaatgttcggtcatcaagtacatattcagtaggaagtattctttttcgaaacagtttctacagtcatttttttttaaccctgtataaaatgagtttattttggactgttaaaaaaattcaaaactttaaaatttgttatttttcaactaatgcaaaagaatatattagaaacatctgaataaaaaatgattctgggctgggcacggtggctcacacctttaatcccagaattttggaaggccgaggtgggctgatcacctgaggtcaggagctcgagaccagcctgcccagcatggtgaaaccccgtctttactaaaaatacaaaaattagctggtgtggtggcggctgcctgtattcccagctacttgggaggctgagacgggagaatcgtttgaacctgggaggtggaggttgtagtgaacagagatcatgccattgcactccagcctgggcaacaaagagcgaaactccatctaaaaaaaaaaaaaaagattctgttcttttctgtatttactgatgtccctaaacattttacatttttttttaaaatttaggttatctccctattaaaactatttacaagtgacagtgatgactcctgttactcaaaattaaaccaaaatgaacatcaaactgggatttattggggcccagaaacaagaagatataattcattcatttgaaaatgataaagagggactgaaataatagtgagaaagctgccctgagaccagagtaactttgtttctttgatgtatcatttacagtaataacccaacggggtgccaaggggctgccactctttggctatgctttattgtccattcacactttgtctccatgtttccttcccccttcctcctgtatacatgtatacagaagggggaaggaaacatggagacaaagtatgcatatacatatagaaattctggagcagtaacttactgatgtatacaacttatcgaatctctctgagttatgctactacccctagtgtgttgggcatgttggctcaaacttccttaatcaggaaactttggaatgggtttattgctagctgtctttgcttgggtttaatctcaatatttctgaggtgcaaagtgcactagattgagagttaatagatctgaattttaattccagttttgttcccaatgatcactgtgacctcaggcacatcatttcacctttcgtcgttcattcagtttatcttacctattcattaaaaaccaatctgcctgcccccagttgctttctagtggtagtgatgatggaggtggtgagagacacaataaatacataagcaaataggagaactatgaaggaaggaaaagttagtgatgtactagggatagtgtacttttgatagggcatctaggatttctctagataagtgaaaaatgaagaggtttaactggatgctaaggggtcttgcacattaaaaggcatgtgtttccgtcttttcactactgtgttctaggaaggcccaccaatgcctctaacctgtaaataaatgcaaatctatttaaatcaagtgatacatcaattttatgttgcttgatttggaagtaatccgcaaagaagcaatagctaaacattttagtgttgtttggggagtagctgctgaacaataaagaccaaaaccataactaaaaaacaaacaaacaaacaaaaaaacgcagcccgagacagatcagaaactaggtgtatgtagggcgccaggttatgacactgttctctgacatccacagggcgcaaaaagaaaacctcactagtcagcttcgcacgtgctctgcgcaggggctcctgcgaggccctagtccctccctgggagctaagagcaggacggaggctgtacctgactgctgcttggagggaaccctggctgagtccagggaggaggagccagaggaggggccgattggaagcagccacctcagcgaagctgcaggatttccgcagggcgggagctgtttatctcccggaagaaaacggctcctgtcacagaagtctcgtgattgctctgggagctttgcttagacacttgaaactacaggagaaagaaggatctagcgaaatatggctacagagagccctgctacgcgtcgggtccaggtggcagaacatcctaggtgggggagaggagacgccgggctttgggatctgctgggttggctacgtgtagatcgggtccacagcacttggctcctcccttggggcgctgcttttggtcccggggagcaagtggaacccttgggattctataaggacacgtggctgggcttgcaaaaaagatcacgccgcaaacacattctaccttgactactacgaagggttgtatgtttttttcttcatccatgcagattcttcttttccttttcttgttgtaattagtgtactctttctactgggcttcagcagaaatgcccatatccacactgaactcctctctttgtctcgcatgccagttgatactgctttttaaaagtcttctttctaaatattaattgaaaacaaacacaaaaaccttcttggtgtctgcatcctctttaaaacaaaacaaaacaaaaacacgagaatctctgaactgtcacttagggaattaatttgctggcagtccctagctacacagtaactaatagtttagtgatgtctcggggaggatcttttcagttacaggtactttgtagaaatacttcgttctgactaatggggctgaggtctcataaaatgaagtctgtcacctgctacattagcgaagggctttcctgactctctgcttttgctgtttttcttttcttttctttcttccttcctttcttttttctttttctttttctttttttttttttttttgagacggagttttgctcttgttgcccaggctggagtgcagtggcgccatcttggc

SEQ ID NO: 1886107 - DNA, 4001 bp, Homo sapiens
aggctggtcttgaactcctgacctcaggtgatccgcccgcctcggcctcccaaagtgctggggttacaggtgtgagccaccgtgcctggctaacatactctttctaaatatctatctagcaacatgcattatgattagaaatattaattccctttgatccaggcattctgtttttagcagaataggcacaaccgtttgcataaagacttagagtagttttattcatattaattaaaaaaagaaacaaagtatccagtgtctgttatcctaggtgctctgctacctgaatcagctgagaacactcattttacccccctgttctgctttgacctactcttttttttttttttgagacggagtttcgctcttgttgcccgggccagagtacaatttcagcccaccacaacccccgcctcctgggttcaagaggttctcctacctcagcctcctgagtagctacgattacaggcatgtgccaccacactcggctaattttttgtatttttagtagagacggggtttctccatgttggctaggctggtctcaaagtctcctgacctcaagtgatctgcccgcctcggcctcccaaaggactgggattaccggcgtgacccactgtgcttggccaaaagctactaatttccatatgttaaacttgtatttagtcaccttacagaactctattattagttccaattgtttccaactgatttggattttctagataatcaattcatctgtaactattatacattctgaaaactagtaaagcaaatctcccatcactgtcctttttccctagaaatatacttctgcatttcttggccactccttttccctgataaattttgcctttactgagttctataaactctcctgacggaattatacttggttttccatttgatgtattgctcaccacctttgggactactgtcatctttgcttgactcttcccaacaacgggagagtttgtagctccatttgttccaactattcctttgttttttctttaagattttataattttattggaatcaatgtcaagtattccataccaagttaattcccaagcactaactatcctttattattactgtaaatgagacttctttaattatgaattttctagctgttttctcagaaataggaaatttaattttgttggctttatctcatattctgtcattttgctcatatcatttccttacttataattctttaaaaatattttctatgtccataatccggccaccttacattgataacttacctctctttctttctttactatgtcacttcttcatttgtttttgtatcactcactacaaatgtttgttaaaattagagtaaacaataaaagatactccttttttttttttgagacagaatctcgctctgtcactcaagctggagtgtagtggcatgaatatggctcactgaaacctcaaccccttgggctcaagcagtcctcctgctttagccacatgagtagctgggaccacaggggcacaccacctgattttttatagagactaggtctcactatgttgcccaggctggtcttgaactcctgagctcaagtgatcctcctgcctcaggctcccaaagggttgggactataggtatgagccactgcacctggacgaaacacccaacaagagcattcataaatgcctacagatttcacccttgagataacattggctctggttcttggctcttggttttgaaactaaaattgattgcttcaaggaaagtaaactaggtgataaggggaaaggggaagaaggatatttttcactatacaggttgaacacttaaaatccaaaaacctgaaatccaaaacactgcaaaatccaaaatttttgagtgccaacatgatgctcaaaggaaatgcttattggtcatttcaggttttggactttcagatttaggataagtataatgcaaatatccccaaatctgaaaaagtccaaaatccaaaacacttctggtcccaaacatttcaaagggatattcaacctgtatactcatagtgtgcctctgaattctgaaccacataactatattcatttcttcagaaagtaaacagttacattaataaatgtgtacttttaatcaaaaatgcttcttattccagtttgagtgtatttaatataatttgtataatcgctcctctcagcaactactaatttttattatattagtttttcttactgctataatagactattaatttttctttgttatactgacttgcattcttgggataaatactatttggacacaatgtataattcttctatttaatagtatgcagttttcctgctaaagaaataattttagggctagaaaagaatatctagtatctttgtagattaaaaaaaaaccactcaacacacagaagagacaaaatgcaaaacaaacaaaaacccttaaggccaataaagcctagatgatttgtttaaggtcacactgcttgttaatggcagagtcaaaaagaaaaaaaaggcaggtctcacaatcccttggttcaactgattgtcggctaagattttacttagtaagtaattttgtaccagtactaatacgcaatatttgacgaacatcttcccctttttttttttttttgagatagagtctcactctatcacccaggctggagtgcagtggcgcaatctcggctcactgcaacctccgcctcccagctcaagcgattcttctgcctcagcctcccgtgtagctgggactacaggcgcatgccaccacacccagctaattttttttgtatttttagtagagacaaggtttcaccatattggcctggctggtctcgaactcctgacctcgtgatcctcctgcctcggcccccaaagtgctgggatcacaggcgtgagccgctgtgcctggcccatcttcctttttagagtcaggtttttggatgataaccaatttattccataaaatgcgcttaggtagtaggattccttgttctaagttttaaaaaataacttaatgtaacatccaggttttaatgtacttcaactttaaaaaattctactgtgaccccattagggagtcagttctttttttaacatctattatttcatcctaatattatttcagtgcctttatgttgacctcatttgggcagttttttgttcttgtttttttttttgagatagagtctcgctctattgcccaggctggagtgtaatggtgtgatctcagctcactgcaacctctgcctcccaggttcaggtgattctcatgccttggctacccaaacagccaagcagctgggattacaggcatgtgccaccatgcccagctaatttttctatttttagtagagacgaagtttcaccatgttggtcaggctggtctcaaactcctggtctcaagtgatccaccctccttggcctcccaaagtgctaggattacaggcatgtgccactgccccaggccagagcagttatttttgtagtcggctatttcaaatatattggtagtataactatgtatatatcatccctttaaaacaatgttttctatttctgacttctatcttctttatatcaattaggccaactatttattaatttttattgtcttttcaaagatcagatgggtccagtggttcacacctgtaatcccagcaatttgggaggccaaagtgggaagactgcctgagctgagatgttcgagaccagcctggacaacatggtgagacttcatctctaaaaaattcaaaaaattagccagatgtggtgacgcatgcctgtaggccccattactcaggagactgaggtaggaggatgggttgagcctgggagatggaggctgcagtgagctgtgatcacactactgcactacagtttgagagcaagaccttgtctcaaaaaaaaaaaaaaaaaaaaaatcaaactttttagttcctattatttttacattttacttatctgatcttaccaaatccaatgtacaatgtacacta

SEQ ID NO: 1886108 - DNA, 4001 bp, Homo sapiens
aaatgcatcattttcttgtctatacttgggggcatggtggctattaatgagccaaagggtaacgacgctctgaggtgactcagcactgacgggaagagaaaatcatctgagagtcatcttggcccagagtcagactctagttcccatattatacattttagaaagaaatgaaaagaggaagaagatatctttatgagtagtattgaggacctggtacatatgcctttttctctcttactcgtactttcattccaaagtccaatgttttatcggtgttttaagacaagcaaaggactgactatcctcattcccttgcatctcttttacctaaaaatgaacatatggtaattagactcaatgactgttggctggatgtctatgtaggtgtaactacagtgaacaacatggaacacattaacaagtaccaggcatacttgacttcattgaaaagttgacttctagctagggagacaaaacaatatgcatgaaagagacattaaatcaccattaaatcattttaacagaaaactttaaaagcgtattacacactcccatgacttctaaaaaagaatattctaaatgtaattgggctttttttggggggagtgctttttttgcagctcattgttaatatctaagtaatgaattgtatttttttttctttagatggagtctcactctgtcgctcaggctggagtgcagtggcacgatctaggcttactgcaacctccacctcccaggtccaagtgattctcttgcctcagattcctgggtagctggaactacaggcgcccaccaccacgcccggctaattttttgtatttttagtagagacgggggtttcactatgttagccaggatggtctcgatctcctgacctagtgatctgcccaccttggcctcccaaagtgctgggattacaggcatgagccactgcgcccagcctatgaattgtacttttttaaaaaaaaattatactttaagttctggggtacatgtgcagaacatgcaggtttttacatagctatacacgtgccatggtggtttgttgcacccatcaactggtcatctacattaggtatttctcctaatgctacccttctcctagccccctacccccgagaggtgctgttgtgtgatggtcccctccctgtgcccatgtgttctcattgttcaactgccatttatgagtgaaaacatgtcgtgtttggttttctgttcttgtgttagtttgctgagaatggtggtttccagctttatccatgtccctgcaaaggacatgaactcatcctttttttatggctgcatagtatttcatggtaaattgtattttaatgctaagattccttcaggaactctcaggcacatagagctgtctggtcctaagcagctctgaagaaagcaagccaagaaagcaactttgctttgtaaagttctgtttttccctttcacctgctcttagtgtcttctgaatcacttttatgaactgtttgatcttcagactggacatttccatggttttccctagatgtcttcttgtcataaaattccacaagacattcaatccctagccattgatttctttctctctttcactcacaggatcatacattgtttcagtgggcaatgaatgaatccagtggagccttgtcttacacatcagatgaaacggctggctggtttaggggccacagagattgaaaatttgttttaagcattagaatcactctaagcactctacgatacacatgagcacaggcacatgagagcagaggcaaagaagagcagattcaaatcttccatgtcacactcattccagacatatactaattaagtagaattgagggcatattcgtactgtatttagaatttttcatttcctttttgtttttggacaaatggatagagttgaacaagttgaatgtttcagtgagcccactgtacctaccacataaaaggcagtgtgttaggttcaaggcattcactgatttttttcttttttttttttgagacagggtcttgctctgtcactatcactcaagctgcagagcagaggcgtgatcatggctcactgcagccatggcctcccaggctcaagtgatcccacctcagcctccagagtagctgggaccacagacctgcatcaccacacccagctaatttttgtattttttgtagagacagggtttcaccatgttacccaggctgatctcaaactcctgggctcaagcaatccttctgtttcaacctcccagagtgctgggattacagcacctggccgatttttcactaaaagaacataatctctaacaatgtctattttcaaatatgcttaacatcacagattgttaagagctggaagaaggaaatgaagataagatgtggaccctgtccttaaagagcttagaatcaagtaagaaagattaaacatgtacagaattaactataataaaaggaagtctgtgataaataccatgacccaagtacaaagtactatgttatttcagagaagggtggccttaaaactaactggcaattggaggaaaaggcatccaggcagagggaatggcaaattacctagcaactcattcattattcttcatgctctactaattcatcttctttttttttttttgagacagagtcttgctctgtcccccaggctggagtgcagtggtgcgatctcagctcactgcaacctccgcctcctgcgttcaagcaattctcctgcctcagcctcctgagtaactatgattacaggcatgtgccaccacgcctggctaatttttctatttttagtagagatagggtttcactatgttggccaggctgatcttgaactcctgaccttgtgatctgcccaactcggcctcccaaagtgctgggattacaggcatgagccaccgcgcccaactcaacttcttttttaattaataaaaggatcactcactcactggcttcatattttatgctctttgaatatatatagttgactgcagtaaagtatactcactacatattattacttccttttttaaaaaaaccagttcctattatgagtcagggttctccgtgaaatcattttttttttttttaatgttctagcaggactttttctttctaacccagtgtttcatcctcctttggctactacctgtttgcactgctgatcccaaatgccaagcacagtgctaagtacagaaaaagatccagaccttgtccttttgaatttcatccttccttggttgcttatctgctaagaaaacatgacacaaacacatttccccacatttaggatgtcaaagcaggcgggaatactacaggcagcattgcagagtgtagagggagcgggtccataatcagagtccaggatctgaatgtggctctatcacttaccagctgtgtgaccttagagaaactgaggcttcctaccaataaacctcagtttcttcatctgtaaaatggggagaaccagagttcttagctgccaggcttattctaaagattaaaaaagatgatgtaggaaataaatgagacactgtatataaagcacttagctatctattacgtgcctagttcttagtaagtactcggatgttggttaatttggtagttataatcaaagtcatcttgaccaacctctttcccagtgcaggattctgttctttggctcctgcaacagtatagatccttcactctggtgacagatccttcgcctccatgaagagagctcactactgtttccaagctgctcagtgggctgttgagcagcaacaactgtcagagagtttttaactgtactgagctacaacaagcatcaaataatttccacccccgatcctacctgtgtcttctggagcaacacagagtaagtccctgccctctaccctgggattctatcactctgcctaaggcaaccacataggcaggcagataagtgaagcacaatttggccataaaacaaaaaaagaaaaaaagtccaaatgccacacctagatccc

SEQ ID NO: 1886109 - DNA, 4001 bp, Homo sapiens
aatctctcaaacccaggaggcagagggtgcagtgagccgagattgcaccactgcactccagcctgggtatcaaaatgagactctgtctcaaaaaaaaaaaaaaaaaaaaaaaacactctgataaagagctgaatagatacaaataaataacccaaatatactcttgtttgtcttagagacagtaagctaaatctgatcagaaatgactgaagcaagtccagagatgccgacagattagtacttctacacaggcagttcttgtgtgctgagggatgagatacttgcagcaactttgtggccattctcttagaccactgagtaataggctgtgctgataacgactcataaaaccttcagacacaaattttgtaattgcaccattattacaaattgtattgtctgacattccaggtttcttgtaaataactgatgtaaagcctcaatcattaaaggggaggtttgagataggatcaaaactatcttagttctttttgaaaacgtctcttgcagtcaaattattccccaggaacgtttctgtactatcagcatgttttaaaaaaaaatctagatcacttctttttttgagaaagggtcttgctctgtcatccaggctggaatgcagtagcgcaaacatgactcactgcagctttgacctccctgggctcaggtgatccccccacttcagcctcttgagtagctgggactacaagtacacaccacctcgcccggctaatttttctattttttgtagagatggagttttgccttgtcctgagctcaaggaatcaaccacctcatcctcccaaagtgctgggattacaggtgtgagccactgcacctggccataagttccctcaggggtttttctcaagttgcctacaataatcataaatacagccttttcagtggcagacttattctatggtccatgatggtttactgaaaacataggttccttcctgtcaataactttccattatactgttataatatagccaagataatatggtaaaaatatgttgacatgataaatttttccaataaaatgcatcctttgcatgcagacaattcatacttattagtaaataaatttcactctttgggcagtttctgtctaggtcaccccttcaataccaagtttaaggcacaagctgatctagcatcacacaggcaataaacaaaaaactatattgtatcttctcttcaacagagaatgaggtaaggctcccaggatccgcatgtcctgtaaagctgacaaggagcatgtagtgtgagggcacttagtgggcagtagtcattgagctcttcaaggattccccaagagaacacaggagttgggttggaagggaagactcccacaattcctaaaacagtgctgtagttcaaggatagttttattcttagaagagtccctagaaagtcaaatgatagcttgtcggaaggatttaaggaactaataatccacatgaagtgcttagcacagcacccgatgtgtgataagcattcagtatatgttagctagtcttgtgatttgaagtggcggtaggatttcttaacatccatgataactgttggggcttccatcttggtatctgtgcagctgcattctgtgagtgacagtgttcttgggtggaagcagctggtacctaatggccatctggcactctgtggccaagcacaactccagccctatagggtggagcgattacatcaataaatagtggctgcattcacaaaatccatgggccctgtctgggaagccaaaaacctgcttgacagcctgtgctcttgttacagtaggtagctagccagccatgagcagggcaggagaggaaccctcccaaccaccaggaatgtcaggcaaccatcaggtgatggtaaagcatttgttacactgtctccctaaattaatctttaggtcagtaaaaagtaattgtggtttttgttattggttttaatgacaaagaccgcaattacttttgcaccaacctaggaattggtcacagctggtgccagggaaaggcagtctcctagtagagagaaacacctgaaactagcaatcagcagcttcccagtgagatctctagagttgggtgagtgggctcaagtatgtacactaaggggcaaaatgacggagtttaaccagtatatgaccttcctccaggaacactggtaaggggagaatgcctcaagtgagcatgcacacaactccagttaaatacactgcacatgtggcccctcccaagtgctggcaggccactgtgcacccagacagcccatcccaaggaagaatcaagaagaagagatgcagagcccggaagcatgccattgtataaaaccccaagtcaaaggtcaagcagtgcacttgactctctcaagtctcccgcttggccctcttccaagtgtactttacttcatttcgttcctgctgtaaagctttttaataaactttcactcctgctctaaaacttgcctctgtctgtcactctgccttatgccctttggttgaattctttcttctgaggaggcaagaattgagcttgttgcaaacccataatgatttgccactgctatcactgtccagggccaaggaatatccctttccagtaggtgataacatggctcagtaatggctgccatttacaaaaatgcaaaagaggcctggcgcggtggctcactcctgtaatcccagcgctttgggaggccggggcaggtggatcacctgaggttgggagtttgagatcagcctgaccaacatggagaaatcccgtctctactaaaaatacaaaattagcctggcatggtggcacatgcctgtaatcccaactgctcaggaggctgaggcaggagaatcactttaacccaggaggcaggggttgtggtgagccaagatcgcgccattgcactccagcctgggcaaaaagagcaaaactctgtctccaaaaaaaaaaaaaaaaaaaaaaaagcaaaagaaaatgagtagctctggcagcaaggctatggcacttcctttatttttcagtattttttagtagattgaacagatactatgcctgcttgatttcaagtgctatggatccctgaatggtagtcatggtagcagaagtgaaaataggaagttccacgatatatatattttttaatttcccacttctatgtctgatttatcttcataaaacaggacattctgattttgttctgggtagtctttctctgttgacctcatcattgaaacacagtgctacccccttggactcctagaagagaggttgtcatcaaagcattaggaagctttaggaaccccaggaattctagaaagcatctgaaggtcagcgattggacatctgttgataaacttgggcggagtcaactattgcaaataattgccccctcccagaaaatattagagggtgctcactagccccaggcatctgccatgggtgctgccttctcacacagtgtctgtacatgtccccagttacactaacatctttaagctcaaagaatcccagctcctccagggactgcagtgggaaccttgaatagatgaccaacctccatcagcctgtttcttcatctgcaaagtggtaaaatagctttattccacacggttgttttaaggtagaaaaatacaatatataataattatatataatatagtttttattgtataaaaatacaacatgcaatgtaaataagtatgtataatattatatatataataatataattgagtatttagcacagcactagccagataataaatgcccaataagtatatggaagaaatagagaagacaactaccagtgcaattctttttttttttttttttttgggacagagtctcgctctgtcacccaggctagagtgcagtggcgtgatctcggctcactgcaacctccacctcccaggttcaagcgattctcctgcctcagcctcccgagtagctgagatgacaggcacacaccatcacgcccggctaatttttgtatttttagta

SEQ ID NO: 1886110 - DNA, 4001 bp, Homo sapiens
cataagcacccaattctggtagaaggcagaaagtggaaaggggggtgtctaagtcccaaggtgcttcctaggggctcggagggtggccccagaagaccccgggggatcagtgttctccaggagtcttgaagggcaagtgtgatgtggaagtgtgatagaggagagggaattccacacagagtaggagcagagatgacccatccactcgcgttccactcacggggcatggagggtggggacgagtcattcatggggactccacacccagttggctggagcagcaggtcttgcaagtcagcccagcctgtcaggaccctccttcctggcagggaccccggctggcccacgggtaatgcctttctccttggcgctgcctccagaactgtggcgaggcagccgtttttaaatgtttgtttgggttttctggaagctccttgaagttggaatgaaaaatctgcctggtggttctgaaatggcctctccggctcagtgggcctggctcctacagcattccctgaagaagtaaacaggcccgtgcagggggaaactgcaggggccacactgctggactgctgggtgtccctggcccgaggcgtgggaggccggccctgggccctgcagcgcccgagtgtttgcccagttgccctggacacaccagcctggggtgcagggaccactgccgcctgagagggagtcctagggggtccaggacaggaagccagcggtgttttatgttacattaggaacaccagcaggctttctggagtggactgagccttgtggtcaagaaataggcaggcttggaggctgtcgggcttcccaccatgcagccaccatgcctcaccttcattagctgacaaagcagttctctgtcctcactggccacaaggggaggaggacacagcttttggaaacctccaggctgctatcctggaacctggagccacggccagggacagcttgagcgtcccctcccctctcatcttgtcctctgaggggtaggctgtgccccagctgaacggggcacctgtggctttgccagctgatggctgccatgtgggaatttggacctgggttgccagatcttcagattttccagcaaagctggaaatccagatgtttgtatgaaacttccccaatttaaaaaatgtttaaaaacactatgcaggacgacctatacacatctgcaggccagactcggtccctaggcagccagttagtgacctctactctctgccttcagacacccagggccacctaaacaaagggcccccatgacagtgatgggttgggggtggagaaaatgctctaggagagaccctggagtccacaggcaagaagggcatgggatcatcctttccctgctcctcctaaagggcaggcactgctccacttcttggttcccgtccactctgttggtacagacatgggggaagcgggcaagggatatgacttctagaatttggaccttgtttctctctcaggcacttccacttgcccttaacctgatctcctgctggttcagtccacctggtatgtttatcaggaggctctttctttttccttccttctcttctctgtccatggctttccctcttacaggtccttggtagctgccggagccctccctccagggggtgttggccaatgacaaggctgggaggccagggccgaccaatcagagcagttggccgtattgctgggaattaatagcaacattgcatatggggaaagcatgagatttgggatcacacagacctagattcaacgccttccctaactggccaaaagaccttgagacagctgcacaaatttcctgcaactctgttcctcatctgtaaatggtgatactaattcctggcggggattacatacaaagatgcatggaaaatgcctagcacagtgcctgggatatattaagagctcatccatagttgtcactgatttgagacagtgacaactatggatgagctctcaatatattcttgagttgcatgtctatcagaagatgtgatgccaggttctcaacagtcaacttagaaacacactcttggaatagaaacacgttgggtaccatttgtacgtgtattatatatgtatttccttttcatcttttacctattctcttttaaacagagtggtggattaaaaggtaatgaattacgcacaaagtagcttctcacttctcactgcctttcatttttcttctcctcctacttggcctttctcccccaccaggacctttactctggtcttctgtgtttgctaattcattagtcaacaaatgtttactaagcacaaagactcgttctttgttctcaagggagggaggcagacagatgattgcagcaaggttgaggataaagagaaatccggggttgggtgcggtgactcacacctgtactcccagaactttgggaggctgaggcgggtggatcaccagaaatcaggagtttgagaccagcctggccaacatggtgaaaccccatctctactaaaaatacaaaaattagctgggcgtggtggcaggcatctgtaattccagctactggggaggctgaggcaggagaatcgcttgaacctgggaggcagaggttgcagtgagccgtgattgtgccattgcactccagcctgggcaacaagagcgagactccatctcaaaaaaaaagagagagagagaaatccaggatgtggaggggcctggagtgcagaagacatctgggagatcttagagagaggcttgaggtttgagagagaataagggtcgtggcagcaggaatgaggaagagatggattcatgagacctgtagagggaccttccaggaggtcccaggggtcagtggatgggaagagccaagaggaactcctcatttctgtttagatgattgagtggatgacattgtcaccaactgaaagcagaagcagcagagaacatcttgctagtgagaggtgatgagctggaccatacaaggtgacctttaaaatgctggtgggacaaccaggtagaaccatcccataaatgataacagtgaactcactacatgccagactgtcttaggtgttgtatcttatttaatctccacgatggccttatgagggaaggcaccatcatgatccttacttttcaggtgactattttaagggtaagaaatattaggtaactcaccagtccagtggtcactggttcaagtgagtagagctagtctgactccagagcccatcttcttgcccatttcatgtatttattcaattaacatttattgaagacctactatgaagctggcaccgtttagatgctttgaatatatcagtcaagaagacctgccttcacgcagctcctgttctactgcgcacactgcctctgctcagagacagctgaggatatggatgacagttctggctggaggggcaggggggctgctacacccactcccactctgaaatctcacttccagggtgagggacaggtgcttccttcacccacccacatcagtctatatccccatgctaaccattttgctttgtgccaggccaggtggcagaaggaagggcagatgcttgagaaggacagtcatagaatagttccttctaacccttttgtggcgtcagtctcagacggtttctatatggagctggacatatccctccatctctatcagctcatggtggagaccatgtgttgaggagatcatgaaggggctcttcctctgggtgctctgtcacccagcccccagcagcccacccaggtgtcaaaagacaggtctgcccctcactccagagaatagctaggatcctggtggcatggcactttggaaagtatgagacccctccttgttttacagaagaagaaactgaggcagggagcagccagtcattgcccgaggcttcctggcaaattagtgacagagccagttgagaatgcagcccacgtttgtgttgcttcaactcagccccagatccttcactctccatgggggctgctttggggaagccagctttgc

SEQ ID NO: 1886111 - DNA, 4001 bp, Homo sapiens
ctgtgtccttctctgggtggggaccaggtctcctgtcttccagggctgattcggggcctggcactgaaggtttttttgagtagatcggtgccagatggtccctgggcttccgggaaggactaggtacccaggaggccttgagtctatgaggcccaccttcaggaggaggtgaaggggtctctccacacccgggtggggaaccagatgtggagaaggatctcacgtgtgactgcaggaaggtggatgctatcctgagaaacaggattctgggctcaaggtggtaaccgtgctgagtgcctggctgacttgagagcaactgctatggggtttctccttcctcagacagggtgctgtgcttctaaactgggttccagtgaaccacgtggcgagaatacttaacagacgaagaggagacacactgcaagtaaatgggactaaggctggagggacaagcatggcctcaggaaatgctgtgccccaagacctcgggctgagtgggacggacgtgctgctgttagtggaggaggtggggagggctgggcagcagatgacaactccccattgtgtgctaggggctctgcacagcatttttctttcttttgttttttcagacagggtctcactgtgtcacccaggctggagtgcagtggtgtgatcatggctcactgcagcctcaacctcctgggatcaaatgatcctcccaccttagcctcctgagtagctggaattacaggcatgcaccacaacacctggctaattttttttttttttttttgtagagacagggttttgcaatgttgcccaggctagtcttgaactcctgggctccggtgatctgccaccttgacctttcaaagtgctgggattacagatgtgagtcaccgcgccctgcctgcacagaattgttcataaggctgacagacaagcagttctaatggaagcttttaacttgccacgtggaaattcagatgtttgggctcagattcacgctcatctgaggaatcaattctgtagagaaaagctctatgagccgcactgctgggtgtcacccagtgacctcactgtgagaaagcaggcaccagcttggacttcttaccaggaccacgggtctcttatgagcttgtcctgacgtggagtggaaccctagccctgggagacatgctgaggaggttccttacacacacggagagtgggcaaggcccaggatcctgagaaatgcacaggacacagcggttccttaaccctctatggcctgaggttttgttaacaaagtaagataggtgtttttaatatttaaaagagacagaaaactttgcagtgttatttatgcaattgattgtctctatagctattctctagtttcttgaaacaagactataaggtttttgacttgggggacctgaaaatccttgccagggccataatgggttaaaatggtattcagatcacctcacagcacagcaacatcatcccaatgccttgaaaatgataaagtcaaatcacaaagccaaggcctaagcatccagtctcttaggaacaccataggcctcctcatagccagagagagaggaggtgcttggaaacctccagaccttgttttggtagctgggagcttggagctcagcctcctgaattcaggctgttcagaaagcatttgtgctggctttcccagaatctcactccctcattccccacctaccgaaccctggagtcctgttggcaagactggagtaggcattcccacttggcgaggaggtagctgggctggagagggggctgtaggaagaggggtctgccgggtaggtgtggctcgttccaatcccaaagggagatgactgagtcttgctggactgagatgggatttgctacaatcaggacaaagcaaagagatggaaagcatcaccagcagacccctgcaccccaaccgatgccccaggctggtcgcaggggcagtgcctgctctgggttgacagtgactccccatgaccctcttgtctggctaggcacaggcctgggatcagcccggtgtgtgagggcccaggaactgcaggatctttggggcacgtctggttgaagttactccccagggctacgaggatccgggccctctggagtctggttaccaaggccttggcattatgaacacctagaactccctcagcccaatcaacacccaccctcacagtgactatgagggtctggggatgtcacaagggttggtggtttcatgccctcctggcgcaggggcagccagaggtccagagtagtgaggggctcattcttgatgaggtgtctcaacctgcccaacctttccctgccagctgcctcagggcatggctgtaaggagaaaaggctgctgaagttgcaggctgggcacctggctctccgagagccctgagggtggatggtgctcctgagtagccagctgctgttagggtggttggttccagctaggagccgacccatcctcagaaccgcaatccaaagaaaacacttcccagagtgctctgcctctctggtcacccaggggagatgccctcacagatgcccatacctgtcccggaaagggcggacgactccctgtccatgccacctgactctggtttagctgccgggagatttgggacatgttctggcccgtggaagaagaggactgaatatcattcactccaggcacatgaaccactgaagagctagaaaagaggaaaatgcatttatcccgaggacacacctggtttgcatgagtctacgtgcccagccaaccacacaatctgccctgggccatcttcctggctctctctccatgcagcacgtcactagagaaaatgactcacacatcgtgagcctcaaagccccttggccgtcctcctctcccttcagggcttcctctacactgctgagtagtcctgccatgtctagtagtctggtacttcctctcctcgttctccccagggtctcccacgcactcttcagcccctatcctatgcctgtacatcctctgctctcagcagatgatttggttcccagaaagagagaagcttcttagaataaaaatcagtcccactgttcactcactcttttgtgctctggttaatttgttcctttggggcacctatgaggcttaaggattcaggaaataggttgcaggctgtcagttttaaacggaaagaaaagcttctcaatgaaaacctgctggatggggcctagtcctgctacccagagtttacccctcccaccttcagttcaccttcgacttaactcagtttgtctttattaggcccctgctgtgtgccgtgctctctgcatggcctttgcaggctaaatctctgaccctgcttagctcctcggcaggcactgtctgtaccaccaggcgcttcttccaggagattttccaggctatgtcgattacatgagaagctcatcaaagactaaaaggctgggggcagacttttactttgtttcaggcccctcctcctgcctccctgggactagctcagcatgcagggcagtgcgctgggtgcccatgaatcagtcaagtagggcagaatggggctcatcacagaaggctttggtagattttcagctccgtgttaaaaaaaaggcaagccagagatcagcagagattgggtaaaattttactattgtattctaataagtttcctatgctatctgatcccttttaaaatagggagaaaccaagaatgtcagagacattcttgagctgatcattgtaaaacaagttcagtggcttatataaaggggacatcatttctgtcttcatacaatcaattcctcatttaacataagggctcctttcccattctccttcctgatgaaagtattgcttcagaggacattttctggtcactattgtctagtaggaccctctccacagcccccagcccttggtgtcctccccaaaacactgactgatgagggccgctacagcgtagacggtcctaggaaaggcgccttggcagaaagggatgggcttcttgggg

SEQ ID NO: 1886112 - DNA, 4001 bp, Homo sapiens
gtccagcgtgcctaggggtgccaggtggtctccgcaacacagagcgaaaagggcatggccccgggaaccccggcgggtaaggggtccttgccgtgctcaggattactgcggaaacgccgtgcgctcgctgcgctctagcaggagcaggaggagatcgccttttagagtctgaaatccagaaagaggaagaaggctccttccttggagaccctgttgctgcaagctctgccgccaccagcaaggcagcccctgatggcgcccctaatccgctgcctgatgttggctctgggatagcgcccccaacaccgcccctcgccgctgcaatgtaaaacccaatagcgcccccaacccatccctgcctcggacgtcgcagcaccagataactcccccatcctaccgtctgccgtcggccatgcagccaccgataggacctccaactaacccccggctgcgggcagtgatgccccggagagcacggccacctgctccatgccgtcaatagtgcagccatggatccttaaggtccccaaccccctccccacgacgagcagtgcagccctacatagcagatagcacccccaactgtcccccacccagggggaatgatgccctggatagtgcaccccacccgcaccccgccatgggcagtgcagcctccgacagcacccctaacctgtataccgctgccaaaaatatggtccccgatagcacaccaacccagcccccaccacaaacagtgcagcagctgatagagcacctaactcgccccaccgccactgaccacagtgcagcccccgaacggtgcccacaacccaccccaccaccccgcctgccaccggccgggtatcacccccaaaccgccccttgctgtgaggagtgtatcccctagtagcgcacccaaacctgccctctatcatgggcagtctggcccgatagcgcccgaaaccgcaccctccaagcacctacccgcacccaccgctgccccgccccaccaccagcagtgtagcacctgatactgcctctaacctctcccctgccatggacattgcaaccccacatagcgcccccaacaagcccccaccatgggcagtgcagccccagatagcatccccaccccgctgtcggcaatgaagcccgaccagtaagcacccccaccagtccgcaccctaaccagccctcccaccaccatgccgccggcagtgcaaccacaatagcagccccaacccggcccctgtcgcgggcagtgcagcacccaatagcgcccccaaccagccctactgctgccatcaatacagcccaagatagtgaccccaacccgccccccaccaaccccccccccacccgctgctgagggcagtgcagccccggatagcacacctaaaagcagtgacgcccaaaataacactctagtacacccaaagtagtgacacctggaataataccccaaccagcccccgccgcgggcagccctggatagcttacctaccccattgcctttctacactctggccagctgcagtatccgtcgctgccaccaaccacagcgaggccagccagggaggcgagccagcgaggccagccgcagtcctgcaggctctagcctccagcctatggtaggtgctttctccttctttccttcctgtagccaagcacggagcagctgtcactgccagctgcctctctccattgccaccacacaccattcaaggctccagggctccaggttccaggctccagcctgcggcagcacaatctgctgccgctttctccaaactctgcggcagaagtacaggttaacacacgatagcctgcaacagcgcgacgcccccttagcataccttatatactggggggttgtgcaggcctggttctcggacttcacgttctgattggatgagagaaacatctacgcctactctgattggacgttattttcatgttctgattggatcagaacaagtcttaggctaaccaatcagaacgtgacaataaagtccaatcagagtaggcctagtgttttcctctcatccaatcagaacatgtagtttataatctcggtatataaagcatgttaagagctagagttgcactattccagcctcgtcggcatctgacttcatagctgctccattgccagcttggagtaggaggtgccagccactgcatgctggaggctgcagcctaccgggctgtggctggcctccctggctcaccacctcgccggcttgcctcgccttgcctcgctggcttgccttgcccgctgcggttggtggcagcgatggacactgcaaccggccagagtgtagaaaagcgtcggggtaagtgcgctatccagggctgcactgcccttggcctgggacgggttgggggccctatctcaggcgtcactgcccaccttgggtggctggttaggtgtgctatctggggctgtgctgcctgcacccgggggtggtttgggggccctaaccggggctgcactgcccccggcggggagcctgttggggaaactatcccagactgtattgctggcaacagtgaggtgggctaagtgtcctatccagggctgcactgcacggctgttgcgggggggtggtggtttcaggttgagggtgctatggggtgctgcaatgcccgtggttcggggaggcggggcggtttgggtgtgttgggtgcgctattgcgggggggctacactgctggttgcaagggggcagggtgggttgggggccatatcaggggctgcactgattgctttagctagggtttccagtactatgttaaataacagtggtgacagtgggcatccttatcatgttccagatcttagaggaaaagctttccatttttccccattccatatgattctagctgtgggggtctctcatgtggtttttattgtgttgcagtatgtttcttctgtacccgttttttgaggatttgtagcatgttccccaaattgaatataccattttttaaaaagagactgagtcttgctgttatgttgcccaggctggtctcaaacttctggacttacgcgatcctcttctgcctcagccttcagatagctgcagctataagcatgcaccaccgcacccagcttgaaggtactgtatttttaattccatattgtcaagcgtttaagatacttttctttaaaaaattaatattaattcaaaggaagaaattggcagagtgaaaagacaacctacagaatgggagaaaatatttgcaaagtatgtatccagcagaggattaatatccagaatatacaaggaactcttgacatctcaatagcaaaaaaaaaaaaaaaaaaagaatccaactgaaaaatgggcaaatgacctgaatagatatttcttaaaagatgacagacacatgaccaacaaatatgttttcctaaaaagctcaacatcactagtcatcagggaaatgcaaatcaaaaccacaatgaggtgtcatctcaccccacttagaatggctactatcaaaaagacaaaaaatagcaaatgctggcaaagatgtggagaaaagtgaacacttaaatggggctagtggaaatgtaaactagtacagccaccatggagaacagtgtggaggttcctcaaaaaactgcaaatagaactattatatggtccaacaatatattattggacatttatccaaagaaaaggaaatcagtatattgacgagacatcggcacccccgtgtttattgcagcactattcacaatagccaagatatggaatcatcctaagtatctaacaacagatgaatgcataaagaaaatatggtatacatacacaatggaatactatttagccataagcaagaatgaaatcctgtagtttgaggcacatggattgaactggaggacatcatattaagtgaagtaagccagggacagaacattaagtactgtgtgttctcattcatttgtggaagctaaaaaaacgttgatctcatagaggtaaaaagtagaacagaatactacaggctgggaa

SEQ ID NO: 1886113 - DNA, 4001 bp, Homo sapiens
gtccagcgtgcctaggggtgccaggtggtctccgcaacacagagcgaaaagggcgtggccccgggaaccacggcgggtaaggggtccttgccgtgctcaggattactgcggaaacgccgtgcgctcgctgcgctctagcaggagcaggaggagatcgccttttagagtctgaaatccagaaagaggaagaaggctccttccttggagaccctgttgctgcaagctctgccgccaccagcaaggcagcccctgatggcgcccctaatccgctgcctgatgttggctctgggatagcgcccccaacaccgcccctcgccgctgcaatgtaaaacccaatagcgcccccaacccatccctgcctcggacgtcgcagcaccagataactcccccatcctaccgtctgccgtcggccatgcagccacggataggacctccaactaacccccggctgcgggcagtgatgccccggagagcacggccacctgctccatgccgtcaatagtgcagccatggatccttaaggtccccaaccccctccccacgacgagcagtgcagccctacatagcagatagcacccccaactatcccccactcagggggaatgatgccctggatagtgcaccccacccgcaccccgccatgggcagtgcagcctccgacagcacccctaacctgtataccgctgccaaaaatatggtccccgatagcacaccaaacccagcccccaccacaaacagtgcagcagctgatagagcacctaactcgccccaccgccactgaccacagtgcagcccccgaacggtgcccacaacccaccccaccaccccgcctgccaccggccgggtatcacccccaaaccgccccttgctgtgaggagtgtatcccctagtagcgcacccaaacctgccctctatcatgggcagtctggcccgatagtgcccgaaaccgcaccctccaagcacctacccgcacccaccgctgccccgccccaccaccagcagtgtagcacctgatactgcctctaacctctcccctgccatggacattgcagccccacatagcgcccccaacaagcccccaccatgggcagtgcagccccagatagcatccccacaccgctgtcagcaatgaagcccgaccagtaagcacccccaccagtccgcaccctaaccagccctcccaccaccatgccgccggcagtgcaaccacaatagcagccccaacccggcccctgtcgcgggcagtgcagcacccaatagcgcccccaaccagccctactgctgccatcaatacagcccaagatagtgaccccaacccgccccccaccaaccccccccccacccgctgctgagggcagtgcagccccggatagcacacctaaaagcagtgacgcccaaaataacactctagtacacccaaagtagtgacacccggaataataccccaaccagcccccgccgcgggcagccctggatagcttacctaccccattgcctttctacactctggccagctgcagtatccgtcgctgccaccaaccacagcgaggccagccagggaggcgagccagcgaggccagccgcagtcctgcaggctctagcctacagcctatggtaggtgccttctccttctttccttcctgtagccaagcacggagcagctgtcactgccagctgcctctctccattgccaccacacaccattcaaggctccagggctccaggttccaggctccagcctgcggcagcacactctgctgccgctttctccaaactctgcgggagaagtagaggctaacacacgatagcctgcaacagcgcgacgcccccttagcatagcttatatactgggggttgtgcaggcctggttctcggacttcacgttctgattggatgaaagaaacatctacgcctactctgattggacgttattttcatgttctgattggatcagaacaagtcttaggctaaccaatcagaacgtgacaataaagtccaatcagagtaggcctagtgttttcctctcatccactcagaacatgtagtttataatctcggtatataaagcatgttaagagatagagttgcactagtccagcctcgtcggcgtctgacttcatagctgctccattgccagcttggagtaggaggtgccagccactgcatgctggaggctgcagcctaccgggctgtggctggcctccctggctcaccacctcgccggcttgcctcgccttgcctcgctggcttgccttgcccgctgcggttggtggcagcgatggacactgcaaccggccagagtgtagaaaagcatcggggtaagtggctatccagggctgcactgcccttggcctgggacgggtttggggccctatctcaggcgtcactgcccaccttgggtggctggttaggtgtgctatctggggctgtgctgcctgcaccggggggtggtttgggggccctaaccggggctgcactgccctcggcggggagcctgttggggaaactatcccagactgtattgctggcaacagtgaggtgggctaagtgtcctatccagggctgcactgcacggctgttgcggggggttggtggtttcaggttgagggtgctatggggtgctgcaatgcccgtggttcggggaggcggggcggtttgggtgtgttgggtgcgctattgcgggggggctacactgctggtggcagggggcagggtgggttgggggccatatcaggggctgcactgattgctttagctagggtttccagtactatgttaaataacagtggtgacagtgggcatccttatcatgttccagatcttagaggaaaagctttccatttttccccattccatatgattctagctgtgggggtctctcatgtggtttttattgtgttgcagtatgtttcttctgtacccgttttttgaggatttgtagcatgttccccaaattgaatataccattttttaaaaagagactgagtcttgctgttatgttgcccaggctggtctcaaacttctggacttacgcgatcctcttctgcctcagccttcagatagctgcagctataagcatgcaccaccgcacccagcttgaaggtactgtatttttaattccatattgtcaagcgtttaagttacttttctttaaaaaattaatattaattcaaaggaagaaattggcagagtgaaaagacaacctacagaatgggagaaaatatttgcaaagtatgtatccagcagaggattaatatccagaatatacaaggaactcttgacatctcaatagcaaaaaaaaaaaaaaaaaagaacccaactgaaaaatgggcaaatgacctgaatagatatttcttaaaagatgacagacacataaccaacaaatatgttttcctaaaaagctcaacatcactagtcatcagggaaatgcaaatcaaaaccacaatgaggtgtcatctcaccccacttagaatggctactatcaaaaagacaaaaaatagcaaatgctggcaaagatgtggagaaaagtgaacacttaaatgtggctagtggaaatgtaaactagtacagccactatggagaacagtgtggaggttcctcaaaaaactgcaaatagaactattatatggtccaacaatatattattggacatttatccaaagaaaaggaaatcagtatattgacgagacatcggcacccccgtgtttattgcagcactattcacaatagccaagatatggaatcatcctaagtatctaacaacagatgaatgcataaagaaaatatggtatacatacacaatggaatactatttagccataagcaagaatgaaatcctatagtttgaggcacatggattgaactggaggacatcatattaagtgaagtaagccagggacagaacattaagtactgtgtgttctcattcatttgtggaagctaaaaaaatgttgatctcatagaggtaaaaagtagaacagaatactacaggctgggaagca

SEQ ID NO: 1886114 - DNA, 4001 bp, Homo sapiens
gtccagcgtgcctaggggtgccaggtggtctccgcaacacagagcgaaaagggcgtggccccgggaaccacggcgggtaaggggtccttgccgtgctcaggattactgcggaaacgccgtgcgctcgctgcgctctagcaggagcaggaggagatcgccttttagagtctgaaatccagaaagaggaagaaggctccttccttggagaccctgttgctgcaagctctgccgccaccagcaaggcagcccctgatggcgcccctaatccgctgcctgatgttggctctgggatagcgcccccaacaccgcccctcgccgctgcaatgtaaaacccaatagcgcccccaacccatccctgcctcggacgtcgcagcaccagataactcccccatcctaccgtctgccgtcggccatgcagccacggataggacctccaactaacccccggctgtgggcagtgatgccccggagagcacggccacctgctccatgccgtcaatagtgcagccatggatccttaaggtccccaaccccctccccacgacgagcagtgcagccctacatagcagatagcacccccaactatcccccacccagggggaatgatgccctggatagtgcaccccacccgcaccccgccatgggcagtgcagcctccgacagcacccctaacctgtataccgctgccaaaaatatggtccccgatagcacaccaaacccagcccccaccacaaacagtgcagcagctgatagagcacctaactcgccccaccgccactgaccacagtgcagcccccgaacggtgcccacaacccaccccaccaccccgcctgccaccggccgggtatcacccccaaaccgccccttgctgtgaggagtgtatcccctagtagcgcacccaaacctgccctctatcatgggcagtctggcccgatagcgcccgaaaccgcaccctccaagcacctacccgcacccaccgctgccccgccccaccaccagcagtgtagcacctgatactgcctctaacctctcccctgccatggacattgcagccccacatagcgcccccaacaagcccccaccatgggcagtgcagccccagatagcatccccaccccgctgtcagcaatgaagcccgaccagtaagcacccccaccagtccgcaccctaaccagccctcccaccaccatgccgccggcagtgcaaccacaatagcagccccaacccggcccctgtcgcgggcagtgcagcacccaatagcgcccccaaccagccctactgctgccatcaatacagcccaagatagtgaccccaacccgccccccaccaaccccccccccacccgctgctgagggcagtgcagccccggatagcacacctaaaagcagtgacgcccaaaataacactctagtacacccaaagtagtgacacccggaataataccccaaccagcccccgccgcgggcagccctggatagcttacctaccccattgcctttctacactctggccagctgcagtatccgtcgctgccaccaaccacagcgaggccagccagggaggcgagccagcgaggccagccgcagtcctgcaggctctagcctacagcctatggtaggtgccttctccttctttccttcctgtagccaagcacggagcagctgtcactgccagctgcctctctccattgccaccacacaccattcaaggctccagggctccaggttccaggctccagcctgcggcagcacactctgctgccgctttctccaaactctgcgggagaagtagaggctaacacacgatagcctgcaacagcgcgacgcccccttagcataccttatatactgggggttgtgcaggcctggttctcggacttcacgttctgattggatgaaagaaacatctacgcctactctgattggacgttattttcatgttctgattggatcagaacaagtcttaggctaaccaatcagaacgtgacaataaagtccaatcagagtaggcctagtgttttcctctcatccactcagaacatgtagtttataatctcggtatataaagcatgttaagagatagagttgcactagtccagcctcgtcggcgtctgacttcatagctgctccattgccagcttggagtaggaggtgccagccactgcatgctggaggctgcagcctaccgggctgtggctggcctccctggctcaccacctcgccggcttgcctcgccttgcctcgctggcttgccttgcccgctgcggttggtggcagcgatggacactgcaaccggccagagtgtagaaaagcatcggggtaagtggctatccagggctgcactgcccttggcctgggacgggttgggggccctatctcaggcgtcactgcccaccttgggtggctggttaggtgtgctatctggggctgtgctgcctgcaccggggggtggtttgggggccctaaccggggctgcactgccctcggcggggagcctgttggggaaactatcccagactgtattgctggcaacagtgaggtgggctaagtgtcctatccagggctgcactgcacggctgttgcgggggggtggtggtttcaggttgagggtgctatggggtgctgcaatgcccgtggttcggggaggcggggcggtttgggtgtgttgggtgcgctattgcgggggggctacactgctggtggcagggggcagggtgggttgggggccatatcaggggctgcactgattgctttagctagggtttccagtactatgttaaataacagtggtgacagtgggcatccttatcatgttccagatcttagaggaaaagctttccatttttccccattccatatgattctagctgtgggggtctctcatgtggtttttattgtgttgcagtatgtttcttctgtacccgttttttgaggatttgtagcatgttccccaaattgaatataccattttttaaaaagagactgagtcttgctgttatgttgcccaggctggtctcaaacttctggacttacgcgatcctcttctgcctcagccttcagatagctgcagctataagcatgcaccaccgcacccagcttgaaggtactgtatttttaattccatattgtcaagcgtttaagttacttttctttaaaaaattaatattaattcaaaggaagaaattggcagagtgaaaagacaacctacagaatgggagaaaatatttgcaaagtatgtatccagcagaggattaatatccagaatatacaaggaactcttgacatctgaatagcaaaaaaaaaaaaaaaaagaatccaactgaaaaatgggcaaatgacctgaatagatatttcttaaaagatgacagacacataaccaacaaatatgttttcctaaaaagctcaacatcactagtcatcagggaaatgcaaatcaaaaccacaatgaggtgtcatctcaccccacttagaatggctactatcaaaaagacaaaaaatagcaaatgctggcaaagatgtggagaaaagtgaacacttaaatgtggctagtggaaatgtaaactagtacagccactatggagaacagtgtggaggttcctcaaaaaactgcaaatagaactattatatggtccaacaatatattattggacatttatccaaagaaaaggaaatcagtatattgacgagacatcggcacccccgtgtttattgcagcactattcacaatagccaagatatggaatcatcctaagtatctaacaacagatgaatgcataaagaaaatatggtatacatacacaatggaatactatttagccataagcaagaatgaaatcctatagtttgaggcacatggattgaactggaggacatcatattaagtgaagtaagccagggacagaacattaagtactgtgtgttctcattcatttgtggaagctaaaaaaatgttgatctcatagaggtaaaaagtagaacagaatactacaggctgggaagcat

SEQ ID NO: 1886115 - DNA, 4001 bp, Homo sapiens; identical to SEQ ID NO: 1886112

SEQ ID NO: 1886116 - DNA, 4001 bp, Homo sapiens; identical to SEQ ID NO: 1886113

SEQ ID NO: 1886117 - DNA, 4001 bp, Homo sapiens; identical to SEQ ID NO: 1886114

SEQ ID NO: 1886118 - DNA, 4001 bp, Homo sapiens; identical to SEQ ID NO: 1886112

SEQ ID NO: 1886119 - DNA, 4001 bp, Homo sapiens; identical to SEQ ID NO: 1886113

SEQ ID NO: 1886120 - DNA, 4001 bp, Homo sapiens; identical to SEQ ID NO: 1886114

SEQ ID NO: 1886121 - DNA, 4001 bp, Homo sapiens
acgcgcgcgcctgagtagcaggtgggtttgaaggcttgattatcagcttccccacctaaaagcagttgatagaagatgctgacctggattggggccttggctatttactcgggcaggttggatcaggccctggggagcagggaggaaagtgggggtgggaatggaaggagggaaggagccctggaaagtttggtatagaccagctttgctttcttaaccctccccatatgcattcagggacggaagacaatgggatacatttttgagttagagcttgaatcccttgctttcctaattcaagaatttaggggccacatagaaatggacagcactctatctaatctcacttcccctactcaggaatcaaatggagtcacagagtggggaatatttatactttgtattttaggagaaaaaaatacattgaggtataagataaaatatttgctctctaatacctaacgaatcagtattttataaacacctaattattagtcttacagaacttaattacttaagagtcaggttgattaaaatattgcatcttttaggctgcttatatgtgatattttataaaaccagaatgatgacaacatggtttataattgtcattgctttcgtgaccacattttggctattttagaatgaagttcaattttctcaaactgatgttcaagaccctcaagcatatgacctgcatttccctcaggcagctgagcaatcttactgccagctcccaggtgcctgttcacttctctcttttgctgtcagagttcttcatgctaggaacttgccctgccctctccttgccttccaaatataatccttttagagatagctgttctgtcatccttagaatctgcatcacagacttcaaaactgtagaatatgttatactgtttctatttgtttcttcaagttgcatgtgcagaagcctcattcctaaacaaaactgtaagctacttaaagataaggactgtgtcaattttttctttttctcttctttccttttctttttaaattcttagggtcaggccagtagcagcaggctgtcaataaatgtctctgaattacctctaaatttgccacttgttcaaaggcagacatttgacttggaagtgcactaggagctaaagggaaccagcaataataaaacccggtgaaatgcaatttcctgttttgtgtagcactcgagtcaaatatttctgccctatctcctaggaaatatagaacaaatcgaaattgaaaaaatgtaaggaagtcatcctgaatggttgctaaagaaacaaaataaagcatcaggttttcctaaccatggattccacggccgacaatttgaacagtaaggccaaccttggccatgtgtggcccagagccggcccgcacctgtgcaggtgtggctcatattccattcttttctgttggttttggttaacatttacatcctccactgcaggtgagaggctgactggagggtgctttcctggcagccaaggcaaatggccatggaccagatggcaccgggtgtgtgtggaagggccggcggtccttctctcctcttctgcggagtcctcggtgttgcaggcctggagtgcagcagtggaggcagaagccagactacatttccaagaccctccttctgccagctgcttctgctgggggtctgcctgcgagaggcactgatagaaggtgaaagcaggaagaagaaatgagcctctgtggcctccggccccttgaagggacctctggccacggcagcagccagagggtgtgggctcctggttcccgatcaggaccccgcgcagccccatcagcacagtggcaaagcctccaacaggccagtgccgtgctggccggtcgggtgccagcatcctgatgtctgggtgatctccttctcccttgtgctcccccagccccttcagcaccttttgcaaccagttttctgcatgaaatcccggcctcagcatgaactatgtaaagctgggcccacacctggtagacaggctgcagtgaggggtgtgttcagcaggcctgaatttcagccataaatttggggataagagaaatattgcatttcctttgctttttttcttttttcttttcttttctttttttttttttttttgaaacaaggtctcgttctgttgcccatgtgggagtacagtggcacaatcatggctcactgcaacctcagactcctgggctcaagcaatcctcccacctcagctccctgagtagctgggaccacagccttgaaccaccacacttggctaatttttgcagttttgtagagacggaatcttaccatgttgctcaggctggtctctaactcctgggctcaagtgatcctctcatcttggcctcccaaggtggtaggattacaggtgtgagccaccgtgcctgaccgtgtttgcttttttttttttttttttggagatggagtctctctgtgtcgcccaggctggagtgcaatggcgcaatctcagctcactgcaagctccgcctcccaggttcatgccattcttctgcctcagcttcccgaatagctgggactacaggtgcccgccaccacgcccggctaattttttgtatttttagtagagatagggtttcaccgtgttagccaggatgatctcgatctcctgaccttgtgatccacctgcctcggcctcccaaagtgctgggattataggcgtgagccaccgcgcccggcctgcttttcttaaataaacttaatttaaccttcaagtccggtgactgctgggcagtcatcgctagggctgtgctgatgtcctaggggagcacagaggttctggccattcttggagcgaggcactggtgaggcccccaggttgcagtgaggaggcccccactgtcttagtctgtaccgtgcttcagggctgccagctgtgttgggccttcttctactgggagcacagaagcctttgttaagtttggggcccaggcctaggatgcagcctgcctggggcatcgcacagtgcttccctctgaggtcctgccacctcgtgaggtctgccagggaataggatgctggtcctgtttccttgtaggaatcacacacttctctctcctgtctctaccctggaggaatttcctttgggtctgagacaattctttccccacctctgcttccttcaaagtccgtctatcttgtctcaataagcctatgcttttggaaataaaagccaggaaggggccttgaagggactaccacttcctgccctgcctcaaatctcccctgaggtaaggaggccaggatctcctatctgctcaaatggcagaaaggaaggagaactccagagagaagaatttaaactgatttcttcaaagcttctcctgccagaattgaatatgccgaggagctgtatcacttctgtagcattcctgccaatatgccctaatctgaatctaaccatgaagaaacaaccaaattcgaattgaataacagtctacaaaatgtctgcctgtactcttcaaaaatgtcaatgtcctgaaggaaaaaggtcaagcaagtcttccaggagaaaggagactcagaaagacatgacagctcagtgcagtggggatcttgaactggaaggaagattaggaaaaaaaaaatgctacaaaggatgttgttgagacaattgttaaaatttgaatatcatctatctatgtatctatctatctatctatctatctatctatctatctatctttctacttatctatctatcatctgtctatatttttgagatggagtctcagtctgtcgcccaggctggagggcagtggcacgatctcgcctcactgcaacctttgtcccccggattcaagtgattcttctgcctcagccgcctgagtagctgggactactggtgcgtgccaccatgcctggctaatttttgtatttttagtagagttgtggtttcaccatattggccaggctggtctcgaactcctgacctcgtgatccaccacctcggcctcccaaagtgttg

SEQ ID NO: 1886122 - DNA, 4001 bp, Homo sapiens
ctacttgctaacccagtgtcttcataaaactttataaaacttaaaataggcacaagcaaccattacatgaatgtgtagttacttgttccttgcacaatttctacttaagattttaaccttacttgaaaatcctccatcatcattctcagtaaactatcacaagaacgaaaaaccaaacaccgcatattctcactcataggtgggaattgaacaatgagaacgcatggacacagaaaggggaacatcacactttggggactgttgtggggtggggggaggggggagggatagcattgggagatatacctaatgctagatgacgagttagtgggtgcagtgcaccagcatggcacatgtatacatatgtaactaacctgcacattgtgcacatgtaccctaaaacttcaagtataataataataaaaaaaagaaaatcctccaatagaagccgggtgtggtggctcgtgcctgtaatcctaacactttgggaggccgaggcaggcagactgcctgagctcaggagtttgagaccactctgggggcaacatggtgaaacctcatctgtactaaaatattttttaaaaaattggctgggcgcagtggctcacgcctataatcctagcactttgggaggctgatgcaggtggactacctgaggtcaggagttcaacatggtaaaaccccgtctctactaaaaatacaaaacattagctggatgcagtggcacacacctgtaatcccagctactcgggaggctgaggctggaaaatcgcttgaaaccaggaggcagaggttgcagtgagccaagatcgcaccactgcactccagcctgggtgacagagtgagactccgtctcaaaaaaagaaaaaggaaatcctccaatggaagatttccacctccagttagaatgtggaagatcacaaaatatcatcacttttgccataaccatgagaaaacactaaattatttttcttacaagatactgaagacctctagacataaataagcctaaatgaagtgaattacagaagaagatcagccttctctaggtgaccggagatagctactgctttcaaccctaagcagcatttgcactgtgtgaagatacagtaaggagagaaaaaagcaactataggcaaaggatctttgcaaaaacacagagaaaccaacttttaatgcccgagcatgggcagaatctcgaggaccccaaataggaaactagtcctcactgctgtccaattaccaccccctccagaggacttctgcagaacaaacagcagtgccgcagaaaggctggcctggaaataagagaacatgtagtctaccaatgcttaggtcctaaggtcctgccagggataggagaccaaccactcctcccttgacacagctgaaacgagaggtgagctgaaatttactaaaataggaagccacttgaaatcacctagactgaaggacagagaaacaaacaaaacaaaacaaaacaaaaaagtgtcagagatctctgggacaacataaaatgatctaacatactagtaactgccctgccaaaaagacaagagaaacaaagtgaagaaatacttgaagagaaaatgaacaaaaatcttccaaaagcaaaagattttaacccacagatccaagaagctcagtaagcaacaatggggacgaatagaaggaaaaaaaaaaagtcatatctaggcacatcaaggtcaggctgctgaaaatgaaagatgaagagaaaaatactgaaagcagcagagggaaaaacagacattacactggaggaacaacaaagagaacaacagactgactagtgactcaatggaaactatgtaagtcagaagacaatatactttaccgccaatcatgaagtgttgaaagaaaaactaatgttctatacctaccaaaagaagcctttaaaattgaagacattttcagacagctgagatcattcagattgcataaaaatactcctcagctctcaaataagacaaatatatcagttcttgccacgtctacttacttgtactagagattctatcaggatgattaggcaagaaaaagaaataaaaggcatccagattgtagaggaaaaagcaaaactatctctattcacaggtaaatgatcttgtatatggaaaatactaaagaatccactaaaaaactattagaactaataaatcagtttagcaagattccaggatccaagacacacacacacacaaattgtttttctacaaactagcaatgaatgtcaaaagtgaaatgaggaagtaattccattttacaatagcatcaacaagaataaaatatttaggaataaatttaacaaaagaagtttaagacttatacatggaaaactataaaacactgttgaaacaaattaaagaccaaaataaatagaaaaatatcccacgtttatggacaaaaaatatttcatattggtaaaacagcaataatccctaaagtgatctacaaattcaatgcagtatctaccaaaactccatctgtgattttttttttcagaaagggacaaactgaccctaaaattcacaagaaaatgcaagggagccaccaaaaaaaaaaaaaaaaaacaaagcaatcttgaaaattagaaacaaagttctcagaggactcacacttccaggtttcagcttagtacaaagctacagtaattaagacagtgtgtctattagtttggtttggttttgagacaaggtcccactgtgtcacctaggctagagtgcaatggtgcaatcatacctcactgcaacctcaaattcctggaaacaagtgatcctcccactttagcctctcgagtagctgggactacagacacataccaccacaccactcagctattatttttatttttttgtagagacaggttctctttagtagagacagggtttcaccatgttgaccaggctggtctcaaactcctgggctcaagctatcctactgccttggcctcccaaagtgctgagattttaagcatgatccaccgtgcccagtcaacagtgtgatattgacattaagactagatatacagatcaactaacagaattgagagtccagaaataaatgcccacatttatgtcaactgattcaattgccaaggtgccaagacaattcaagagaggaaagaatggtcttttcaacaccaaaaaactgtgttcacgcaaagacttgtatacaaatgttcacagcaacattattcgtaacagccaaaaactaaaaaccttactgtccaactgatgaataaaaaaaatgtggtaatgtccacacaatattatttgacaataaaaagaaacgaagtacagatacatgctacacatggatgaaccttaaaaacatcaagctaagtaaaacaagccaggcacaaaagaccacatattaaatgattccatttatataaaatatccaaaataggcaaatctacagagacagagacaggtggttgtgttggattgggtggagctggggagtggttgagggaaaatgggaagttacttttaatgggttttctttctggggtgctggtaatgtcctaaaactgactgcagcactgaagtaacggttgtgcaatcctgtgaatatattaaaaaccattgaactctacactttcagttggtaggtgaattttatgtagattttattgtatgtgaattatatctcaatttttaaagtttttaaaaaataactattaaaggaagttcttcagactgttagaaaatgaaacaatatgggccaggtgtggtggctgaggctgaggtggacagatcacttgaggccaggagttcaagaccagcctggcctacatggcaaaaccctgtctctactaaaaatacaaaaattagtcgggtgtggtggtgcatacctgtagtcccagctactcaggaggctaaagcaggaaaatcacctgaacctggtaggcagaggttgcagtgagctgagatcacatcactgcactccagcctgggtgacagagtgagactctatct

SEQ ID NO: 1886123 - DNA, 4001 bp, Homo sapiens
tatcagaggataaaaatgtcactggctcaactgagctccagggaaatgactcagatcagatcagagcctacgatccctacccctagtcttttcttgaccctattatcccctccctttcctcagaaagacagtctacccaaagacctatttaggcttgaaatatctcaaatctggaaaccaaattaaccctagaactaattcacacgggcccaggtctatttctggcccacatcaggccagatctgggccagaactaaactgttcaccaagagtatagggaaaaatggcatttcttgaagaaaagtttcaaatcagaatttgatttcctaattgtctatatttaatctacctatggcgaaaccaaggcccaggaacattaactaatttgtcaaaggtgacatgataaaatgatcatagggcaaggaatagtcgccaccagggttccaagccagattaacactaatattaccagttcaggtctatactgtgttgagacttcatttataaagtcttgttttcaatttctgatcaccacttacatgtgaaagcaaagcagagagtcaaaaaacaattgttgaatgctgaataagataagcatttttagctttaaaattaaaatgtgagcttaattttaaaattatagaccaggcaaatatcacagaacgcaaatattttggctccgagaactaaaaaaagaaatttttttttgagacaaagtctgttgctgaggctggagagcaatggtgtgatcatagctcactgcagcctcaacctcctgggctcaagcgatcctctcacctcagcctccagagcagctggaattataagcacgtgccaccacatccagctaattttttgtagacagggtgttgccatgttgcccaggctggcctcgaactcctggcctcaatcattcctcctacttcagtctcccaaagtgctgggattataggcatgagccacttcacaggccatgagaattaaaaatttaaaacattaaaacaaagatcaacaatgtactgctccagggcctaactgaggcctttgcatgtttttgtaaataaagttttattggaacatagccatacctattcattacatattgcctacagctgctttcatgttacaaaggcagagttaagtagtaacaacactgcaaagcctaaaatatttattctttggaccttttcagaacaagtttgctgaccctgatttagaggacagttgaaaaacttagaaatgaaataaattatctattttgttctctggtttcttttcttaccctgctgcagaaactgaccaggatatcttctctttcccgagtgcactagtaaggtgctttttcccccagtgttacccttgctccaggttccacaagagagctctatttatcttaagctatctcttaagctatttaccagagaaatatatattatattgaagggtatgaaattaactgcagatttctgtagagtggctccagggcataatacctaaacacatctattctccataaagagagcacagaaacgaaaacaaggaagggcagtgaggtactttctgccccaataaaaaacactctttaacagaatacatttcaaatactttagttattactctacattactgacagtcacatttgattagaactttagttttcacagtttcttcgagcctattattgcatccaccccaacaactttgtggggcagagagtttatagaaaactgatgttggaaagaacttgctcacggtcacgcagccagggggaagtgcacatgaaggcaaaccctggtcctctcttcttgttctacccctcataagccaacaagatattttaaatcgatgttgcctaattttttttcctaccaccacaccatatatacaggaagcttatgcccattagtagtatttcttattattggtagtgagtctcaaagaaaagaggaggaaaacaaccacctcctcttttcttagagactcactaccagtaataagtaattcagtaataagtaaaccagcaattcatcctcacctcccaaatgcaggtagggcaatacaatttggaggagaaaaaccctaggcattctcaagtcttctccccattttcccaccgtgctccctctaaccttcaatctctcttttaatggtccaggaataactgatttcacagttgtatactagctgactattaaaacttatttttttgcatgagcaatgtgcacttaccaacgtccttccgaatcctatagagaagaagatgtccttgtttggttcccacaagaagccattcctctggaaaaacaaaacaaaacaaaaacaaaaacaaaaaaaaaccagctttgagaaaggtcaatcagcttgagtataaccctatttttttagctggggcttgtaatcagaaatcaatgtgtcaagaaaatgagttgcttttgataggaggtgttttgcaaagctaagaaatgtttatactcatgtttgaaaatcaaccatttaaaaacacatttattgaataattactaggctagacatatcagaggataaaaatgtcctggctcaattgttttaatgttaaactaataaaaaagatagaagggctttgtatttttaagattaaattattatgatttttattttttgttatatatacttttattaagatatatatcttcagatatatatttttaaattctgctaaaaagaatatgatgaaagtttataaaatcacaaaatggaagtacaaatgtgaaaccaggtatccaacctcagcaataatagctaagaggcatcctttaaatgcttttactttcaggaaaataaatgacgtaacataataagcttacagaattcattatctcaaaagatagtctagtagaaaatatttaataacaagtgttgatgagaatataaagaaattagaatcctcatacactgctggcaggaatgtaaaatgggagagccactttggaaaagtctagcagctcctcaaaaggctaaacagagttaccctgggacccagcaattccactcctggttacacacccaacagaaatgaaaacatattctacacaaaaacttgtacacaaatgttcacagcagtattatctgtaatagctaaaagatggaaacaaaccaaatgtccaccaactgatgaacggataaacaaaatgtggcatgtctatataacggaatattagctaacaatgaaaagaaaggaagtatggatatatgctacaacacagatgaacctaaaaacatgatgctaactgaaggaagccagacaaaaggccacgtgattccatttatatgaaatgtccagagtaggcaaatccacagaggtagaaagattagcggttgcccagggctggtgggcttgggggaaaatagaaagtaaatactaatgggtactgagtttcttctgaaagtgatgaatatgttctaaaatttattgtgctgatagttgcataactctgtgaatgtactaaaaaccatttaattgtacacttttttttaacttttatttttttaagatagggttctactctgttgcccaggctagagagcagtggtgtgatcatggctcattgcagcctccacctccctagctcaagtgatcctcccacctcagcctcctgagtggcgagaaatacaggcatgcaccaccacgttcagctattttttaaaaaatgtttatagagatgagggctcacaatattgcccaatctggtctccaactcttgaccgcaagcaatgccccttcagcttcccaaagtgttgggattacaggggtgagcgactgtgcccagccaaattgtacattttaaaagatggtctaggctagtggttcttaaactttagtgtatcacaattatttgagagtttgttaaaatacagaatgctaggctctaccccggagcatctgatttagtaggtttaaaagtaggcccaggaattttcatttctaacaacttcccagatgatgctgatgctggtggttcaag

SEQ ID NO: 1886124 - DNA, 4001 bp, Homo sapiens
ccctgggagtggagtttgcattgagctgagattgtgccactgcactccagcctgggcgacagagtgggactccgtctccaaaaaacaaaggagagagtcaatgggtgaggctcctaaatgaaaaagtaaagtaacaccaatagaataccttcctcttctcacccaaaaggcatttaaaagctttgaattgataagataatcaacatatataaacagtatcaatcataataaagagcaaagtataagaacaaagatgacaaactctcaattcatgtgaatcacagaagcaacaatgaaagttacaaagtatgatacttacatgaaacctcaaagtagaaataatgaacacttattatttacacatttcaaatgtaactatttcaactgggatttaaataatcttcctaataaagtcacacttcaacttagtttaagtgtgattctaaatgtaaatgatttgcctcatggtgagcatttcagatttttaatcttccaatcttttaactttaaaagagtcacaaacatatatggttattatccttacatttcttaataactactaccttatttaaataaaaagctttgtgagataggcagcacccacttcccgaatgagaaaactgaggctcaaacaggcttcaagttttcaaggccacacatttaataatggcactgaaaacagatcccaagagtcctcactcttaagttcctctacactatcccatcaggttatgtataacacatttttgagtacttaccatagaaatggccaaatcccatgctgattgcaatcaccaaagcaagtataacacacttattgagaccactactgaactgacgtttactcaactccttagaaggttcagtttcttgttcagcaactagccggtcttcagattctgaagcagaaacggtcttcttcctagcacggcgtcgtctaaaggcaggactgggctgattactggtttcatcactacttgattcatcgtcactaggctgagatgaaaatactattaagaaaaaagttgacatttagctattcaaaatcttggaaaagctttcccagtaaaaattatttagaataatcaatgccatcccttacatgcctttctacataagatagccaaaaacaaaaaccaaacaacataaacaaaaacacgggttttcaactcatcaacataaagccaaaacataaagcatttcaaatgtgatacacaagaatctgttaatcatactatttggtgctttgagagcctatctctgtttttttatttaatcctcctcgccttatagtttacactcttagaacaatccttcattcgcatagcctcaagtttcattgctggccaggagcagtggctcacgcctgtaatcccagcactttgggaggccgaggcgggcagatcacctgaggtcaggagttcgagatcagcctggccaacatggcgaaaccccttctctactaaaaatacaaaaattagccgggcatggtagtgcacctatagtcccagctacttgggaggctgaggcaggagaatcacttgaacctgggaggtggaggttgcagtgagctgagatcctgccactatactccagactgggagacagagcaaaactctgtctcaaaagaaacaaaatttcattgctattacaggtataaacaagtattatttctggaaagaaaaaaaatactctctgtctcttcattcagtttcaaagaggtaatttaagtgcaactatttaaggaacacaggaaagtacacaagcatttcctgtgacttataaagtaaaataactaccaaaagtttccttgggtgtatctggtctctagtttcatttccaacctaattagcccatgatcaaggttcaaagcactgtattttaacataggtttccagaagtcagatgagcccttcccttcgactgccactcttactagaaggttattaattttaccctctagtaaatatgtcagcatgaggaagtgacacaacagctatctccgatattaaggactattctggtgctgctcctttatgaaaataatagtagagaaaaacaaactagtggggaaaatttgcacaagaaatcccaagtccaggaaacaaattccctggaaaaaatcaccttcagttttttccaaatgcataatttcttaacactgtttcttatgtcaacaaactattatgttgacacagaagcttcaattactcagaaataatttccacaagctacttagaggaaaagcactaaaaataaggataaaatatgaactcgaatacaaagagctctaaaacaacaaacattcatgctccagaaaagcaaaaacagttcttcagaagacaggatatccatgccacaggaaagctggtgatttaggttaggcaatatttttcagagatggatcatggagtattcagttcactttcacacttacaacaataaacacaaagacagaaggcactactgaaatgaatgaatattcctaatatttagtgatacagatgccactgagagatctttttggtcatgacccttatgcccatcatgtttatctggttattcttgatcactagtttttcaaagatgccgtcgcctcaggtgtgagattatatttcttggacaaagagaaagaaaggaagacttaaacaaagcattacataatacaaaggcattcatgatcatggttagagtatttaagtcaggctttctgacataaaattaagataggtaaatgtaaaaacaaaccatttgtaaaacttatttaaataattgttcaattctacattaacattaccttcattatatattctaacaaaacagcctaacccacattaatatattcatgtccttatctaatgcttccaacttttttaacccatacatataatagctgaaatattttgatttttaacttcttttaaaaaagcttaatttggcccatagatgcaagcaatgcaaaggcatgcaataagcttggccagctcctttacaagagattctgaacacctgtttagagtattgcggatgacaacaggtatctttaaagcactcggtaaatagtaaatgtgactaggcacactcagctctagagaagctggtcagatttagtcacaccaccttggaaagcgagttggctaggaacatggtgtttcagctgatcatcccatccccatatgcactcaggaatcttccacagcttctcccaccacctttcttttgtgaataaacaggaaaaaaagaggcataaagctatattataaagactaaaaagaaaaaaaagaattaaaaatacttaattatcacttaacattgttatccgtacaaaattaaaacgtaataaccatgccttcttaaaaacacacaatacaaacttctctacactaccaactttgctttttgtcagggaagagagttcataaagaggaagcaggcagtgttcttaacccaacaaaacgtacactgccacaagaatataagtcaggagaagaaaaaattgaagttgaaatccttaaggatgaagaaagggaaaggaaaaaacaaaattaagcaatggctagcacaaaattaacaaactaaaagggaaaaacaaaaaccatcttttttatttttttgagacggggtctccctctattgcccaggctggagtgcagtggcgcaatcttggctcactgcaacctccgcctcctgggttcaagagattctcctgcctcagcctccagagtagctgggattacaggcctgcgctaccacaggcagctaatcccaagtagctgggattacaggcacctggctaaattttgtattttcagtagagaagggtttttgccgtgttggtcaggctggtctcaaactccttacctcaggtaatctgcctgcctcagtctcccaaagtgcagggattacaggcatgagccaaagtgcccggccccaaaacaaaaacttttggcaactggtttatatgcagtgttttcagtatagtccaaaatttcgtctttaaa

SEQ ID NO: 1886125 - DNA, 4001 bp, Homo sapiens
acttaaaataaaaacaatctgaaggcgcataaatagaccctggacctcgggagaattccttgggctaacaccctccaccccctccacccttggccactaaagaggacgcctctggtttgtggaaaggcaggccatcaactaaagagccttatgggtttttgcaggcctgtgtcctgggctgccagccacggtggcagggctcgccaacctacggagcctgtccgctacagtgggggttcctggcagggagaggatcaggaatcactgctgtcagctttctgcctagaacactctagctcctcaggaacagagtcagtgtttcccagccagcaccactgttggcatttggggagagacaattcctgttataaaggactgtcgctcatatcccaggccaactgtgtcaacaatggcccccacttccaaactgcccagctcagacccactgggactccacattgacacatgtgtggggcactctagccaggacaccatacatcagggtttctcaaacaccatgctattgacatctgaggtcagataattcactgctgtgtggagcccgttctgtgcactgcagggcttttaaaagcatccctggcctctccacccactagacacccgtcattcatactctaaggaacccaggaggattactaaataatcattatataaattgttaatctagttaagtgggaagagctctcccaaacagggtccttcctcactctgcttattttttcctcgcctaaatcaactgatagtaggaatggggaatgaagcaaaaaagtccgggttggatagggcaggagttctagaaacaagcataggctgcagctcactccaaaccggcagagtaacaagttctctcacctttgagttcatgcaccaaataagaatagaaagatatgtaaaaaacaaaaagcaaacaaaaataaacaaaaaaaaccaaccttactgtttaggaagctcacaggtccaaggcctgttatcttaaacaacaatagagcagtgtctggcacacagtagctgctccgtaaatgtttggcccaaagaatagtatcactggcatctctgcatttattgagacttcatattgcagtgaccccttgctgtggatctgggcctgccccagcatgggcagcatctgtgggaggggccgtggtggatggagtgttgacatacacttggtggccagtggcccaagcccttcaccaacggggtggggtggcacctccaagccaggccaatcgcaagccacctagatgggtccctggccactactcctccccacagccaggaaggcaggggcaaggtcagaacatccccagtcattctggcctcctcagcaactattaactctcacagtctctgggagagcagggaggcagggtgattataaaagggttctggctatggcctccttccactggtaaacaggccaagggtcagggtctcgggagttgacaaaaaagaaacgtagctgaccttgcccttccccacacccttcagcaaacacgtggccaaaggcttcccacagacaggatcttcccatagggctggtctggagcccagctcactctggttatgaggacaacggatctcccaggatttatgtagccatccgggccatcaggtgaccacagctgggtggctcagggcaagtcctctctcattctcacccctccaccctcctaaagtagttcctgcctcccaacaccacaaacaagcatcaactgagggctatcgcaacaatgccacacagatgcagaaccttccacaagcctggggtagtggcattcaggctgtctttcctgaggcccatgttcgacgaagagaggcctctctgcaaggcaggaaggactttggcacgtcaccagacaggactgtgtagggttgaggcaggcagaggggaggggctgggcttacgttgggagaacctcctggttcaccgtaaaagttctcccaacgtaaacccagcccctcccctgggaaagggacatgaagcaagcacatcccatccctcccagctgtcactgtgccatcatctgctagtaccctcttggggtctccccacaaagtggaagcagggattgggcctcccccatctctacaaaggctgcccaaccctgagaatgggctgcgtgcactctgcagagtcaaagcatgaacaggaaagctgttcgctcaacattttaaagaaatgtttattttttggagggtggcgcttgggggaggggaagttcctggaaatggaaagctggcttaacagaagccctcctaacaacagtaatgaccgctgatatcacccacccaactcgccatgtgtgcatccacaataaccccgcggagaaggcgcttgtcaacatctccacttttcagatggggaaactgatgcccagccattaagtgatttcactaaatgacttcctaccaagaagccaaattttgacatttcaagagagcttagagaaatatttttgaaagaaaaaccaccattaaggttaataattgacagcacttctgattagaacagctgttaaaacagcattggatccaactcaaacaagctctaaacatcagttccaaaaaaggaaaaaaaaaaaaaaaaatcaagtgtgacttcaacaattgggacaggtcacaaatcacaaactggaactcgatcgtatgttggaaaactccttttggcaacttggcgcaatccgttatcgataaggcggctgtagtttccagaggccgacctccatccttccctccatctcggtcccacaaagccactgcttttgagccaggtcttcagaagcgaatctgagaggtggtgggaggtgggaagatggctccctttggaaagcactttggaaaaggtgttcagggaggctggtgccgcctttgaaagtttcttttcaagtatggttcaaagcaggcgctttgttggtggaaaaacattgttcctcagaaggaactaatctactagatacagacagagaagcagttcagagaaatggggacagaggtcctgctacatccggaatctgcactaccaactgggcgctgggagtaacatctgccctgcatctctgtcaagattgttaggcaaataaatgacagaaaacaagatagtggggggcaagtgtaatttcccaaacagcaatctgttccatgcgccttagtagctcccatttgcatgatcatctcctcattaaagcaggacctctgaacatcttgctgtaaaccgagggtacttgagcattctaaaagtctatttctctaaccacagtctagtattcacgtttgctgctacttcagactatccttggcccttgacccaagacactaaattaagggaaacggagcctgctcttgatctgtaccccccagcaacctcctgctcctgggcttgcagcacccagccagtccttgcccttatttttaatttaggtgactgtgtccaacacaccgtcgagagctacttccaccagagagtctgtctgctagttagttttaaactgccctgtcgtgtgtacctgtggactctgaatgcacaattccttttaacctcagccaaataaaggcaaggagaagagaaaactgccccttcaaagagtgtgttatgctccaacgccacgcagagatgagctggcttctacctccaattctgcctccatttagttgtgtggctttgggcaaatcacttcccttctctaggcattaatttcgttgtctgcaaaatgaagggattaactagataacgtataagatccaggagccctaatttagagttttagaaccctaaatattcccgaattggcgtgcagcttatcatttcctccataaaacagagcatcacatgaatttacaaaagaccagcagagaagagccaagccaccttgagatgtggatggatgctggctggttgctgggcagctggctgacctgggctgggtcccaaggaccagtcttcagagcacgagccattcaaatctgtccatcagcaaaac

SEQ ID NO: 1886126 - DNA, 4001 bp, Homo sapiens
gtaagttagtagtatatgagtgtctttcctcataaaaatagggtaacaatgcccattttgctttagggctgcttggaagatacagacaaaagtaaggcatctggcaaaaagcactcaacaaattacagttcctattagtattcccattttacaaaagggaaatctatggctgagaaataccaatattcttactactataccacacttgaaataaaaatacaagattatcaaaagaatgatagacatgagaaacttgtaaactcttaagtgctcgtggaattgtgcagacttgacgcaactagctttaatgacagttttgcttataaccactcaacttcctttgctcagactctgtattattttccctagatagatttctcccccttggtaagagaatgtactgccaatcaacatggctgcttgtcagttctacttcttggtaagacttttagttttgtgattttctccaaggtggaccacttaccagaaaaccaacaaaaaaccaaattgggcactgcacaccagacccttgggaggcaccattccacaaaacccactcaactagggcctccagtgaggccctattctgagccagtcaatttgccttgaatcattttgtcccttatgatctggagttgctcgcctatattctctttttgcaactatagaaggcagtctagatcaaggatctcaacctagtctgcatgtgagaatcaccggctggaattaggggtgagaatgcgtaaagggctttacaaaaattactgatgcctacccaaagcaattaaatcataatctccataaagtaacactcaggcactaatattttttaaagcttctcagtgattccaattcgcagtcaagtttaagtatcactggtctaggtaatgccagatggacagtggcattgttgcaagccaagactagtagaagctgggaaaaaaaaactgcccatggccgggttttctttggcccacatttaattaagagaattcacatgaagtctggatttcacaggctcctctcagagcccatctactccagggtactctatttctaaaatatttacttggctcttgttgacatttcagtttgagactcctggattacttgagacccctgaattactatggtaataaggttgttgtggtattgatagagctgctacatatcaatgtgtgactgatatacaaactttaactggctcctaccctgaaaatagtcctaaataagcatatctgtggccctaaatgatagcctgaaaactgcttttcgcacataactcatattattttttcccatcctaaatgctaccgcctagagaaaggtcaacaatagttgccttaaaaattggactcaactccacacaaaagcaaaaactaaaaacctaaaagttgtctgtttactcccctggtaggcactatttgattgatatccaactgagtatttctgagttggctatttgatcttgggtaactacagaagcaaaatccctaaaataaaccagatataaccaactttatccccaaagatatatgaaaaatctgaggggcccacttatcttcctgtttctgaaggagccaaaattttctcataaaactcactgcttatcatctttttaaagcctcaaaggctgagatccaatggatatgggatgttctgtgcatcctgtaacaatttcctgcagactatccaaaattctttacaatggaaattcatttgaataactaaaccaacaactgcaaattacttgggtactattaagcaaatcatactaaaccacttattctcaactactgtgttgcaaactgcaacaaatgaaagatcagagatagtatagagcaacctctaacagtagcagtgataggcatttataatagtctttaatgtggtttaaaagtacaatatagttaagaactaccttccctggtacagaatactaggtcattctgtgaccagaataacaaaatatgatacaaagaggtagcatgatgttaagtttcaggtagaaggaaatgaaaaattgagggagttatttaacctcagtgagccttatcttcctcctttataaaaaatggcaatttcttctccacttgttttagacagtaagttgaagtgctttgaagaggaaaagtgataaactcccataattacagatccaaataagagtaaattaaattgtcctaaaacctggacttggccagagtatcaatgacaaacgatcttcaactttgggaccttctttaagaaaactctcccttcatccctatataacagtatcagctttaagagtgagctaaaatgaaagtaatgtaaaggagttttgaggttagctaagaatgacttttaaagtattttctttaaaaaaagtggcattcaaagagctattgaacatttttgtatcactgttacaacacaaacaatttaaattcaatatctgagatgcagaaattggaaatctttcagaaaatgctctgaaagcttcattaaccaagttaaatgttgggggaatgggctcattcacagttccctgcaaagaaacaaccaatttttgacattttatattaagtgggaacagtgaataaggcacataatacgggtggctattagccacctttagtcattttttaactataaaaataaacataagtaactaatggaataacaaaataaaagtttattttattagaattaggaatgttctttccctctgggcaacctgaacagtccagttacaatgaaatctaagaacagttatttccacagcatagggtgctctatgcacaaaattacagggttaggagcatttaatcaatttaccattctgattgtctcaccaacccaccccatcccatcccccaagtgctctattaccggggtttgtagctaaaataatttgttacattaactccttttccctcttctactaaatttcagttcctaatcatggttgaaccactttattacacagcagattcaaccatttcaaatgaagtcagccagtcttggatctgttgtatatgggtgtatgtatacacgtgtatctaacatatttatttaaacacacataaaacacatacaatctgggttgtggaaaattacagataatttagtctgatattatatgctactcaattttaccactgtggtttgtgtcctgagctttggatcaaaattttattttaaatcactgaaagtccatctgctgctgaatgaattgttcaaatgaagcatgcacttttcaaaagacaatgaaactgacctcaagacatggagaccttggtgcttactgtgaatagatccctcagataagacttctgtaggtgaaacagggaagctgtcatggcttgcctatcccagctgggggcactgaatctactaataacacaagcaattcactctgggaattctgtcaaatatggtggtatctgttaaaagcttggaagtagaaaagggccagttcatcttgatcatacaaattagggaatgcacccacaactgcaataccctcaggcagtatgccaacattgaaatagaaagcatctctaaaaagcactgttcctccatgggtgaagactggtattaggaagtgcacacacaatttttgggtatttgttgcaacaggaacacgtggatttatgacactcaaacctagacactgcaaagttaactggtaagattttttttttttaaacaccacacatacacaaagcattttaaaggagccacatatatctatatagcaactctgactgcttttcaaagttaccagggaaaggaacttattcaggctttctttaaaaaaactccttagttttaatgtatatctttttaagattgatgctgtcatttgaagtaaaataatgtcatatggataatgggggaagaggggagagagacgagaaaatggaagaagcagacactgagttcagatttgcacctgaggtggcaagggaggaaaggagaaaaggtacaggtaaagttgatcctaaagcgacaag

SEQ ID NO: 1886127 - DNA, 4001 bp, Homo sapiens
atctcagctcactgcaacctccacctcccaggttccagagattctgctgcttcaggcctcccaagtagctgggattacaggcacccaccatcatgcctggctaattttgaatttttagtagagacagggtttcaccatgttggccaggctggtctcgacctcctgacctcaagtgatctgcccgcctcggcctcccaaagtgctgagattacaggcatgagccactgcacctggccgtcctttcacaatgaatttaaatcccttgatgttcccatttaacagataggaaaacgggggcagggagaagaggaactgtaactcccagtttccttccccttgcacccagaaacaggttctctgagcccctctccccatcccatggagggtggggatgggtcttacgcacccagaccgtgttcctccagggagaatgtgctacgaaacctagcggataaggcctttgaccggcccatctgcgaggccctcctggaccagaggttcttcaatggcattggcaactatctgcgggcagagatcctgtaccggtcagcaagcaggcatgggcatggggactgcggtgggccaggtgtgcccacattccccactgcctagcatggcttgccttgcccccactacaggctgaagatccccccctttgagaaggcccgctcggtcctggaggccctgcagcagcacaggccggtaagcccagagagggatggagcacacgtgctggcacactggtgtccacatgggccggcaaggagatgggtggggtcaggtgtccccagcttagctcaacaacaggggtggggaggggatgaactgcccaaagtctgaccaagctcagagagaaggtcagctgcctttacatggccctgctgacagacaggtcctgcccctgccccttcctcagagcccggagctgaccctgagccagaagataaggaccaagctgcagaatccagacctgctggagctatgtcactcagtgcccaaggaagtggtccagttgggtgaggccaaagatggcagcaacctctgcttcagcaaatgattgtgtaaccctggggcacttgtccctctctggacctgattcaccgatttggaagtttgtagccctagctgatactcaatggactaggcctcctcacttgtcaatagtgtttccaggctgggcgcagtggctcatgcctgtaatcccagcacttcgggaggccgagtggggtggctcacctgaggtcaggagttcgagaccatcctggccaacatggtgaaaccccatctctactaaaaatgcaaaaaattagccaggtgtggtggtgggcacctgtaatctcagctactcgggaggatgaggcaggaaaatcgcttaaacccaggaggtggaggttgcagttgagctgagatcgtgccattgcactccagcctgggcaacaagagcaaaactccatctcaaaaaaaaaaaaaacaaaaaaacagtgtttcctccaagctgcccatgagacaggcaggacaaggattcttttatatatttatacacacacacacacacacacacacacgcacgtttatatatatttttggtagagataggatcttgccatgttgcctggactagcctcaaactgggctcaagtgatcctcccacatctgcctctaagtagctaggactacaggctcacaccaccacaccgggctaattgttaaaaattttttttgtagagacagggtctccctatgttgcccaggctggtattgaactcctggcccctagggattctcccatctaagcttcccaaagtgtcgggattacaggtgtggccactgcacagggccaggacaaggattcttaatcccactccaggatgggaaacccatggccgagtgggaagaaaccagctgaggtcacatcaccagaggagggagagtgtggcccctgactcagtccatcagcttgtgtagctgaggtctgggccaggtctaaccaggctccccactcctcccaacctgagcctgccctctgatctctgcctgttcctctgtcccacagggggcaaaggctacgggtcagagagcggggaggaggactttgctgcctttcgagcctggctgcgctgctatggcatgccaggcatgagctccctgcaggaccggcatggccgtaccatctggttccaggttgggccctactgttcacacaggcagagaccccaggaggctgatgggtggaaacgtggggtcacaataactggggtggtgatgctcagggtctgtctagaccctccaaggaccacactgttcctgagggtcacacccctcccctcccatgcgtcccagggttgcagctagtggaagtagcccaaggcaggtagcccaagtgaaagtagccaagggcagagcagctttgctgatgtggactctaacatgggggatgtcctagaggcttcctaagggagaagctacactgatctggatgggtgtgtgtgagtcctgcctctccaaggaataccgcccctgtgccaacccaggctgattcctgaattatccccatcccattttagggggatcctggaccgttggcacccaaaggtaagctactcctaatgtaataggctaagagagcagaaaggacttcacgcctgcaagggctacagcacccttctccaccctatccccctgcaaccctgggagtcacccctgggcaggataggaccctccaactccaacaccagtgtcctgcagggcgcaagtcccgcaaaaagaaatccaaggccacacagctgagtcctgaggacagagtggaggtatggctgcctgctcccgcctcctcccctgcactctgcagccctggctgcccctcccaggcagctgccttaccctaagagggcggggggagtggtgggccctaaccaacctctgaactgctttctgagcccctcagggacccgtgtctcctccatccaggacgctttgcctccaagcaaggccccttccaggacacgaagggcaaagagagaccttcctaagaggactgcaacccagcggcctgaggggaccagcctccagcaggacccagaagctcccacagtgcccaagaaggggaggaggaaggggcgacaggcagcctctggtgggctttcctcatcactcccagaaactggctctacaggagaggatgggatggtggcctaggagcgcgtgtacaaaggtgggagaaaggctgccatggcagcccctggagtcttagctgaccatcttgcctgttcttcccccaggccactgcagaccccggaaggtcaaggctgacatcccatccttggaaccagaggggacctcagcctcttagcaggaggctctccttgcttgcactcaccctttcttattgtcttgccctgcatctgggggtctgaatttttgggagcaggcaatatctgaaggtgcaaacaggccctacggctgttccctgcacaactctcatggttttaattgtaccccatcttccacatctttaaagctcatgtgaaaaatgctgcatttttaataaactgatacatttgaacttcttggcacctcttggtctgagatggccaggtaggaagggcctgctgtccggtcctggtgacagaaggcccagctcctcacaaggcaaactgagcccccatcccagtcctcaaggctctgactctatcagaggacagtttgcctctgcaaggacagcccctcagaggtggtacaaagaccctggccccaggcagcccaggagccagagctcctccagtccagattctccagggtccagggctgccccctcatcctggcaggagccaggcaaaacccacccttcggcccctccccagccccaggcccaggccctttacctgctggcacaggggaggggcttctcaactcatggtctcttcactggcttttggtggctcgaggtccccagtctctcctgtgggggctgcaacccagaccctgcacgcacaggtacctta

SEQ ID NO: 1886128 - DNA, 4001 bp, Homo sapiens
cttggcccataattatcactcaaattatatacacacacttttttaaaagcccatctccctgctacttgtaacagccctccgcatgttcctgtgaaggcagctatgcttctgggcccaagagtagggcctttagtcctccccactgtgaacatctcaacatactccctcccagagctctgagatccagagggtaagggtagccatggaagaaaaaacctgaacccagagagtgagtgagtgagtgagagagtgagtgagtgagtgagtgagtgagagagtgagtgagtgagagagtgagagagagtgagtgagtgagtgagagagtgagtgagagagtgagtgagtgagtgagtgagtgagagagtgagagagtgagtgagtgagagagtgagtgagagagtgagtgagtgagagagtgagtgagagagtgagtgagtgagagagagagtgagtgagtgagtgagagagagagaaagagagagagagagggtgtgtgtgtgtgtgttaatttttttcctgttttcccttcttctgaacccagactcttgaacccaaactctttccactagcctgagctgaccagccaggggaaggggtccctaggctccagccccttcctcccctgggcctaagccttacctgtaggggcagaccaccccagctgactccagggtggtacctgtcggcagcttggccaggttgtcccgccgcccaggcaccaagtagccccagccatgacgctctgagtagtgcagagggaagccatcccaggtaagtgccatgagtttaggtgtgacccgcatctgcaggctgaggaggctggggcccggggtccatgcagggtcgtctagccgggggcagagcttccggtaccatctacgtcccagcaggaagacagcagtgtcacgatggtaagggcagttgttggggggaaggttctctctctcacaatgtccccacccaccctccaaagccctggggctttctggtgaccccagcctacagccgccatcccctcctctgggatgctttagccaggacccccatggaatcctctagaagaatatttcaaaagcaaagacactaagtcagtcccactggactagtcagaagccaggacacaaaagcataccctgacccagggcagggctccttcccaagctccatttcatccagggtaactgaccagaggagggagcagatctgccctccccacccctctagagaaacaccagtccttctgggtgctctcttgcaggctgttcaccagagttgagcccagggtgagactagcaaggcactcaggacacttgctctcagggtcttgcaggtgcaaagctggcaccctgctgctcaccctggctgccctttttctcatctctgccaccctatgaggctcaaaggaaggggcaccttctcaaggaagccttcttgatttatttcccgaggcagagtcagaactctacctatggacactagctgcactggctggtctacgtgcctggctcctcctaggaaaaagaactactggaaaggaggagctatgctccagtgtgtacacccggtggctgccacgggccattgcacagcaggtgctcacaacactgtgctgaatgagtccagtgagccggtccagagtgagcaaatgagaataggactggaagacagtgtgactgaatggcagcaggtcaataagtatacatgtgcatgatgcctctgtgccagaacccagaccagggctgtcctgagaatggagcaagggtagactctagatacactgctgggggtgggcagggctcacccagggtgtccaggaaggtgctggggccgcttgggcaggagctctgtggtccccttcagcttctgcaagcaggcgcgggccatgacatcttgttgaaactcctcctcctcactgcaggggccgaggtctgtgagggtgggggaagacaatcaggagcaggagaaggaactctcaataagatctgctcccacccgctcatctccagaaggctggagcaatcctttcgaaggaccccctcaatcacaggaccttcccagagacaacccctaccctaccctacctcccacccatgctccccaccttcctgatccatgggatcaccaggggccccagccccctcgatgggcaacttgctggctgtggctggttccttcttcaccttcttagctttcttctgcttaaattcttgcaggtcccactccaggtcccagagccaggggtcttctttgtacctacagagccagtccactagggcagggctaaggctaagccgaaggctaggccgcccacctgccagtcccctgcctagatcctgcccacccaaggcctggctacctctctcctgagagcagctggcaggcatcattggccagatccatcaacgacttcttcatctcccgctggagctcctcataagtgccctgtgcctctgccaggtaacgctcccagttctggttgacaggcaggtaggagacacccatctccagcatgccggccagagtcactgggtggggacaccttggaggcaaacaccaggagctgccataaatgaccacaggaggcaagactggcccaatccctgagctggtttagcaagcctcaacccagccactgacatggcacagctcaaaagtcagacggcattaaatcccagctctactgttactcatccctgggtaagcaaccccatctctcggagcctcagttctttcatctataaaatgggaacaatatcatcccatcctcaggggtaatgtgggaaatatagatggcaaaagtgaaaatggctgccacacgtggagtaatgactctgtgccaggcactgtgctaataatcccatacatgaaaaacatcatgcctgaacctcacaacttgggtggtaaaatacagctgacatttaaacaacacatgtctggatcgtgcaagttcacttacacatttattttcttcagccttagccacccgagacagcaagcccaacccccgccctcagcctactcaacgtgaaggatagatatctttatgatgatccacttccacctaatgaatagtaaacatattttctcctcatgattttcttaatacattttcttttatctagcttactttaagaatacagtatataatacgtataacataaaaaatatgtattatgttatcagtaaagcttctagccaacagcaagctattagtagttaagctctgagggagtcaaaagttacacccaaattttcctcccttcttttttctttccatatctttggtacaaatatacctgaattttcagcatacaagggtcacttcataagacagactcattaataaacataaccacgctgtatgtgaagcccttggctaaggatctagttagagaaggtgcacagtaaaccaggaccgtgcacatgacacacaagcacaactccatggccctccccttcagggcctctgtcaaatccagagtccagggcccagatggacaccactgaacagaagggctccattctttcagcctagaaaagctaaggtccccaacctgagatagaaccagcgccacctgattacagtgggcccgggtaccaggaacacactgacccccagagattcccacatgggctccccctcacctctccaagaagagcggtagctgctgctggaaaacctcatgggtggcccacacgtcctgggcacagtactgcatcaggtcctggcacaaggtgacaggaaggcgcaaggtgggcagccatcccattaccaccaccagctctcagggtcaggcctggcagctgcatctccccaagtgcagctaggggtgtgccacagcccatgtccccagagccccctccagcaccatacctggaagttctcacgaatgtccttcatggtgcccttcacaaacagttctcgaggctccttctctaagggaggcccccctacataaagtctgtgcacctctgccagactgttgacactgctgatgtcc

SEQ ID NO: 1886129 - DNA, 4001 bp, Homo sapiens
gtagcctccagaggcctcaggtccagtctctaaaaatatctcaggaggctgcagtggctgaccattgccttggaccgctcttggcagtcgaagaagattctcctgtcagtttgagctgggtgagcttagagaggaaagctccactatggctcccaaaccaggaaggagccatagcccaggcaggagggctgaggaccctctggtggcggcccagggcttccagcatgtgccctaggggaagcaggggccagctggcaagagcagggggtgggcagaaagcacccggtggactcagggctggaggggaggaggcgatcttgcccaaggccctccgactgcaagctccagggcccgctcaccttgctcctgctccttctgctgcttcttctccagctttcgctccttcatgctgcgcagcttggccttgccgatgcccccagcttggcggatggactctagcagagtggcccggccaccggaggggtcaaccacttccctgggagctccctggactggagccaggaggtggggaacagggcaaggaggaaaggctgctcaggcagggctggggaagcttactgtgtccaagagcctgctgggagggaagtcacctcccctcaaacgaggagccctgcgctggggaggccggacctttggagacggtgtgtgggggcctgggcactgacttctgcaaccacctgagcgcgggcatcctgtgtgcagatactccctgcttcctctctagcccccaccctgcagagctggacccctgagctagccatgctctgacagtctcagttgcacacatgagccagcagaggggttttgtgccacttctggatgctagggttacactgggagatacagcagtgaagctgaaatgaaaaatgtgttgctgtagtttgttattagaccccttctttccattggtttaattaggaatggggaacccagagcctcacttgttcaggctccctctgccctagaagtgagaagtccagagctctacagtttgaaagccactattttatgaaccaagtagaacaagatatttgaaatggaaactattcaaaaaattgagaatttctgaccacttaacaaacccacagaaaatccacccgagtgcactgagcacgccagaaatcaggtggcctcaaagagctgctcccacctgaaggagacgcgctgctgctgctgtcgtcctgcctggcgccttggcctacaggggccgcggttgagggtgggagtgggggtgcactggccagcacctcaggagctgggggtggtggtgggggcggtgggggtggtgttagtaccccatcttgtaggtctgaaacacaaagtgtggggtgtctaggaaagaaggtgtgtgaccagggaggtccccggcccagctcccatcccagaacccagctcacctaccttgagaggctcggctacctcagtgtggaaggtgggcagttctggaatggtgccaggggcagagggggcaatgccggggcccaggtcagcaatgtacatgaggtcgttggtaatgccgggcaggtcaggcaggtaggatggaacatcaatctcaggcacctggcccaggtctggcacatagaagtagttctctgggacctgcaagattaggcagggacatgtgagaggtgacagggacctgcaggggcagccaacaagaccttgtgtgcacctcccatgggtggaataaggggcccaacagccttgactggagaggagctctggcaaggccctgggtcactgcacctgtctccacctctgtcccacccctcccacctgctgttccagctgctctctcttgctgatggacaagggggcatcaaacagcttctcctctgtctctgcccccagcatcacatgggtctttgttacagcaccagccagggggtccaggaagacatacttcttctacctacagaggcgacatgggggtcaggcaagctgacacccgctgtcctgagcccatgttcctctcccacatcatcaggggcacagcgtgcactgtggggtcccaggcctcccgagccgagccaccccagtcaccccctggctcctggcctatgtgctgtacctgtgtctgatgccctgggtccccactaagccaggccgggcctcccgcccacacccctcggccctgccctctggccatacaggttctcggtggtgttgaagagcagcaaggagctgacagagctgatgttgctgggaagacccccaagtccctcttctgcatcgtcctcgggctccggcttggtgctcacgcacacaggaaagtcagcttctcctgggagggccaggatggccaacggatggtgaatatttggtgctgggcctaatcagctgccatcccatcccagtcagcctcctctgggggacagaaccctatggtggccccggctcctccccagtatccagtcctcctggtgtgtgacaggctatatgcgcggccagcagacctgcagggcccgctcgtccagggggcggtgcttgctctggatcctgtggcgggggcgtctctgcaggccagggtcctgggcgcccgtgaagatggagccatattcctgcaggcgctctggagcagggtacttggcactggagaacacctgtggacacagggacaagtctgagggggccccaagaggctcagagggctaggattgcttggcaggagagggtggagttggaagcctgggcgagaagaaagctcaaggtacaggtgggcagcagggcagagactgggcagcctcagaggcacggggaaatggagggactgcccagtagcctcaggacacaggggtatggggactaccttgatggccttcttgctgcccttgatcttctcaatcttggcctgggccaaggagaccttctctccaatggcctgcacctggctccggctctgctctacctgctgggagatcctgccatggagaagatcacagaggctgggctgctccccaccccctgcacacctcctgcttctaacagcagagctgccaggccaggccctcaggcaagggctctgaagtcagggtcacctacttgccagggccgatcttggtgccatccagggggcctctacaaggataatctgacctgcagggtcgaggagttgacggtgctgagttccctgcactctcagtagggacaggccctatgctgccacctgtacatgctatctgaaggacagcctccagggcacacagaggatggtatttacacatgcacacatggctactgatggggcaagcacttcacaacccctcatgatcacgtgcagcagacaatgtggcctctgcagagggggaacggagaccggaggctgagactggcaaggctggacctgagtgtcgtcacctaaattcagacggggaactgcccctgcacatagtgaacggctcactgagcaaaccccgagtcccgaccaccgcctcagtgtggtctagctcctcacctgcttccatcctccctggtgcggggtgggcccagtgatatcagctgcctgctgttccccagatgtgccaagtgcattcttgtgtgcttgcatctcatggaacgccatttccccagacatccctgtggctggctcctgatgcccgaggcccaagtgtctgatgctttaaggcacatcaccccactcatgcttttccatgttctttggccgcagcaaggccgctctcactgcaaagttaactctgatgcgtgtgtaacacaacatcctcctcccagtcgcccctgtagctcccctacctccaagagcccagcccttgcccacagggccaacactccacgtgcagagcagcctcagcactcactgggcacgagtgagcctgtgtggtgcgcagggatgagaaggcagaggcgcgactggggttcatgaggaagggcaggaggagggtgtgggatggtggaggggtttgagaaggcagaggcgcgactggggttcacgaggaaagggagggggaggatgtgggatggtg

SEQ ID NO: 1886130 - DNA, 4001 bp, Homo sapiens; identical to SEQ ID NO: 1886129

SEQ ID NO: 1886131 - DNA, 4001 bp, Homo sapiens; identical to SEQ ID NO: 1886129

SEQ ID NO: 1886132 - DNA, 4001 bp, Homo sapiens; identical to SEQ ID NO: 1886129

SEQ ID NO: 1886133 - DNA, 4001 bp, Homo sapiens
tgaaatggatggacagggctgggggcagggccgcctgcctggagagctcggcccaggccatccccaccggaattttcacagtttagcctaagttataacatgtcctgagcgaaggtgggaggctaggagcatggaagcacagcccctggggaagggggctgagaggaagggaggaggccccccgccccccaaccctcaacgccaagggcagagtcctggaacctccccctgaggacccggctcgtccttccaaatgaacacggtgaaactagggctcagttttctccttcattctcccgtttccctcaccccaccccctcccataaccacccccaacactaggggctccaacaacgtccccctcagaccgggctcccagggcagagccagctcatgccactctccaagaacccatgcccgtctccagactcttatctcatccccgggagcctcagactgggatcacccccgctccccaacccatcccttcccagcccctccctttcccacccacccccccgcatgtagttttggtattttcatacagatgcagtcggaagtagctatacatgaaataagcctaacataaaaatagagctttttccgtccttccgtccggaaagcaaacatccttcaataaacatgcaaggcggctgtcctgtgggacccaggaccagagagggagctgcagaggacagggctggacagagggtagccctgggtcttcaggaacaccagccacccagccatgagagagggaggggaaggaggcaatgtgggtaccaagagtccagaaggactcaggcctcagccccagggtcgagatggagtcccagctctcctatccaaacccactccccgacccatgggctcttgggctgggagcatcgctgcatttagtcaagtttgaggagtctgaaaaatattttccagaagataaagtcttgggtcatcgatgccccagcttcacagtcggtgccctcattctcagcccctcaccatccgtgcgccacctggggcccagcagccgcctgcggctggacgtctccaggcctggcatcctccactgggttattctgtcccctggaagaagtggcaggcaaggagctcccgggccagccggctctgagtgtgagacgttctagtgccctgggctgcagaagcctgaggcatgcccagcctcgggaggccctagtggaccagcaagccaagagtgagtgtgggcagcacccccagccagagggaggcggccagggcacaggcatgacccagcaggtgctcggccatgatgccgtcctcgggcagcagctgccagtgctgagcctcgcggaagtaggagccctcctgggcctcgcagaagtagtggccgtactgctgcgccgtgaggttctcgatgaacaggatgcagttggggctctggtgaccaggttcgcagctctgctccacgttctccttgtggcgccatgagtaggtggcgtggcgggattccatggggcagctcaggtagtagcgagagtttggggccagggaaaccttctgcagtggggccttgtctggggaggcagtggggaagcagccgtgaggagggacaaagagctcccaggggaggatgtgtcctccccacggactgggatcccaggacaaggcttctgaatgaacgtggggaacccagccctcagcgtcctccttttttctcccgtctcgctcatcccaccaagagggctccctctgcaggactgtatcctgccccatgtacctggggcccacaggacaaggccatgtctccctcagaccaggacaatcagggcagggcagtaccccactcattgggccacagccgccagcagggccagatcaggtacctggtttggggttgggacactccttgtgtggctcggctggattaatggattgcagcactgacctggagtgggaaggacgaaagaggatcagcagatacaaggctgcagacctgaccctcctatccttaccccagtgcagttccagcagagaggagggtcccacaagaaaggcccagtaccgccacctcctccagcccgacaacacctccccctctcccatgcccaccttctcccagggacgagggatcccggccaacgtaccgttcggagctgtagatggagatgcagcggccttggtcccagccgcagtaggggtctcgggacatgaggcaaccgtggcagcccccgccatagacctcacacaggtccaggggcacctggctcacctcccactgggagctcacatacagcttcctctggaaggacagcaggattgggtcaggcccgggccccaccccacactcagtcctaaatgtccaggccctaaggcctagaagctcttaaaagaacacacaaatcacatgcaaaggagccctgtcctcagctgcagtcactgcatagcccatgggacgcagtgggggaaggctcacccgctcagcatccagcgacatggtctggatggcagccgcgcggcggaagggctggatctccatgatgttgaaggcgaagctgtgctcctgctcccccggttccaccaccttgtggatagtgcccctgtctgtgtatggtggacagagggtcagtgggcgggagtcccactgaggggccaggcagctttcctctaggccggggaggggtgggaagtcacaactcaggcaagggtcacaggactggtgtgggcagggcgaggagagcgtgactggggaagaatgtgggagcctaagggcagcctggaaccttccaaggctgatccagagaggccatcccaggaggcccaggggtccctggatacggcctccaacattcccaaggctgcacgggaagaacagaagcaggagccccacaccagcaaggtcagtgcggctgctgtccatgcatcacctcgtttaaccctccacagccctgcgaggtggctgtcatcttccccactccacagataaggaaatcaggctcagaaaggctaagccacttgctcaaggtcacacagctggtgagcagcagagaccgagttggaacccaaatctgtcagagcccaaccactcagctgcttctacaactcccctgcctcctggactcttagggaatatatttactttaaatacattttttttttattttggagtaattttagattcccagaaaagttgcaaagatagtacagagagctccaatctacccttctccagttccccctaatgttaccatcttacataaccacggtatatttgtcacaactaggcaactgacattggtgcattactattaacaaaactacagactttatttggatttcactagtttttccacaaatgtccttcttctgttctaggatccaattcaggactccacgttgcatttgatcttaggggatatcttaattttataaaatcttagatctaaaaaggatcttggattctaaatcaagagttcccaaggtcttataaccgagctgcctgcctcctagaccaatgctctctccgttcacaattagggaccaatgggcaccctgacccctggtcctcccaatcctacctcacctgctctcccagtttctagaatagcctacctccctctctccctccctcccaatttcccagggcatcacctgccccaaaaaagcagtcagatgattgcctgcctaggatgtttcctctacacatccgtgatcctcatctgtggactctgagatgtggccagatgctccttgggcctgataaggccccaccccagccactgccttcacagacatactgccctatacctccttccaaaccagccccagtaacagcatacccttggcaaaattctcaggaaaagagccaatacttctcccagttgtgagagcctcccattctctgcagaggacttagaaagctctatttttcagtctagcccaaatacgaatgatgcaggctccaaaatggtgcctcctccactgcccttagaacgaagacaccttctctaatcactcaagtgtgc

SEQ ID NO: 1886134 - DNA, 4001 bp, Homo sapiens
gccttgagctcctcagcccgggacacgtactgccccacctgtagcagggaaagggcctgaggaggggctgtctcaccagctacccttgccagaacccacctccaagttctccctttgcattgttagtgactgcctcaagctataaacatgtcagggggcaaatgtggctggcctgacccattcccagctctgtgttgcaggagaggaagttccaattctaagagagccattccccagaggcccccgagatctccgggccttaccccctgcccccccacttcctcatggggactctcacccacctttgccttaattgcctccttccgctgggcatccacttcatctgcagaaagtgaggtcatatgaggagtctgggcgaacccctccctgccccacaacgaaccctctggaatccctcaaaacacaatattccaggtttacgctctgctttatcgcctacaaaattctagatagagaacttctggaatccacctactgcagccacagatgactcccatccctgctgcacccacgggcttcaggcatggcctgggactcacagtgcagggcaggtacaaagaagtccagagccttgcagtagagtgataaggcagctgctgaatccccctcctggtctttcttcacagcctgcaccaccagggcggtctggggatgggcagatcaggggtcaggtccacctccctaccctcccacactcaccaagatgggagatcagctcccctgagcccgccctctgtctctgttgggtgagtcaccaattcaccaccaacgggggcaaggagacctccagcccaccctcagcccaccccagccccagccgtctgctcactgctcgccccagactctccccactgggcatgtgctccaggtccacccaggggtgcgcaaaaaagtcctggaaggagatgcgacggctggggtcccgctccaggagccgctgcagtaggtcccggcagtctcgggagagcaggggccgcaaggggagctgcagggaagggaacggcagggacagatcacactgggctcctccacccctacccctagcccaggggtctgcgaggaaccccagaggtacgcgttggacaggtggggaatctgagaccgaggaggaacaggatgggtcaggatgatggagccagcggggagcgaggcctccatccctgggctcccggtgcaccctcgctggagccctgagctgagctagaatcgtgtttctgggtccttatttccctccctggactatgctcctaggaaggctgggcctggctctgctttgcattctccccacaagggcctgcaaaatgggcactgtgctgccagctgtgggctgacctgaggccctgggacagcctggcacctcgacttccagcctagaacctgcccctccaccacaaaggcagcctggagcccatactccagtctctgcaggtcagaacgaggtctaaaccctcagggccctgactccctctgccccccagtggtcgctaaggccctgctagacacacctcgatgacccggttgctacggatcttctcttccagctccgagaacgacctggaggcaaaggggggctgcccgaagagggcttctgtggaagggaggcagagcggaggctgggagggaatgggtcaagcctggcctgacgcccctcagcaggggccctgggccagcagtcagttttcatcagaacccttcagaagtggcccagagaggccttgcctgaggaaactgtaggcctcagggtgagaagcagggaaaagaggtctcaccatacaggatgacccccatggaccagaggtccacgcgggcgtcatactgccgctggcacaccatctcgggggccatgtagaggggggagccacggagcacgtgcttctcatcccacggggacatgtgttgtgcgaaaccaaagtctgcaggcaagaggagaggcagcagggcttgaattccagctgcttcagctcctgacttgtaaagcctcaccccaggctcctctccaccctccagacccgccaggatcaaccctatttccaagcctctgctcatcattaggctggaacaccctcctatatctgcctctggggtataaaacctacccatccttcccagctcccttgggcaccttttcctaggaagcccacctgatcacaccagctacctgcataagcccccaccctctcactgtccccccaggcttaggttctatcacagtctctggcctccagtgtcaattatccaaatcttatcaagggtcaccacctcctactcccccaccacacccctcctatgtggccacagatggagtcacagacttgagccccaattctgatgacagaccaagtcctgtccctgcccacagagggatccctgatgcttgtcacacgctgaaccctggcactgttcccagattgacccctaaacctggacacacagtgagtcccaactctggccacagactgagccctaactccacccattatgctgctggacttgagcatgggtagcctgagaaagcttccaccttttgatgacagggcccaaccccagacttcacggcctgtcactctttgaggactctatagagggctccataagaaccagggctgctgagtgagcccaggcagagggaggcctctgcactctccaaacctcatccctgctgtttcagacacagacctgccagttttaggtggggcttctccaaggagctcagtagaatgttctgtggcttcagatccaggtgagagatattccgttcatgcaggaattgcagggcgctagctgaggagcaggacccacgaagagagacagttcagagcccattcccgcctgcctctcgcctccccggctcacatctgcctcctcaagcctgcacaaccccagttcctgcctggctggtctaatgttttccatataagcaccaagatcacaccacttctaggagtttgccaccccacccgagtgcccaccctccttccctctgccccttcacaagtctccccacctctcagaagcttctctggatgccccagcccttgagatcctgctcttttccttggcacagcacttgagtcctacctacaggactctggaatgttctacaaggtccttatattatgttctatgtatggaagcctgaacaccccacagaggggttaccccctcatctctcccacagcgtccttgagcaagggttgagtgtatgagataaacaggaccataaaatttcaggctgtgcaggaggcagctgcaatgcgtgccaaggctctaagcctgggggaggggtgggatggtggggggcagagaacaagggacagagtgtcaggctggtgtcacaggcctttacctaattgctgcatgaagacacgcgccaccttctcaggcagaatcctgcgggtatggatgaagcgagacaggtcgccccctgcgcaaaactccatgatgaggtagatattgtcactgtcccactgtgtttagaggcagagaggcggcctgaagagagtgtcccttctccagctccctttggcagcggccccgccccaggctcacacctgaaagtctttcagctgcacaatgtggggatgtcgaatgcccttgaggatctcaatctccgtgaggaggttctccaccgatgccttgttcagacttttcttggctacacactttatggctaccacttcacgagtgtccttctgcgagacaggagatttggggactctgccttgagggggccaggacccttgtctgactggaaaggctctatctggttccctctgttcccccaccccgcccctccccgggtctacctactgcacaccagcaccgggcttcccagctttcccttgtgaggccagtgaggaatgctgattctggaatcctggcttcccgacacagcctcagcctggtcttctccaaccctcggctagctgatccatttctttgcattctggagtgctcccggcagaggcatgtcactcagg

SEQ ID NO: 1886135 - DNA, 4001 bp, Homo sapiens
cacttgcctacttatcgtaataacctagcaaggtagatgtgatcaattctgtttcacagttgaggaatctgagactcagagatgttaagtgactgactcaaagtcacacagctcgtaagcagtggagccaagattgaaactggcacatgtttgacttcagagccaggactccccccaccacttaacaaaggctgtcatatccatccctcaaatcaggaatgcaccccacatccccccccgagatgcttgtttcactgagacacaatctctccccgttccatctccaaaccagccccagaggctgagggctgcccaggagagactcaactcccctcctctcctgttctccagctctgcccttcctgcccaatctgggcttctctcccgctgtgaaggacagatacctgctgagtgacaccaatttgcagacttctgaagtgtaaatgagatttctaataggactggcttcccactggcttcaggcagggttaggagtaaagggaaatttaagactggaagtgcagaagaagagagccagtttgtaggatagggagcagcagaagcagaggcagccaaagtctctgggtagaagtgaagggctgacttggttcagagaggtcaagtgccttgccagaggtcacacagctagcaaccggaagaggtagaatgagctcagctaatggttgcatttttagcattccctaaatgagtacgatccccaacccccaactttagtttgtaatatgctttagtctcctctgctgtatggatggaggagggtgggaatatacttaggaatagggagggcatttggatttgttgcttgaaaattaatctccactgaaagtgtcatcactgtaacttggtgctcaccttagggcaaggtaccccccaggcagagggatcccaggcagaaaggctgggaggccaggcaaggtggctgatgcctatactcccagcactttgggagaccgaggtgggcagatcccctgacgtcacgagttcgagaccagcctgaccaacatagcaaacccctctctctaccaaaaatacaaaaaattagctgagttggtggcattcacctgtaatcccagctagtcgggaggctgaggcacaagaatcacttgaacccaggaggtggaggttgcagtgagtcaggactgtaccactgcactccagcctgggacagagtgagactctgtctcaaaaataaataaataaataaataaataaataaataaataaataaataaaaggctgggaaatgctttttctgatcactaattctaattgtattcctgccacagtgggggatggtccccaagcactgggcttttttcccttggccacacctctggatgtagcagcacagaggcaggtactgggaccaagaaattccatacacacaagtccactccctcagctgtggagcaggcaccagacaagctccgaggtcaggtgtgtcccccctgctgccaggtacactgaacatccgggaacctcggtctccagtgcatacctctcggtgcccgcatacactgtggctgtcgggccacagacaatgaggccctgagccccaggatgtggagtcacaaggtgcctccattataggtgccccaaagtgattgttgggggaattagtaattaaggagggtttttctccccctgcccttcaggtagtggtatggaagcagtccactgctccctgaaaacagagaccctgccccacttccctgctcacaccatagtttgtccatgtttctggaagagtctgccgatgggtgtttagggtggtgacctgagatgttttctaggaaacacaaaagatacaaaaaagaacacgtggaaggatagccaaaaaggggggctgcccccatttcctgcaccccgctgcgatggctggcaccattaggtagactgggatttgttgttgagcgcagtaagacaacaacaaaatcactagtcttccagatggggccagccggtccactctgtatccaggccagttctgcaaggcgttcgaggaccacccccctcccctcgccaccaggtcagcggtctggatgctccttcaggcgaggcgttgtctccgctcctattactaagttcatctttgaacacctctcctcacctcagaattccctggagaaattattttttcttacttttcccttttttctggagtgttctactttctataatggacacagttgttttgttttgttttggtgagacagggtcttgctctgtcacccaggctgtagtgcagtggtgcaatcacagctcactccagcttcaaccttccagactcgagtgttcaagtgattcttccacctcagcctccctagtagctgagactacagctaatttttttttttttttttttttttttagtaaagacaaggtctcagtatattgcccaggctggtcttgaactcctgggctcaagtgatcctcctgcctcagcctctcaaagtgctgggattatagacgtgagccactgcacccaatttgagcatatttcctttacaaacaggggaattatttttaaagagaagcaggcaagtggctcatttctctctttcctttactaatcataaagcattgaaccaccatgcagaagagaaactagagcttggaaatggtgacccctctctactggtgcctcccccttctggaagcctatgggcatggcccatggtgaaaattcttcctgtggttactgagccctggaagcttcagaatgaagtcagagtggtggtgctggggtaagcagagcaggaagaggaaaaggggaaatggttgtggacaggaggctggtggaatcctggcccagtcatcccctccctgcaggcacagcgctgggctccctggttaatttcccttgcagtgtggcactggtggaggagaggcaaagcccctgctgcctgggccagcctctaattgcgctggcaggacacatccgctccttaattagcaaaagccacaatatcctggcggctcagagagcatggccctaattgtatttctgcagcaactgaaggataattacccttccctattggtgctgcttttaattctttctctttttaattgtgagcacttcctctttagcccacccttccatccttgggtttattctctctatccagaatgggggtgggggcttgcctggtgatggagacgctcaggagcaggaggagtggggggagtcatggagaagactggcaatacctagctctgagtcccagccccttccagctgtcagcctgagacagggcacatctctgccatgggtctgagaaaaaccaagaagttcttttgtggaagatgtaagggagaggtgttcctcccccagaggctctttatgaccctcttcagtctaccccgcagtgaggtgctggctctgaaattcccagctgtagaaaactgagacctcctttccccatcctttaatctatcaagaaacagagatggatgtgtggtctttaatttcttttacaaaaaaaaaaaaaaaatagccccgtgcctctttgccactgttgagaggagggttagtccttcaaccttgaattgttttagagacaaggacctgagggtaccattagagaacaatgctaactaaggtaaccccttggttaataggagagcttagcaccctaggtatttctaggaaaaacaggcctttcttagggacctggcaaataaactttgagaagtaatagacaagctaaaatgcaccacaaagagagtttggagagaaccacagcatctctctggatgtcagcttgcaggactgactgatctagcttacatgagcaaccctggccctaaagccaccacccaaaccactgccctgctagaagctcactatgagagcagggactctcactcattattcttccaagtgcctcgcgcacagcctggcccgtgataaatgaaactggttggcaaagaagcagagttcagagacagagtaggattgtgaggtgtgaacaggg

SEQ ID NO: 1886136 - DNA, 4001 bp, Homo sapiens
agcaactagtgcactcgtcacgtcatgttgtaagtagtacttgcttacattatgtccctccctgacaatcccttccaacctctgtcaacctccttccccacaatcacacacacaaaaccacacaaccaggaagggaagccatggagcgagtactgtgaatcctaaaagcggctctgtaatttaaaagtgcaatggctgtacctgaagaaaatttgtctttagcttcatcaggtgaagaaaattggttttataacacaaggcccaccaaaccagaaaagcccaggaacgcttctccacaggactcacttagcacgagaaatcactctgagcaaactgacacacacagtatttctcaaatttttctttttcatttagcagatggtaaaggaatacaactgaagttaacaataaatgacactctggccattttgctccactatgaatgacagacatttaagctagttccatctggggaactgaaacagaatcatgttcatataataagccacacaaaccaaattaagtgtaatatgtgcacccaaacttgacaaaacttgtacttaatgcagcctgcaaatccccaagagtccacgacagaatacaagaatagtaacaatgatttatctcaactgatcttagcttcttcacaaacttgccaataatgacctttcaagaactgcaccgtttgtcctcatctgcgcaatccaacagttcagaaaaactgaagaaaatgcttcttctaaaaataaaacacttgttgtgggggggactactaacaaaaaaaaaggcacactggtttttactgtactgaagcaataaactctccaaataacttcattaaggagtgtcattagcaaagaatgaacaccaaaataccgctcaatccaattttcattgtgaattccgggatctagaaaattaaatgggacggtatcactctgctataagaactatttccaaaacaaaacaaacctatctaccccctttcttgatttttttttaaaaagttttagggtttttccttttttcaacttcacatacttcgtggctttgcaaaaaaaaaaaaaaaaaaaaagcagtaaaccgtatttaccaaaaaaaaaaaaaaaagttttgtttggtatcaaagtatagctgcaagctgagccggctggctgcacgggtcccagagcgcgtggggaccgcacgggtctcctgggccgctcgcctgcgacccgcgcgggtcagctgggccgcacccccgagaagccgcggagaggcaccgacaggcaggcgcggcccgacgtgtttaccgtccgcgtcgaccccggggagccgctccctcgcgcccgcagcacttgttcacggcgcggactccacggcggggactccacaccgcggccgcccgccccaggggaggagtgagcccgccccggcggcgccgacccggggacccggggcaaggattcggggcctcgctgggggcggagcgcctgaggtagcatcggcggccgggcgcgccccccacccggaaagcggcgacggcctctaagttgggctgcggagtgggaggcgcgccgagccccaagcagacaatgcgggagaagggcgatgcgcagggaggaggggtccgcagacctgaggtcccggcgccgcccggcgacccgtctgtccagcccgcccccgaaacccccgcagcccccgcccctcctccggggcccgccccaccgagcaaccgcaggggactggccgcgctccgcgccccgacccacaaatcacaaaacttcccccaactccgccaactaagttgcgctctcaccgtgcggctcccggggctcccccgcgggccgagctgggacaactcttcaccttcgccgcggagaaagacaataggcggccgctcccccggaggcggctaaagcggcggcgaccgaggcgagcaatgggcacggcagtctcggcagagcacaggcgcttcaccgcggctgctcgggctccgcgctggccctgcacacagctccagtccgcgcatgcgccgaaagacgctcgggagggtgggcggggcacgcgggaaggcggtaacgcctgcgagtcctcccgtgagtacacgcggagcaagaactgcgagctgggattgcacggcagaactgcccatctcgctgcatgagaccaatagtaaggctcctggacggggcactcaggttgctaagggaggctgaggttgaccgccgctgctgctcggcggcaaagtgatcaaagtagggtggctggcagaggctgctctgggaaatgcccacccacggtctcctctccgccctgtctccagaaaccgcccttcctctgtgtactggtggttacctgagctgcagcacttaaccacacatcgtgaaatgatttactcctctatttcccccacttcaactcaggaagtggggtttagtcttctgtgtccacagcctaggaccgtctaaggtattaggtattaaatataggtattaaacaagtgttggatggatgcacggcgctatggcggaatcacaattgtgacagtgcattccgtgaacttctggctactcgatcaccacaaagtcattccgtgttcgagctgcaaaggacctcaaaaatcatctggttgctttgggaaacaaaatgtggtccgtgtaccaatggtgccggtaaccaccggcccacagaggaagggcggtttctggagacagggcggagaatatattagttggtacacgaagaaacttcttttttcaaatagttaagtgtttttagtgcgcattaggagggaaatgcctatcacgtcaaaccactgtttcattaatgttatttcttaggtcaaataaaaagtggcaaaaaacgaaagcacttcaagaaaagtgttaagtaaaaaactgagacaatttatatgcagttgaagaacgtgtaaaactagttgatagtgattgaagtaagaacagcggttaggtaggaggagaagattattggctgggaaggaggaggagggaaccctctggggtgctggttctgtattttgacctgggtgatagataacaaaagtatatacatgaataaaaaatacatccagtgcactttagtgcactttgcacattttaaacatgtatttttaatgtcagttttcaaaaatctggtacaggatattacccccccgcccccaaaagaaaagcaaagatgcaaatgactgccatttgggaaacactgatccaggcggctcactagcagtgaccaaacacctgagaaagggtattgtgaatacctgatgtgtgtgccaggaacttccattgttgaatagctccaaatctcagaaatgctcctaatgttgagctctggtgctcacatatattttctctttttttcttttttctttttttttttttttttttttttgaggcagagtttcactcttgttgcccaggctggagtgcaatggtgcaatctcagctcactgtaacctccacctccagggttcaagcgattctcctgcctcagcctcccaagtagctgggattacaggtacccaccaccacacccggctaatttttttatttttagtagagacagtgtttcaccatgttggccaggctggtctcaaactcctgacctcaggtgctccacccacctcggcctcccaaattgccgggattacaggcatgagccaccgcacccggccctattttcttaagtaaccctcaccgaatggctttaaaaaaaaaaaaagaaaagaaaagaaaggccaaacatgcccagttcttcatgtgaaattatttctgtatcacttcatcatgctgctcaccctcttccactgttctctaatctgtccttgttgatttttaaaaactggcacaaggcctggcgcggtggctcacacctgtaatcccagcactttgggaggctgaggagggcagattgctcgagcccaggagttcgagaccagcctgggcatcaattgaaacgccatctgtactaacaaatacaaaaattagccaagcatggta

SEQ ID NO: 1886137 - DNA, 4001 bp, Homo sapiens
ttcctggactccatcagggctttttccttgatgagcagcccattcaggttctgctaactgtcactcggaagccttgaattctgtgcatctcctaaccctgcgtgagagccctgctctgccagcacccctggaggcagatccaggtcaccgtgttgtcagccacattcttgccagcacgtagttcaagtttccatctgaagagagggaaacatgaagaaatagaggagcgtgctattaaaataacgaggcctttttgctaagagcaaacaatcacttcctttccttggcacccagaatctgcagggccctgaattaggcactgaagggagatccagggaagcatgaggaatagtcactgcccttgagggcctggatgtataggttcattctacttttcattcatttattcaagaattatttcttgagcctctaccaacagcagacactgagcctggcactgggtttagagcaagaaccatataactgggtatacaacagtaaactgtgcagatatggttcttgctctaaaattgcttgtagtctagtgaaggacagaggcaagtaaacaagcaactacaaaatgaaatgaagattgcagtgatggggaggggagggggtactctgggtgtagactggggtagggtgggcaaggctgagtgggtgagatatcattacagtggaaacccgaagactgagtatgtgtgagctaagcatgcaccatgaggggtctggcagttgggacggaagtgtactccccatggagagaatgtgcagaagcacgcataaccttctgaccggactgcagcaggcctgggtgacggtggtggtgaaggtggggagtgttgagaaacacaaccagcaaggtaggcaggggcccgtaagtgaaggactttgaaaggcctgttggagagtttctgtgttatctcaaggccagtgagataaagggcttgaagcagcagatttgtatgttagagtcctctggcctcggggtagagagtggatgaaagcaagcaggatcggattcagagaggtcaattaggagctgttgccagggacagtggcttgaaccaggaaacagcccagagaggtgcagagaggttgaggaatttgagacatctttaagaggtacaaccaacaggtttggagactgggtcggaagtaggaaatgaggaaaatggaggaaaccaacacttatgaagaaacaaagacagaggctgacaaacaaaagcaatagccattctccaggaagaaaatggtggcatgaccatgtgttttgagcaaggaaaaattgcaatgggctagagagattttgaaggactttctagaagagttagaattggagctgggtctccgacatgggtaggattttggtgggtagagaggacattccaggctaaacaatgatgcaagttagagttctaaggcagaacagtgtgtgatttgtttagcatgatttggtcatggttttcttgggagagtcccaaagaactgattctccagggggtgttactaaaactcttattgaaaggagggactacagagatgaatctcatcactctcccagaatggcacagagcttttcatggacccccgggccacctatgtaggaacctcagggggtctgtggaccactaaaagcccaacatgcctgagactccacagatactggcttccaccatgataaaggcaaaaagtccctctttcccaaaatcaatacttttattctcataggcctcctgctgtggtctagtccccatgttgaaagctgctgtcccagggtgttgcttcactacttctaggctcctgcagagtcctgcctcataggccgcactggtgagtgaggccagcaaacccatcagggagactacatgaatccaaggccgtggaagacttaggtttggatattccctctgctccctcctggctgtgtgaccctagaataattactcaccctctcaaaaccgagactcagagacgttgggtaattattctagggtcacacagcgaggaaggaggagagggagtatccaaacctaagtctgtctgacagcaaagcctgttctctccatctctccaggttcctaagccaggtgagcgttgaacctttcttgaatcaaggttccaattccaaggtaggaaagcacagtcagtcagggaaatatttacactgagaccacgcaccccagccctttcccaacctgctcttgtgtgatccttttgaggttttttgtttgttttgagatagagtctcactctgtcgcccaggctggactgcagtggtatgatctcagctcactgcaacctccgcctcccaggttcaagtgattctcctgcctcagcctcctgagtagctgggattatagatgcccgccaccatgcccagctaatttttgtatttttagtagagatgggatttcaccatgttggccaggctggtcttgaactcctgacctcaagtgatccccccacctcagcctcccaaagtgctgggattacaggcatgagccactgtgcctggccttaagttttttatagatgggaaaaccgaggtccaaacgtgagcaagggctctgcatgctacctctctattttctcagccccttctgcaggctccatgccataagaacatggctcctaaggttcaggcctatggccccagtttaggtggtgcctctgctctgctccccaccaccccagcctcctatttgaaggccaagactactcagctttgattcaggttgaatgagtcatcaagggtaaaacaaagaagagaataaaacaaagaagagaaggcctattcccttgcagatgaaatcaatccactcaccttttgacatctttttgttctagaatgatgacagtatgcaatgactcagaatcatcacactcacagagactactttgtattttttcttgcaaatgaagagacaatatgcccaaaaaatgagctgaaaatggctcatgaagggagggaagatgacctccagcacaccagggcagagtgggggccacatgaaggtgcaagagtgggagggaaccacaacgccttggcagagaggagagcaagtgggggccaagccacaaagctcttcaaggccagtcaacagtgaaacctgaaggagtcccatccatccccaagtctgcttgagttaaagccctgcaccctcacaagcagctggagggaggggaggaaagatattttcaaaagagccatcatatatggggtgtgggaaagaaaaacttgctgcgtctaacaccagagagcctctccaagccaagccatctgcctcagggcaaaggagggaatggaagcgggagagaagggtttggagccagctctcagcaacatgtttctatctggagaaatgagctgagaagatctgaatcttctccagcctgttctgcaaatgtgggataatcggcccctggcccaaaggctggtgctcacagcgtggctccggcattacccaggactttggttcttggtgatgggaaagaggacaaatttggaagccagagaagctagggctggatggtctggaggaaaacctccacttctctcagactgttttttctgaggaaacagatgattgcaacctcagaggttgggaggatgaaatgatgtaatgcatctggagctgctctgtaaactgtaaaatgctatgcaaacggtgcttgttaatgtgtttacatatatgggtgagttaacatagtctgacagactggacgccaaactcagagtccaaggcaatggggcattatattctgtgccttagcatctggaaaacatgatgaaattggaaatgcatttattgaaaatgaaaagttttctacagagcttcctgtcctttccaatgaattccaggcttcccatggtgcttgcagggctctgccggaagctgctgggaaagctgacttccattctggttgctatgaactccatttttggttctgttctgtgaccatcttcatttcagtcacttgcaccattataaggattg

SEQ ID NO: 1886138 - DNA, 4001 bp, Homo sapiens
ccagaatggaagtcagctttcccagcagcttccggcagagccctgcaagcaccatgggaagcctggaattcattggaaaggacaggaagctctgtagaaaacttttcattttcaataaatgcatttccaatttcatcatgttttccagatgctaaggcacagaatataatgccccattgccttggactctgagtttggcgtccagtctgtcagactatgttaactcacccatatatgtaaacacattaacaagcaccgtttgcatagcattttacagtttacagagcagctccagatgcattacatcatttcatcctcccaacctctgaggttgcaatcatctgtttcctcagaaaaaacagtctgagagaagtggaggttttcctccagaccatccagccctagcttctctggcttccaaatttgtcctctttcccatcaccaagaaccaaagtcctgggtaatgccggagccacgctgtgagcaccagcctttgggccaggggccgattatcccacatttgcagaacaggctggagaagattcagatcttctcagctcatttctccagatagaaacatgttgctgagagctggctccaaacccttctctcccgcttccattccctcctttgccctgaggcagatggcttggcttggagaggctctctggtgttagacgcagcaagtttttctttcccacaccccatatatgatggctcttttgaaaatatctttcctcccctccctccagctgcttgtgagggtgcagggctttaactcaagcagacttggggatggatgggactccttcaggtttcactgttgactggccttgaagagctttgtggcttggcccccacttgctctcctctctgccaaggcgttgtggttccctcccactcttgcaccttcatgtggcccccactctgccctggtgtgctggaggtcatcttccctcccttcatgagccattttcagctcattttttgggcatattgtctcttcatttgcaagaaaaaatacaaagtagtctctgtgagtgtgatgattctgagtcattgcatactgtcatcattctagaacaaaaagatgtcaaaaggtgagtggattgatttcatctgcaagggaataggccttctcttctttgttttattctcttctttgttttacccttgatgactcattcaacctgaatcaaagctgagtagtcttggccttcaaataggaggctggggtggtggggagcagagcagaggcaccacctaaactggggccataggcctgaaccttaggagccatgttcttatggcatggagcctgcagaaggggctgagaaaatagagaggtagcatgcagagcccttgctcacgtttggacctcggttttcccatctataaaaaacttaaggccaggcacagtggctcatgcctgtaatcccagcactttgggaggctgaggtggggggatcacttgaggtcaggagttcaagaccagcctggccaacatggtgaaatcccatctctactaaaaatacaaaaattagctgggcatggtggcgggcatctataatcccagctactcaggaggctgaggcaggagaatcacttgaacctgggaggcggaggttgcagtgagctgagatcataccactgcagtccagcctgggcgacagagtgagactctatctcaaaacaaacaaaaaacctcaaaaggatcacacaagagcaggttgggaaagggctggggtgcgtggtctcagtgtaaatatttccctgactgactgtgctttcctaccttggaattggaaccttgattcaagaaaggttcaacgctcacctggcttaggaacctggagagatggagagaacaggctttgctgtcagacagacttaggtttggatactccctctcctccttcctcgctgtgtgaccctagaataattacccaacgtctctgagtctcggttttgagagggtgagtaattattctagggtcacacagccaggagggagcagagggaatatccaaacctaagtcttccacggccttggattcatgtagtctccctgatgggtttgctggcctcactcaccagtgcggcctatgaggcaggactctgcaggagcctagaagtagtgaagcaacaccctgggacagcagctttcaacatggggactagaccacagcaggaggcctatgagaataaaagtattgattttgggaaagagggactttttgcctttatcatggtggaagccagtatctgtggagtctcaggcatgttgggcttttagtggtccacagaccccctgaggttcctacataggtggcccgggggtccatgaaaagctctgtgccattctgggagagtgatgagattcatctctgtagtccctcctttcaataagagttttagtaacaccccctggagaatcagttctttgggactctcccaagaaaaccatgaccaaatcatgctaaacaaatcacacactgttctgccttagaactctaacttgcatcattgtttagcctggaatgtcctctctacccaccaaaatcctacccatgtcggagacccagctccaattctaactcttctagaaagtccttcaaaatctctctagcccattgcaatttttccttgctcaaaacacatggtcatgccaccattttcttcctggagaatggctattgcttttgtttgtcagcctctgtctttgtttcttcataagtgttggtttcctccattttcctcatttcctacttccgacccagtctccaaacctgttggttgtacctcttaaagatgtctcaaattcctcaacctctctgcacctctctgggctgtttcctggttcaagccactgtccctggcaacagctcctaattgacctctctgaatccgatcctgcttgctttcatccactctctaccccgaggccagaggactctaacatacaaatctgctgcttcaagccctttatctcactggccttgagataacacagaaactctccaacaggcctttcaaagtccttcacttacgggcccctgcctaccttgctggttgtgtttctcaacactccccaccttcaccaccaccgtcacccaggcctgctgcagtccggtcagaaggttatgcgtgcttctgcacattctctccatggggagtacacttccgtcccaactgccagacccctcatggtgcatgcttagctcacacatactcagtcttcgggtttccactgtaatgatatctcacccactcagccttgcccaccctaccccagtctacacccagagtaccccctcccctccccatcactgcaatcttcatttcattttgtagttgcttgtttacttgcctctgtccttcactagactacaagcaattttagagcaagaaccatatctgcacagtttactgttgtatacccagttatatggttcttgctctaaacccagtgccaggctcagtgtctgctgttggtagaggctcaagaaataattcttgaataaatgaatgaaaagtagaatgaacctatacatccaggccctcaagggcagtgactattcctcatgcttccctggatctcccttcagtgcctaattcagggccctgcagattctgggtgccaaggaaaggaagtgattgtttgctcttagcaaaaaggcctcgttattttaatagcacgctcctctatttcttcatgtttccctctcttcagatggaaacttgaactacgtgctggcaagaatgtggctgacaacacggtgacctggatctgcctccaggggtgctggcagagcagggctctcacgcagggttaggagatgcacagaattcaaggcttccgagtgacagttagcagaacctgaatgggctgctcatcaaggaaaaagccctgatggagtccaggaactcaagtcccagttctggttccttcgccattcagctgtgccatcatgggcacatcacttagcctcactggagtt

SEQ ID NO: 1886139 - DNA, 4001 bp, Homo sapiens
taatacaactgcagtatgtataattaaattaattagtaatataaaatgtgtttaaagcaacatctcatcaacagattaatagataagaaacttttagaagttttaattttcccattgtatgtgttcaaagaataggaaaaaaaaaaccctctgaaatttcctaaggggttgataaaaataaaattgctgtggtggtgggcttgggggggtgggggatgtaaagtcgatttacctgcctctggctagtaacaggaaaaaggaataatcagaacataaaaacctgtttggccatatttcatctccttatagcatattgaaatgttttggcgccaactcatctcattctaatacctcgaaggctggtataaaacacctttaaggcacattgttttctgagcaattatttagagtcaatgtctaagaaatgcttaagcatcacctggtaatacaaattttaaagttatatttaaaacacccaaggaggtttttactgaacaaaaattagattgcctatatgccaaagctcctcatcaactgaaagctggaagctaaatttggccgtaagaaactggcttggaacttcagaagttctggggccaaattcagccctgtattacttgtatgccttgttacattaaaaaaaaaaaaaaaaaaaaaaaaaaagggctgttccagtgatagcaagcattccatttattcatctcaaaagcaataagatcctagaatggagccttcataacacaaaatgcttttaagttttccctgaggggaacacaatatacacaattcatgtaaaaagaagaaaaatgaaagctaagtatttcagttaagggtcagaaatcaatatttccttaacagcctaagcaacatgcattactcttaatacaaatactcagagactttacattcttcataaagggagattttcacataattggggttgaaagtggcagaatatgctctcccaacttagtttctattgctgcaaaatggaaaagaatatatttggacagcatttcactgatccctgtcatcctcggttaaaacttcttacctaaatgtccaagtgtggagcaacacgtaactaaattttaatacatctcaatggaatatgataaagacattgcaatatcaataggagaacaatatagtaacagaaactataaatgtaaaactaactttattgaagaaatgagaatatggtatttttcaggtggcaaaattttttcatgatgttccgttatgctgtcaataaaaagttttaaaaaagaaaaacttctgcctgagtagcacaaaagtaagttatgataagatgtagtaggaagagaatgaaccttaagagataaagtgtaactaaaaggactgagtttaaaaaaacaaacatcctgactagctggtgagcattaacattagtcctccttctgttctccagaatggagccagagtgatccctgcaaaggacccgtgtgattttgtcactctactgcttggcatgcttcagtggctttccattattttcaggctgaagacgaaaatgtttatcatggccttcaaggtacccaatgatctggtctcgaactcctgacctcaagtgatccgcccaccttggcctcccaaagtgctgggattacaggtgtgagccaccgcacctggccaatagaaactatttttaaaaattcatttatgtgtcttatgccttttaaaatattttttgtcctgttttctccttctttcaatagtgtactctgatatgattcaaaggaaccccagggaccaacacctctcctggtttccaaaagaccttaattttactacagtttaagattcaagtgtataacaaattctttttttctaaagcagaatttagaggaatcagttgtgacaattcatagagatacacttttttttttctgtgcatgaaaagcagtaaagccccgactcctgattttgaaaccaatttctcatatcaaaagtctacacatctgttgaaactgcctctattgcttaggactaagaaacaatttctttgtatgggctgactgaacaactatcttttaaatctcttaagtatgtactagaattagtctgtgtttgcatagacatcttttacttgtcgatatacaccaacacagctgtggaagaaagactaagctttagtttccacttggccatcggaaactaaagtcacttaatctctctaagcctcagtttgctcatctataaaataggacaataatacctgctttacaggtatttgggaggattaagtaagaaaatgatagaatcatgctggataagctgtagagcatttacaaatagaaaacataatcaagattccacttagcttgaggattcagacacagagttttgcagagtggccaagtcacaaaagggctcttcaaaggcttctactctctggtgtgacactggcacaacacctattgccccggtagaaagacctttatttcaaaatgtttcactaggaaacagttaaaagctgttctttggttaagcgcactgactcttatttggatgctgctgcctctttaaagcttagatctgcattcttctaatggagaaaaggagagtaggcataaaactatagaataaagagcctggaacttagtaggtgttataaaacattggtttaaaaaagaaaacatgagtgaataaacccaaagcgttcatctattttaaattatccgaattgccatggtaaaatacaagttgtaattagaagaatcaggtttggtgctttgcacataataagagttgaaaaaataaagaggatgactggagtaatgacgttcaaataagaagttaaaatattaacactaaaaaactgtaactgaacttttaattaaaaaaaccctaaaaactaatgacattgttttcttcttatttaaaaaaaaaagccagtattccacttgaaatgttcgtgagatatacaaatccactgatttccaaaattaaccttatgatatttaaagatgatatatgccttgttgtctatggatacctgccagaacttgtacttacgtatttctaaacacttaattcagcaatatttcacatcaatttccccctcgatttttctagctatcatgccttgagagcagttcctatctttgaccttgaaaactctcaataaaaatcagtcacatttccatttcctagaaattcgaagagtgtcaccaaactttcaggtacagataaattcttgtctggttatcctgtattgtgaaatgccagctcttcattatttcagaacattctatatcagggctgatattgaatctataattttgtgttttaaaacaccaaacatcatagtgaaattcaaaaaatgaatttcagaattctgagtgttcatatttcaagctcctacatagttcgtttattttttctttccatcgagccacagaagttgaccccagtaagaccattaagtccactgatttcattagtaatatttttgttcacactccaaaaatcaaattgttcatattccaaaaattaaataatttggtttatcaacatttcaatgattttccatattctcccaaattatttgagagctatgacataccacgttaacatttacatatgaaaaacagaagcaaaaaagcaattttcctaatagaaggcatttaatcacgttgaaataagatcttaccttacagggctgcccctcagcccaccttatactttctggatgtttaagtctgtggctttgacttacatgggttaacgtcctctgtaagctaaatccagtatcagatggatatggcatgaggaaccagccagcatgaggaaccaggtcctactgttaaatctgcgtgccatgttcagttgagaacaaaacagtctttccctagtctctggtttctctggcgttttggggtgagaaaataactgagtttaggatagacacactcatcagaattgttcttgaaaccctttgcatttcaatcagtgcaaaatgctttttaaatattcct

SEQ ID NO: 1886140 - DNA, 4001 bp, Homo sapiens
tggccattatgcactagtgtagccataccaattgttaaaaaaaaaaaaaaaaaatccaaaccaggtgataaataactgttgccccaaatcttctgagttattctgctaatagttattcaagcttttgtcccaaagcctctctttgcccctggctgtcctagaccttctcccaggacatcctagacctcactacaattcaccaactgaagaattaatgcctagcacagcaggaatcttggggaccatccctctgatgggtcagaacctgccgcatattagaatatattttcatactttccctggttgtatgactgaccctagattacatgagtaaataacagaaataggaaatttatactgaggcaactcagtataaatttaatgggtcagagaaatggactaaataaagcctgccttggccagtgtttgtcttcccttagtcttcttcttagaacattttaacattacatgtgtttgaagccatctgatgataatccaaattcttttttaaagtcttataaatattcatataccttcctcataatcaaaggcatagctggagagttagagctgggctctgttacctttaccctatcagggctagaggctttgtatttccaatatttagcttatcatctgatgcaatgctctggaacaactcctaattatttctgatgtcaaggtgtcaggagctaccaggtctcctcacagacatttccagtgctcatagaggcaggtgtgtgacaaatcacatgcacccacaggaagaaaacataaccaaatgaaacatgaaagaacacacatgtctgaattggggatgaagatcacatccccacttctcctctaaataatgccttcttgcttatccttgtgtctgggttattatgatgatggaagtgaagtttagctaggatgcggttgtgaggagttttcaatatggcacatgggctttcggctacattaaacctgtgacaaaaagcgctcatttgagtcaggctgtcactgtagctaaccatgcatccagtgaagtttcctaaattgttgcaagctgaactgatcaactcatgagtcctaagatcagttcagcttgcaacagtttaggaaaggactccagaggccacaaccactaatgcagatgtggaacgggctcttgaaacccccagaggtgaccagcagaaccatagccagactcagactaaaaagggcataaagcactactttagataccgcatataagaggaatcatataatgattgtcgttttgtgactggcttatttcatttaacatcttcaagtttcatccatgttgtagcatttacagaatttacagaatttccttcctttttaatgctaaaaatattccactgcatgtatatactacattttggttatccattcatgcatcaatgaatatctgggttgcttctatctcttggctattttgaatgatactgttatgaacatgggtgtgcaaatatctctttgagacactgctttcaattgttttggatatacacccagaagtgagattgcttgatcacatggtagttctatttttaatattttgaggaatcacaatagttcattaattttgattgctgaacaatgttctgtggatatactatattttgtttattcatacatcagttgatagacatttgacttgttaccactttttgcccattaaaagcgatgctgctacgaacattcatgggcaggtctttgtgtggacatatgtctttatgtctcctgggtagatacgagtggaatttctgagttgtatgataaatttatctgtaacttttaaagaaatagacacactatttttccagagcggctgcaccattttgcattcccaccagcaatatatgagggttcccatttctccacacctttgctaacacttgtctgtctttcattactggctgaaagtctcaagaaagactgtgcactcaggatcatctttatgactaagtttacagtttctaggaaacacagaaggatagtagggcaagttttaagacatcagaggaaaccaacagacaaatccagaataagggacattccataatgtgtaagacaattgaagcatggtctcttcaaagagtctttttttttttacaaagaactgttggccaggtgcggcggctcacgcctgtaataccagaattttgggaggccaagacgggtggatcacgaagtcaggagttcaagaccagctgggccaagatgctgaaaccctgtgtctactaaaaacacaaaaattagctgggcgtggtggcagatgcctgtaatcccagctacttgggaggctgaggcaggagaatcgcttgaacccgggaggcggaggttgcagtcagctgagatcacaccactgcactccagcctggatgacagagcaagactgtcttaaaaaaacaaaaaacaaaaaaacaaaaaactctcctatattaaaagagactaaagagatgtggcaaccaatgaaccaatgcatgagttttaattggatgctagtttcagagggaaaacatctttaagagatattttgggaacacacaggtagacaaagcaaatgtggcaaaatattagcaactgttgaatcttcctgttggaaatatgcatgtttattatactattcttgtatgttgacaatttttatgaataactttttaaaatctcatttgaagacagacaaaaaataactccagagccaatatatcctgctgggcagaaatatcaagaaaatatctttggtcagccagtatgctagcctctacttctgtcacattttctaagtcctcttccaggtattattaccttcttgtcggtaacatccttcctggaaccccagggataagcaatgatgtgaccactgatcctcctttccctcccacctctttgagaacttcagacaatttaaaaagaataaatggtgactgaacatagataaccctctgggagagaattctacagagttctctccgacctcataatgcagcgttctagttgagaatccacaaggtgaaatttccatattcagcacacattccttgtcctgtccaacctttggctcataacttgttacttttcatgtatttgtgtatttgccccccttaccaacctccatgagacgggaattcatctttagatcgccgatagggccgggggcagtggctcgcgcctgtaatcccagcactttgggaggccaaggtgggtggatcacctgaggtcagtatttagagatcagcctggccaacatggtgaaaccccatctctactaaaaatacaaaaattagctgggtgtggtggcacgtgcctgtaatctcagctactcaggaggctgaggcaggagaattgcttgaacctgggaggcggaggttgcagtaagccgagatcgtgccactgtactacagcctgggtgacagggcgagacttcgtctcaatcaatcaatcaataactatagcatgtagcatatgtactgtacacaaagtaggtgtaaatatttctactgaatgagtgaatgaatgagtgaatgaatgaatggatgaaattctgaagttcggggaggacttacccaggaagaacacagtgggcaacacagaaggagctgatacaaagaagcagagagatttttctgaagatatctgaaggtaccgtctatgtacacatagatcttagaatcgggaaccaaaggacactgagagcccttggaaaccattaacctttcttgcccgcccgcagcacagctggtgtaagctctttcgactcagtgagaaatatccctttcttagctttgaggacaatgcttgtttttcccattcattaaaatgcatacacctgcaaaaatcaatttttttttgatgatggtgcagtcaggatcggaacaccattaaactgttcctgctgctgctaattagaattaactcattagcacagagggctaagctggaggtgccaacagctcagcttcctgcttcacctctctctctgctgacagacc

SEQ ID NO: 1886141 - DNA, 4001 bp, Homo sapiens
gtacaaagggattcagaaaaccttctgcccatgattatctctgaggagaaccggggaccaaagtaggagggcagctgactttccctgcctggtcttttgtgtgtattttttatttaattttactgtgaatgctaacacactcacagggttcacaattccaaaggtatacagtgaaaagtctccctctaccatccacctcagccacacagttctcctccccagagccaaggggttttccttttgtactgtttgaattttcaccatttacatatataccctatattcaaaataattttgttaggcaaagaacaaaaaaggtttgcaggagtgaagatggaaaaaatatttctatttttacaagagggctgggcaaaggctgggagaagaggggccgtgaaaatcactaagggagaggctccagggagtgaagtgagccaagatgtacgtaaggtggcctggggtccagctctgccttctgagctgtgtgacccttagggagtcacttcagatccccagatctgtttcctctcatgtaaaagggtgaggggatgggggtcagggctgggtggtggtgccagttcctttcagcctgtctatcatagcactcacatacccatatacttagaaagcccccctaccaatcggggagtctgagcctacctttcttcctttcttccctgaagccgggcagggtcccttccttggtctacagccactcgctggggagcttgggaggtttcccaagctacaggggccctgagcttcaggacaagccaaggcatcagggtggaaagtgacctgaaggcagatgagaaactcgagagggaccctagcactgtgtggggccgggacccccacgcactgagcaggggcaagccccactccctgagcccagttaagaggggctgggagcctgagtggccgggtgtgctgcattgggttgccatgggaacgaattcagatttcccccaattgcttttttatttgctagacattgtaatacatcttatgtcgtgacttcttggggcagggaggagggggagctctgggagcttgcctgcaccttaacctcgcgggaagttggggaggcttgggcaggagcagcccggtcggggctggcgtagaggtagcgggagactgagctcggttcctcccgcccacccgccggctcttggtttgtatgcagggcagggccgacccgtcggggagggaggcccctgccctggccccttgccattgagcgcactccccgccagttctgctccgcttcacgctgcacacagaccccccaactgcacacaaaggcagctgccagagcccgtgaaaagtgatcaaattatcaagaacttgacctcaccgaggggcgaagctccggcaaccccccagccgtatgctaatggcgctcaggggctgactcgtcgaataattcgataaaggccgcattgttagcggcagggcagcccccagcccaccccattcactccctccacccaccccctaccgaccgctgtctctctcccatcgcatttgcatcccaaaatccccgtccacggctccgggagcggattgttccagcctgatttatggggtgaaggcgaaggctggcgccttccccttccagcgacccctctgcaaccccaaccccctccctctccccggcccgctccactttggggttcctgctccggcgctgggggataggggtgggggaccaggaaagaggaggactgggggaaagctggcactgcaagtgtccccagagagagagccgaggtcaggtacctggtcggggcgcggccgctccgtcgagctggagtccgctgggccggcgctgggctcctctcggctcctctggctcttgcgggccgggccggggcggtcggtggggcgggcgctcgcacgcagaagttgtgagaatcatttctactttcggttatctagctttatgacggctctgtggcactcatacagctagataaccaaagagagaaacgggcctcccttagccagtgccgctgccgcgccgtgggctccacgtgctgctgcctgccgagcgcgggagcctgagcggacgccgtgcccggatcctggggcgcacgcggagagccagaggggatggacagacacacgcacacgctgactcccgccacctaggcccgcagcccccgcccagttcccttcctccctcgccctcccggcgcatttctcccctgctccccgttccgtgcgtcctggcaccggcgctgccggcctgcctcgacggcgtcccggggctcacgtagggcacccgcgcggagcgcttagagagcctcgagcgccccggccgcccccagcgcactggaccgccggccctcctctcgcaggctaatcgccccgcggggaagtgacgtcagtccagggatcggccaatcacaggctcccattcaaatcccagcccccttcccgcgctccgcaccacccagccttacaatggcctcggcgttcacggcttccccgccccgagggcaaggaagcgcaccctctgccctcagaagcctcagggctgcgcaccgtctgatctttcacccaaactcctccgtcttcctcccagggcccagggagcccagtacccactgcggaccatcagagtttgggagacaagaatgctcgagtgacaaggtttagggacgcgtgtgataggacgtggcgatctccacaggagggccgagagcgctcacggagaggccgagagcagaagccatttcacctttaacttctctcttcctttccccatgcccagcacttgcagtagatctagcccacgcggcagagaccagggattggaggaagaattaagtgtcccggtgagcgcaggtcggtgtcccacccataacacctggcactcagaggttcctcagctatgctccacttgggcgaggccctggcctgggccctgagtaccaagctgctaggtcccttctctctctcggttcctagacacactaggagtgtaaaaccgattgtgccaagcaccttggagaagtcctaggctctctcttggctcctggttaaattcatatttcaccaaaaattaaagcacaaagccatgcctccactctccttcttcagctctcagcacacacctggctactcactccaagtagccgcaacagtggaaagggactgccaccttgggtctcccggaatcacccctaaactgagctggcagctgaattggtggtaccattgcagccttccagatgtgagtggcctatgggtaccacttcgtgctcatgccagccatcacccccttcttccttgctgctgtggctaccctccagccttgagccctatgattcacctccgcctgtcagccatccccaagatgcaaaggattcagtatgaaaaatgcaatatctttgctcctagatacccccagaaaaatcttaagctcaacagctagggagagattttatgtgggactgggcaagtggattcccagattccagcagtcaatacacgggagtcacagagactctcactgctgctgtctacagtgagcactgtggggttaggtggaggtacccgtgcagattcattttagtggggtctggggcactgggccactctgagccaggtaaaacccttgcaggatgggttggaaagaaggggccaaaagtggatggtttggaaaagatttcatgattttactaaaaatctcttccttccatacactcccctaaaaatgacacatgtggattttgtcaagttctggattttgtcaaatgcctctttccccattgcttgtctgtggtttgttctaatttcatcccatctctaaatccgaagcaggtgacatcctgctctcatcccagccagcttgtgaccaaccaaatctgctatgtacatgtttccctcgaaatcccacttcgcagacacattcctttttccagaaggtgaacaagggctggacagctgaaccagcagaggaacagagaggccagccacggttcaggaaggaa

SEQ ID NO: 1886142 - DNA, 4001 bp, Homo sapiens
gtccctctcttgccatgtgacacactaggtccgctttgccttccaccatgattgtaagcttcctgaggcctcaccagcagcagatgctggtgccatgcttctcatacagcctgtagaaccgtaagccaaataaaccacttttctttataaattacccagtctcaggtattccttttttttttttttgagacaggatctcactctgtcacccaggctggagtgcagtggcacaatcttggaactgactcccgggctcaagtgatactcccaccttagttagcttcctgggtagctgggattataggcgtgcgccaccacccggctaatttttgtattttttgtagaaacagggttttgccatgttgcccaggctggtcttgaactcctgagctcaagcaatccacccatctcagccttcaaaagtgctgggtttacaggcatgggccaccgcacctggccagatattcctttagagcaatgcaaagtggactgatacagatgacatgcaaatttgtgaagtgttccatattttttactgcatgttctcatttataagtgggagctaaatgtgtacacatgaacacagagtgtggaatagtagacactggagacttgggagggtaggagggtgggaggtgggtgaaggataggaaatcagggggtacaatgtgcattatttagatgatggttacactaaaagcccagacttcaacactgtgtaatatatctatgtaacaaaacttcacctataccccttaaatttatatttctttttttttattttttttttgagacagagtctcactctgtcacccaggctggagtgcagtggcgggacctcggctcactgcaacctccgcctcccaggttcaagcgattctcctgcctcagcttcccgagtagctgatattacaggtgtgagccaccgtgcctggccaaatttatatttttaaaaagtaacaaaaagaattacaaaaaccagaggagcatttttaggtaaattaatcttcattcccacaagactagcgcaagattgggtttaaattttgcatagattttgatttttgttgttgttgttgtttgagacagggtcttgctctgtcaccaaggctggaatgcagaggcatgatcaccactctctgcagcctcaacctcctgagctcaagcaatcctcctacctcagccttccaagtagctggcaccacagacacacatcaccacacttggctaattttttttagagatggggtctatgttgctcaggctgctctcaaactcctgactcaagcgatccacccacctcggcttcctaaagattttgtgttttttttttaaatatgaaaagacatgttattattattattagtgcatacaccagattgcactgtctccaatggcaaatgaggcagagggtaatatttctctttaattccccaagaacctcaatatcatctgtcttctggaggttccggtttcttctgacatctgtgctaatgtccacgaagatgccaaccgtacttagcataaagaacattttgctaagttgttctattatgggttctcgctcaaggtgttcacttttttcttctctagttttcagcacttgaccatgtgtttcttcattattatacacaggatctggtcaagggataggttttgtgcgttcatatggaatgtctatagaaggatggtaacatactattgtcctggcatcaggtgtcaaagcaaattctactttgcaattgtagtcacctggaaaagaagagtacgtagatttatgacaaacataaggctccattttggattgaagataaatgtttccagatagttctctttgatatcacccgtcttactgctgctactgccatgtagcaagacacttatcaggtagtatgaaaaaagatgcttcaaagagaatctgcttctgggcacattaattttcatccctgcttcacagctgttcaccatgagcccatcatcttgtctccttatttttgcatagatcttaaattatttttacccagttgtaatcatggacaaatttgtagtctgctttttttcacttaacattagttataaactgttccatactgctgcatattctttgtaattataattttaatgatttataatttaattgttttacttgaatttgttttctttctttttttttttttttttttttttttgagagagaatctcactctgtcacccaggctggaatgcagtggcatgatcacagatcactgcagcctcgacttcccgggttcagttgatcctcccacttcaggctggcgcgtgccaccagacctggctaattttttttattttttgtagaggtagggggtttcaccatgttgcccaggctggtctcaaactcctgtgctcaagcaatcctcctgcctcagcttctcaaagtgttgggattacaggcatgagccattgcacctggccaatttacaatattatatatcataatttctattctcctgttggtggacatgtaagaggaagaggataatggttcatcatgagctctgtaccaggtgctgcccaccacaggctacatacaggcattatcttgtttgaccctcatgatcctgctatgccccaggctctgttctagtcttgggaacacatcagcaaattaaatagacaaaatggaacttacattctagttggtgtcagggtcgggggcagatgtgcaattaaaagtatacataatgctgaagaattaaatgttgaaggagtttaaattttgaaagtgtttgctatacataattgtcctgcattattattattttatttatttattttgagatggagtttccctctgttgcccaggctggagtgcagtggcgtgatctcagctcactgcaacctctgcctcctgggttcaagcgattctcctgcctcagaaggagtagctgggactacaagtgcgcaccaccacgcccggctaatttttgtattttagtagagacggagtttcaccatattggccaagctggtctcgaactgctgaccttgtaatccacccacctcagctcccaaagtgctgggattacaggcatgagccaccatgcctggccattgtcctgcattgttataaagagttttcagcacgttttttaaaaaaggatacacataataaataagaaaagtatgtattataagatgccaaataatgtgtaaaaatagcagagtaaggagagtaatgggtttaggaggagggagtgttttcatttgaaatagagtaattggggtagaccacaccgagaacatttgagcaaagacttggaggagatgagagcaatccctgaataacacatgaagaaatcaaattacttttacaatatgttctcgctatgccgttagaaagcaggcattagaagggctaagatcccaagaggggctggtgaaacttgtatatatctacatcattggctaaaatataaatcagcccagttcttttgtgaagcattatgtcaattcacacagccatttaaaatattaatgacttttgacctggtaatcccactcctgggaatttgtcctaaggaaatttttgcaaagaagagaaaaagctctatgtggaaagatcactgcagcagtatccatttgtcttagtcaggtctaaccttagtcaggtttatttctcacagttccgaggttggagtctgagaattgggggccagcagggtccagttctgggagaaagccctcttctgggtctccagctgtattaatccattctcacactgctataagaacatactggagactgggtaatttgtacaggaaagaggtttaattggctcacagtttggcatggctggggacgcctcaagaaacttacattcatggcagaaggggaagcaaatatgttcttcttcacagggcagcaggaaggagaatgagagccgactgaagggggaagccccttctaaaaccatcagatctcgtgagaacttactatcacaagaatagcatgagggaaa

SEQ ID NO: 1886143 - DNA, 4001 bp, Homo sapiens
ttcctaaaggacataacaaacaataggtaaagctctgaatacatccctttacacacttctttaactctcacaatcgacctacaagagtgatattatccattttatagacaaggaaccaaaggttctgagagattatgagacctgtccaaggatatacagttaaaaaacaatggcgccagattcagcccagatctgtgcagttccaaagcccatgctaaactgtatcctgtcatctcttgcctaaatatccctactcacactcccctatcccatctttcccttcacctgaaagaattcatcttgttctccgaaattcatctcaaacattttccaatagaaagctttccaatttcccctccccaaggctatgtttccacaacattggtgtttacctttatcatatatctggcttcaatgcaattctttattcatgtctgtttcctcttctaggctctctgctcctttagagcaacaatcatatctttttcatctccacaacccagtatatagccaagtgtgcactacataggtgttcaacatatgtgaatgaattagctaaattttaaacaactagatagtaaggacaagagtctatatcctttacatctactaaaacacccagcaatgcttcctcataatagctaaaataattctgtttgaacgaacgaattaacatctgtatagattccctcatacacacctacatagatgaagagaggggtgaaatgagcatatatgctttactgctttaacccataggcaccttgaatttgagtaaataacggataatagaatagtgaagggtaattaagaaagcctgatggtataactaattccaaggaacatcaagtttccaaatatctggtgtctctgaagcatgatgctgggaagacagatcatcagtttgacttacaacagaattacaaatacgtacttattcaggggacattaaatttttcttcctctggtgtctaacaaaaatgagtccccaaaaactctttagaacatgccttcacaacaggatatgactgccattttattgataagaaaactgacattacatagactaaaaatacatagcagtgcagttggtgaaagtaatgaaacagaggtctgctaaccaacaaacacggaccctcacttattcctctcatttctctcttctgtttcctacgttcttgggaagcctggatatgatagccaagtcttcctttcgttcactcaagaaaaagcatttaatgttgaccaactctgagacaggaaaagcctaggccctggagctactgagacacagccttagccctccatatgcttagtgaagtccagtcaacctctgagttctgccctttggcatctccacaccttttttggtgttccctcgtctaaagcacctgcatctttctctggccattttactaatataaccggagtcttactcgtagctcattaactttaggcctcactgagggaacctgggcactcaggtgttcacccatctcctctaccacaactttctgttctcaccgtgctctcaccacagcaccgtcatccccacggagggttttcgagcaccaaaagagccacccatgcaaacaaactcccctcccagagataaatctgtcaacccctgccgtcctctcgctctttagccccacaactttcactaccgggccctctccccgccatagtgccaagagcgtccagaccacgactagggggcgtgcgcgcgccgggaggggaaacgtgcgcgcgccggggggtgggggggcgcctagcccagcgccagcacggaccatgcacagatcagcaatcgctggccgccaggccttcggagggtctgtccgccgcggcttccgctacgggcggcctcgcaccttctggctcagtacgcgggactggcgtagccgctcctcggcactcatcgcccgcagacgctgcttcagctctccccgcaggctccgcttggcgctgctcaccgctgccgccgccatctcacgcccaagccgagtccagtcccgccctcggcgccctgggcgccctcgggttcggtctccgcccctggccgctcccaggtggatccgcggcctaggggcgggtcggggctcggggaagcgcccccaccccgcttccgggacgcgggcccgcggcgcgccgcgcgcttacctcgcctctggcccttgggacccagccctcgtgcggtccccgtggtccggctcgccctccccggttaggggagcggtggcgaggcgccgtcgctgccctgccgcctgacctccctgagcctgggccctcaccgggaccgcggaggcggcagcgccactggcggggatggtaaagatggccggcagtacccacggtgcctggcatctcttgtactgttcagtagtgggacttcaggggccagaaaagaagggcaaggcaggacatgtagcgaaatcgtcacgagtcgcttaactacagggataggtctgacagatgccccgatttccttcttgtgcaaacatcagagtgtagttacacaaagttactacacacctatgctacacacctgtacagcgtattttgtaccgaatactgtaggcaattgtaagcaccgtgatacttgtgtatctaaacacagaaaaggtaatgtgttggttggctaccacatcagtaggtattaggaatttttcagctccattataatcttaagggaccacagtggttgatggaaatgtccttatgtgatgaatgtatagatgatacataatcgggaacactgctaaagcaataactgtagtgtaaaagccaaattttgcgggtttctagtgtgaatgtattccaggtaatagtgcccacataggtacttcctgttataaccatcagtgactgttcattcccaccactcagctctgattaaaacacaaaaatgaattaaaactaaaagcagttggggggtgggtgaggcacttgcaggaagaggtaaaagaaactgttaagtcttaaactgctcccagtagacaggcgcctcagatggcatagacggttgcctctcagatgtgacttcctaagaaaaccagagctgtctctgccaaaaatacgtccctactgaccgccccagtgtcttaatccccaccgttaagaatcacacctcctaggtaaagcattaattaagtgcccggtgagaatgcacatggcttgagaggggagttctggcttctttatggaatctatcaacagcttccagggaaagctaatgcaagtcccagggggactgtgttgtaagaaaaagggaaggccaggcaggtacagcgtatacatagtgcaattagatttgctgacctaaaagttagaacacgaggtctaacaaactacgtacttttctaatctgttcatttttaccaaaaaataaaaattaaaattaacactagctccacgttgaatcatttaccaattttctttgttcagaatatcccagagtatcctgcatatcaggttgccatatccatcaaccccaaatggcaagccagagagagaaggctggggaggaggcatcaatggaaactcttaagcagccaggggcactggaaactgcagaaagcatgggaaggaaggagggaagagggaagccgacctgagtctgcttctagcctgagtccgcttctcagtctagtctgcagtctagcctagtgacacagaaaaggacttttggggtaatggcacaccttaaaagtctgcctggggcagaaaagacaccgccttcctggtcatcatcccataattaattgcctggatcctgtgttgagcttttaccctttggctgaatttccagccagactccaaaactgaagacaaaaatggcatatagagaaaaatacatacaatttattcattaaatagggacaaaatttctgtaactctggaaggtcaagttacatcatcaaagttgtttatttaaaagtagaagtatgtgttggcaatcgttttcgtaagagtcagaaaaattaggccggtttcacaat

SEQ ID NO: 1886144 - DNA, 4001 bp, Homo sapiens; identical to SEQ ID NO: 1242221

SEQ ID NO: 1886145 - DNA, 4001 bp, Homo sapiens
cttaaaaagctataaactgcataagttcgaggaacttaggtcgtccataatattgctaatgaccagccttaaactagacaaccactgaagaacctggcctatgagctgagaaacttgggttcttttatggctggccattaacgacaagtggggctgtaccactgtgctggtcacttgaagttctctgagtcacctgaaaatgagggagtaattggagccaaaagaggtctgtcatcataggcagccaatctagaattctagaatcctccaaatttagtttaatatcacatactatactgggttactcaaaacagtgtcattctggctgggggtggtggctcacgcctgtaatcccaacactttggaaggccgagacaggtggatcacttgaggtcaggagttccagaccagcctagccaacatggagaaatccctgtctctactgaaaatacaaaaattagccagccgtggtggcgcacacttgtaatcccaactacttgggaggctaaggtgggagtattgctagaatccgagaggcggaggttgcagtgagcagacatcacactactgcactccggcctgggcggcagagcgagataacgtctcaaaaaaaaaaaaaaagtgtcattctgtaagctcttctagcctgcccaagtcataggccctataaagggaagactttctgcatgccatcaatgtctcctgtcctactgaacagccctgaatctgaaaggggatggtcccccaccacctctccacggacaaatcataaacatttaacatttaaaaaaaatcatctcctgtaattcaacccaggcctctcatggcattaccattcacataagagaaagttgaacctcaactggaaaagtatatggtttggggatgttgttttgtttgtttgggttgtggaaaaacagatgtcagaaaacaaagtggatatcaagatactagaacagtaagaatttaggcctcggtctgcaaacgacatttgaacatcaatatgtaatagtagttcatgtccaaaactcacaagtgagattatcaaactccaggggagtctattaatgtggccataaaatctaccccataattttgacataacttttccagcccaaaatacgactgacatcatcttatgggtccggaaataccatacatcaaggaaaatttctaccggagaaataacactgtaatcgtttggggagcagtctgaccagtgttccctgagttacgccaaccgcccccaaccatccttcccacctaattattaccaggtcaggaggatgtcctgctgcacgctcaggcggtcgctcctcctttccacaagacccaggcccgcaccgttcgccccggggctcccatggcccccgacctccagtctccagcaacgatggatccccacagaccaggcagggggcgaagggcgcacacccacctcccgggagtcagtgggaataaccccgggcgctcccaggatacgtcccacacccggagccgcacgggcccatccccgccaggtctgggcaggcagccggagcccgggaccccgcctcccccgcacctagggtcccggccgagctcgaccgctgaggtcccgttcccactcccactcccagcgcctccccctggcggcggcggccgcccgggacgcccctcccctggcgctgcctcctcagagggtgacagccgcctggccggggccgtacagaggccggcccctcctccagctcctcctcaccccgggaggagacaggggacggggatggggttcttaccaggcagcaggacatggcaaggcccgccacggcacagcctcctcctccaccatctcaccaggctccctgccaggcccggcgcagggcagcgactgagctactagggcgtctggtccggctgctactccgccgccgccgccgccttctcacaaccacaacaacactgcagcagcggccacacagagtgcactcccgacgccgagccgggcgacgagcggagacccgcgcgcacgctcgggcgctgaagccggtgtccgggaaagggggcgggtctccgcctgttggacgggggcggggcctggacaggtggtcacgccccaggagataggcggggctgcagcccagacgaataccagcggctggggagaggctcgcgaaaaagaccagcggaggcagaagggctagacagatgggaattgggcgcaggaaaagcgatgacaaaaaaaaaatctggaagataaccaaaggtggtcctacaaatttttaggaggcgtctttccctgggcaagacatggctcactctacttaccagaaaaatagaacaacagtggttatctttcacctgcaattgtggtcaggataaaaccagtttaatatagtgcaagtaaatgtagtgttttagaagatgtattcaggatacaatttctttttttcgtttcttttttttttttctgtcgcccaggctggaatgcagtgacatctcagctcactgcaaactccgcctcccgggctcaagtgatcctcccacctcagcctcctgagtagctgggactacaggcgcagaacatcatgccccgccaatttttgtattttttgtagacacggagtttctgccattttgtccaggctggtctcgaactcctgggctcaagcaatccacccacctcggcctcccaaagcgctgggattaaaggcatggaccgccgcacccggtccagaatacaatttcaagctgattcaacttcagctcctaatcaaaagcttagcgggaagaagtgaattttcaaacaaaataaacccctccccccaaaattgtaacctacccacattagcctgcagaattccacaaaccaggattgcattaccgcaggccctaacagattcacctcctctgagttgccttttaacattctacccttgacttttctggaaactgtctgggagagctagtcaaatgaaatctattcctgcatctgttgtaaagtttttccacagcactttctgaaatttattttcaatgtttattgttttttcactccacttagaatgtaaaagctacttgaagataaggatcttgtttgtcttgttcaccactatttccccagcacctagaactgtgcaggctaagtagtaggcagtcgaatttcttgatagctggctgggcgcggtggctcacggctgtaatcccagcactttgagaggctgaggcgggtggaacacctgaggtcaggtgttcgagaccagcctggccagcatggtgaaaacgcgaatctactaaaaatgcaaaaattagccgtgcatggtggcgggtgcctgtaatcgcagctaattgggaggctgaggcaggagaatagcttgaacctgggaggcagaggttgccatgagccaagattgcgtcactgcactccagcctgggtgacagagcgagactccatctcaaaaaaaaaaaaaaaaaaaaaaaaaaaaaatagctaacatttattcatacaactcatctaattgaatcttcacaactttaataggtagacgccgttatctccatgttacagatgaagaaagtgaagcacagaataaattgcatgtattaaaacaaaattcaaacccaaacccagcagacaacaaacaaacaaacacacaaacacacaaaaaaccactgtactctcacccaccaggctgtactgcccagtgcatgacacagtagcctgaaataaaatctcaagtaagaaattactttaggccgggcacagtgtctcatgctggaaatcccagcactttaggaggccaaggcaggtggattgcttgagctcaggagttccagaccagcctaggcaacatggtgaaatcccacctttacaaaaaataccaaaaaactggccaggcatggtggtgcgtgcctgtagtcccagctatttgagaggctgaggtgggaggatggcttgagcctgggaggcagacgttgtagtgagccctgattgtgactgcactccaactgggtgtcagagc

SEQ ID NO: 1886146 - DNA, 4001 bp, Homo sapiens; identical to SEQ ID NO: 1242229

SEQ ID NO: 1886147 - DNA, 4001 bp, Homo sapiens
ttactacaaatgcctcattccgtcatcttgttgaattctttagcatcttctgtatcatttccaggggcatctctgggaagtagtgatgcctatcttccctcagaagcacactgataaccccaatatacccacaattcacacttattcccttctctgaggtgtgctgctttttggcacatcagaaaaaacacactactaggatttgaaaaactaagttctgggcctggttaggtcataaactacagaaaccttaggtcatatattctccccaggcgtttctccactacaaaaaaaaaattcattattcccttggtcttttgtagtcctttactatttcacttatcttcatgataacccttaaatttaagtaaggtagcattatgctcattttatagaagaaattcaatctcaaagaggacatagtctcccaaagatcccacaagtagtaatatattaggcagagctaaactcacacactcttactcaagatcctagtactggtacatgccgtgctaataagtttgctaaaatggataaagcagcaatttctcaggtcccttccaatgatcctgttctctgcttctacttgctattttttctctcttctctcaactagcattaacatccaaaactatatataatcaccaaatttcatttaccatggttttttaattattctttaaatttttctagttccatgttaaatccagagaaatgttactttttcgaaagtttctactactgcctctctctctgaaggccatgggacttaactatttgtcaaagcagaaattcccaacatttcgtaaacaccactaattactttttataactgtaaagacaattattccatacttaaaaccaattcaaaataaaataaatcctcaatacttcttattccctggggtagtaattttaattagattttattgattctttattttctcctatgtgcctttatttgggaaatactgttagtctaccttactatcgagtctctttccctagcaagaaaatgtcagtcttaagagtcaggaaagcttttactttcactatcacatatgaagaatgaactaaacacctaaattggataggaaaacttaaatgagggattcaggacacttcccaaggggtcatatgaccaatttaaaagttggtatgatgtgtctaaaataacaaattaactcttttacttataataaaggtacagatgtgctgattagtcatgctaacatgtacatatgaaatatgcctaaaccaaattaaaagaaaacaaaatacagtctatggcaatcttgaaaattcagggagctcaataaatattaagaggatgctctcacaatgagagcattaaacacttggtaattaacataatttaatatgcaaaaataagaaaatatacaggatgagggatgaggagtacacataggaaatttttgtgattttcttcattttgattgtattgctttcttgtcttcaggagggaagattttgacttcaaaagtaacaaaatatttaagaagggaattcacatctttctgttctaaatgatattcttgcgctattttctcagcagttcatgtttctggataaagtttatgattattgaaaagtgtcaatgcttctacagtggaaattttgcctttgggaatgctcttaatatttatcatatcaaagtgatggcctttcggcaatctgaatttctttggctcctgacgtgtttcagcagctttcagctgcacggaagacacaggatctttggaatcaacacacacatattttagaaatgacagcagcttgtcatctttacgagcaatctctcccttaatttctggatagagactaatctgctctggcaggaggctgctggtagaggggtgcctgggagcgagagagggcttcatgttgcggatttccctttccgctcggttctcttgaaattcctgatcccgcgagtcaccgcagcccccatctccttacaacatgatgccctcaggttcacagtaatgtattttttaaaaaccagtcgttgttaccttaatttggtcccaagggctgtaaaggtcagtttacaactcgttgaacaactgagtaagatttaaggcaactcaactgatagctgcatacctaatttaggatatccatagaattgttttgtcaactacaaatataacaagcattaagtgtaaactgtgttgctgaaaagtactccaagtatcttaggaacacccaccgcaatgtgtgggctaaatgcacacgtacaatgatagcagaaataatacctgtcatataggacgggcatgtcagccttttctccgcgaaaggcttctggtcctaagctgtcccttactttcaccggaatgagatgcgtccagagtcccaagcaagggaggagactgctcctttacccaggaggctggaaactgctcgatgcgagcgcagtttccgacgcccttcggctgagacctgcagcaccggacgatgtcccagttgccagctttagttgctaaggcaccaaccacttcggaggaaacggggggtggtgcagtctcttttggagtcgtagcgaatcagctacaagtcgagataattagttccggcaggaaacagctcctctaagagggactggaaggcggaaagaagctgagagtgacgcctctgagccgcggaggattgtgggaggaggttgtctccaatttctcctccccctcccggccaagatgtctgacatggaggatgatttcatgtgcgatgatgaggaggactacgacctggtgaggcgcagggaatggaactctgagggtggtgatgtgtcttgttttcggggtccgggccggggcgcccgcggcctctccccgtagagcatgtgccgtttacagcctctctcagtgcggtgacaggactggtttacctcctccccgttcccgcaccgggcccgggccctgcttctccagcatgggggaagggagggcaaaggaggcagcgaagggggccccgggccttgccctccgagtctgagcgcctcttcggtttacacggatgcccctggtcccaggcgttcggttctctgtcttctgcctccccaccgcgctagccgcctcggtgaccatgctgcggtgtaggccctggctttgccctttcgggcccagcgttccgggcccccacttcttcacactggaactgagcgggtgcgaaatgctaggagaagtcagaaaacgggggtgtccttactgctcccaggcctgactgcgaaacgcaacttgtgagtctcctggagacatagcttaaatagtcttgccagggccagttttggtccgaggtaagtgtgtaggggagagttcagagcaaagataactgaaaaaaaggtagtcgaaccactttttcagttctttataaagaaaagctggggaggaggttttgcttgtggtgtttttggaggacgggtgaaagataattgaacccatggcttttcccttagaaatttcccagtatacaaagtttaaaacagcaacagcatagaaataaacgaatttttctgaccgaatggagatttttaaagattcaaagcttcatttattaatggatttgcaagtttgaataacgtttgctattcaaaaacatcgtgtggaaactcagaaaattatcttgatccagaattaacgtcaattttgctgtgtttctttattttgggggtgtttcatatggttcttttatggtgatgctgcattatcataaagttacgaaatagatgttttgggacgtctgactcattttaagtgccagagattgtcaaaatattaatacattgttttgaattagtctataactttttcgtatatattttcagttttttgcattttaaaataaggcacactttgcaaaagggagaaaggaaattctcgctattatttgaaagtcatagtagagatttttataatttttaaagttaaatgtagtttcgctaatagttatggtttctaccttacattttagtttgtgca

SEQ ID NO: 1886148 - DNA, 4001 bp, Homo sapiens; identical to SEQ ID NO: 1242230

SEQ ID NO: 1886149 - DNA, 4001 bp, Homo sapiens; identical to SEQ ID NO: 1242232

SEQ ID NO: 1886150 - DNA, 4001 bp, Homo sapiens
atcagccagatttacatacaaagcaagggggacagggatgagggctgaaattccaattacctaaatgacatccttgtaactccctgtagtaaagcagtttggggtacactcaagaaaaatgatctactggtaaatcactgtttaatcacaagaagaaatttatagagaataggggtagccataaaaagatgcctcaatcctcaagcagtaacaacaacggccaggatcatggcccatagctctctaattcttgcctggtcccaggattacaataatgtgataggtgagatctggcctaatagaaaattccttctcaaagtcatttaatataaaactcaacaacaaattaaagctacttgaatttaactgattctttatttaaaaaattactgagtattttcagtgctaatcataggtagatcctaataagataattcacaatagtcattttcaaaacatttgaacgtttgtgaagtaattttaggctttaggaagatttcaatgatttggcgctgttgctaatcaatcagtataaaatttcagttatacaaggtaagttctagagatctgtggtgcagcattctgcctacagatagcaatactgtattctacacttaaaaatatgttagagggtagatctcatgctaggcgttctcaccaaaataaaataccagaggagaagcatttcaggtggtagcagcagcaagggtgcttaaggcagaaacaagtctaacaaggagggacagaaaggtagctggtgtggctttggtgaacaagaaggaaaatggcataagatgatgttagagatgaggcagggcccaaatcaggtggagccttgtaggacaggataaggagtttgaattttactttaagtacaggtgtaacaaatatcctacagctttaagcagaaacaaatctacaatgacagattaccttattagttatactttactataagtgaaaccatttttggtacactaaaaaggaaatagccttttaacactggaaaggaaccaccacccttctcaacgttttcacatgtattaggaatgatgtgatttgaggaaaatttttcattaaattaagagagagacctaatagccatatgatgttttcagtgtttaaaacaaacaatatcataatatcaaatgcaaatacagtgcttacatttttaaaaattgtgtaagatattatggggaaaagaacagcaaactggaggtagtaaacaggcacaaatcgtggattccaattccagcgttgcaacaactgactgaaattaggtttaacttaattaccttctcaaatatatgaagacagcggagtagatcagtgatttttaatcagtgtttaaatggaatttttcagtgggatgaaatgatataggacactattcaggtctagcagtgccaaccacttccctacagctgaaaagtcacctaactaaacatctaagatttcttctggctctaaaattttatcaattcattcaacaaacatttattgaacaaatatgttctgaaggatttgctatgtgccaggcacttttcttccccacttactctatgcacttacccactgagaacaaggaaccacactggccagagccatcgctatagggagctctccttgatcacccatcactgtgaccagttccaccaattgctcaaacccatcagccaataccgtttctgaagtgtgtcaaattctgtgccttgttgagggattttcatcagaacttccataaatgtagctgtctggagatccttgtagtaccctaaacctgatgtggacaaatggatgcaaatttactaacatggccttactgaagtaatttttgcttatcttacaagccagttctctaggctgtgtatttctatatgaaactttcatttgatctcacctatggagtgcatgagaccaccgtctatgctggcactaagtaagtttgacattgcaaggactgcacagtgcctccgtgatgccaacctccgagacatgccacgtttcctgccacctgtttgtgcactttcatcttcagcttcactgcagtcactcaaaaggttcataaatagtgtgaagtatctgagaaataaaaagactgacctttacatagcaaaggccgtatcaactagaaagctaaccagacattccaaaactatcacatgtgcacggtgtgactggccctggattaactgcttctctcctctctcaggataatcagccagggtgactcattatgaagcatgctgtgttgggcatgattatacctgatatagcctagcatacctttcataacataagcatcaaatagatgcaatgtttcctggtaaatgtgtcatttttaatgtttagtatataaaattagtggtccaaacagcttacacaatgtcacttttgtaaatgacttagtgaagcaatctgggttttattacaagcaaaatttcagggatcatattattttctttaaaaatcataaaacacagttattttcctaatcctagtcctgcatggggaacatttctttgttttcttttttgtttttttgtttttgttttgttttgtctttgagagtgtgtgtgtgtgtgtgtgtgtgtgtgtgtgtgtggcggcggggggctttatttgcttttgctttgtgttttttggtgactgaaatttacttaagaaataactgtgtcccctttggcttccatcaattccacaccatctccttcctcaggctgcacagggagaccagctagaagtgaaactactgcttccatgcttgcctggtccaaatctctgaaaaaaaaaaattagagaccataaatctttcaggttatttcacttcctctcaaataaacctcttattaacagatataaactttaggaactacctgtttcattaaacaaattattagcacaacccaaataatttgaattaatatgcagatcctagaatacaaaatcatctcaaatgaggagaagacaatagtaactttctacaaagtaatcttggcaaaatgactatcttcaatcagaagcatgtacaattggccctctgtctcagcgagttctgtatccacggattcaaccaaccatggattgaaactatttgggggaaaaaaaagtagggtttcatctgtactcaacatgtaaagatttttctttgttgttattccctaaacaatatggtataacaacttgtgtttatataagatttatatttattagatattataagtaatctaatgataatttaaaatatatgggaagatgtgcatagtttatatgcaaatactatgacattttgtatcagggacttcagtctgtggattttagtgttcatggaagtgagatgtgggcaggagtttggggggtggttcctggaaccaattcctgacagatactgagagacgaccatattataaagctaggcttggtcaaagaaacatatgtaaaggcttattatacagtccatagtgtttaatcactttctgatatgtgtcaataagcatttatcattaaagcagacttaattacacttaattacttccttttttttctgtctctggtgcctgaatcaggaaatcaattattttttagaaagaccaacacaatgagttcctcaaataatacctttttctatctaatcataacataaatgcaatctgaggctttatgtaccttatttcccaataacggtagactattcttcataaactgacaacactaacttcccaaacataccgctctcgcacatttatttttacagaaagtctatcagtcaaaaaaaagtagtaataaagattagtatctttacatatttcaaccacaaaagtttgacatctaaaaaatttaaatacacataaaatacaagtataaagctgtaatgaagtaattataattcttacaggaaaacccactaatacttgaaggtcattctcttttttaccttgtaatacattttacatcatcatctgctgcttggtttgatgttcccataacccagactgtcaggt

SEQ ID NO: 1886151 - DNA, 4001 bp, Homo sapiens
atcagccagatttacatacaaagcaagggggacagggatgagggctgaaattccaattacctaaatgacatccttgtaactccctgtagtaaagcagtttggggtacactcaagaaaaatgatctactggtaaatcactgtttaatcacaagaagaaatttatagagaataggggtagccataaaaagatgcctcaatcctcaagcagtaacaacaacggccaggatcatggcccatagctctctaattcttgcctggtcccaggattacaataatgtgataggtgagatctggcctaatagaaaattccttctcaaagtcatttaatataaaactcaacaacaaattaaagctacttgaatttaactgattctttatttaaaaaattactgagtattttcagtgctaatcataggtagatcctaataagataattcacaatagtcattttcaaaacatttgaacgtttgtgaagtaattttaggctttaggaagatttcaatgatttggggctgttgctaatcaatcagtataaaatttcagttatacaaggtaagttctagagatctgtggtgcagcattctgcctacagatagcaatactgtattctacacttaaaaatatgttagagggtagatctcatgctaggcgttctcaccaaaataaaataccagaggagaagcatttcaggtggtagcagcagcaagggtgcttaaggcagaaacaagtctaacaaggagggacagaaaggtagctggtgtggctttggtgaacaagaaggaaaatggcataagatgatgttagagatgaggcagggcccaaatcaggtggagccttgtaggacaggataaggagtttgaattttactttaagtacaggtgtaacaaatatcctacagctttaagcagaaacaaatctacaatgacagattaccttattagttatactttactataagtgaaaccatttttggtacactaaaaaggaaatagccttttaacactggaaaggaaccaccacccttctcaacgttttcacatgtattaggaatgatgtgatttgaggaaaatttttcattaaattaagagagagacctaatagccatatgatgttttcagtgtttaaaacaaacaatatcataatatcaaatgcaaatacagtgcttacatttttaaaaattgtgtaagatattatggggaaaagaacagcaaactggaggtagtaaacaggcacaaatcgtggattccaattccagcgttgcgacaactgactgaaattaggtttaacttaattaccttctcaaatatatgaagacagcggagtagatcagtgatttttaatcagtgtttaaatggaatttttcagtgggatgaaatgatataggacactattcaggtctagcagtgccaaccacttccctacagctgaaaagtcacctaactaaacatctaagatttcttctggctctaaaattttatcaattcattcaacaaacatttattgaacaaatatgttctgaaggatttgctatgtgccaggcacttttcttccccacttactctatgcacttacccactgagaacaaggaaccacactgttcagagccatcactatagggagctctccttgatcacccatcactgtgaccagttccaccaattgctcaaacccatcagccaataccgtttctgaagtgtgtcaaattctgtgccttgttgagggattttcatcagaacttccataaatgtagctgtctggagatccttgtagtaccctaaacctgatgtggacaaatggatgcaaatttactaacatggccttactgaagtaatttttgcttatcttacaagccagttctctaggctgtgtatttctatatgaaactttcatttgatctcacctatggagtgcatgagaccaccgtctatgctggcactgagtaagtttgacattgcaaggactgcacagtgcctccgtgatgccaacctccgagacatgccacgtttcctgccacctgtttgtgcactttcatcttcagcttcactgcagtcactcaaaaggttcataaatagtgtgaagtatctgagaaataaaaagactgacctttacatagcaaaggccgtatcaactagaaagctaaccagacattccaaaactatcacatgtgcacggtgtgactggccctggattaactgcttctctcctctctcaggataatcagccagggtgactcattatgaagcatgctgtgttgggcatgattatacctgatatagcctagcatacctttcataacataagcatcaaatagatgcaatgtttcctggtaaatgtgtcatttttaatgtttagtatataaaattagtggtccaaacagcttacacaatgtcacttttgtaaatgacttagtgaagcaatctgggttttattacaagcaaaatttcagggatcatattattttctttaaaaatcataaaacacagttattttcctaatcctagtcctgcatggggaacatttctttgttttcttttttgtttttttgtttttgttttgttttgtctttgagtgtgtgtgtgtgtgtgtgtgtgtgtgtgtggcggcggggggctttatttgcttttgctttgtgttttttggtgactgaaatttacttaagaaataactgtgtcccctttggcttccatcaattccacaccatctccttcctcaggctgcacagggagaccagctagaagtgaaactactgcttccatgcttgcctggtccaaatctctgaaaaaaaaaaattagagaccataaatctttcaggttatttcacttcctctcaaataaacctcttattaacagatataaactttaggaactacctgtttcattaaacaaattattagcacaacccaaataatttgaattaatatgcagatcctagaatacaaaatcatctcaaatgaggagaagacaatagtaactttctacaaagtaatcttggcaaaatgactatcttcaatcagaagcatgtacaattggccctctgtctcagcgagttctgtatccacggattcaaccaaccatggattgaaactatttgggggaaaaaaaagtagggtttcatctgtactcaacatgtaaagatttttctttgtcgttattccctaaacaatatggtataacaacttgtgtttatataagatttatatttattagatattataagtaatctaatgataatttaaaatatatgggaggatgtgcatagtttatatgcaaatactatgacattttgtatcagggacttcagtctgtggattttagtgttcatggaagtgagatgtgggcaggagtttggggggtggttcctggaaccaattcctgacagatactgagagacgaccatattataaagctaggcttggtcaaagaaacatatgtaaaggcttattatacagtccatagtgtttaatcactttctgatatgtgtcaataagcatttatcattaaagcagacttaattacacttaattacttccttttttttctgtctctggtgcctgaatcaggaaatcaattattttttagaaagaccaacacaatgagttcctcaaataatacctttttctatctaatcataacataaatgcaatctgaggctttatgtaccttatttcccaataacggtagactattcttcataaactgacaacactaacttcccaaacataccgctctcgcacatttatttttacagaaagtctatcagtcaaaaaaaagtagtaataaagattagtatctttacatatttcaaccacaaaagtttgacatctaaaaaatttaaatacacataaaatacaagtataaagctgtaaggaagtaattataattcttacaggaaaacccactaatacttgaaggtcattctcttttttaccttgtaatacattttacatcatcatctgctgcttggtttgatgttcccataacccagactgtcaggtattcta

SEQ ID NO: 1886152 - DNA, 4001 bp, Homo sapiens
atcagccagatttacatacaaagcaagggggacagggatgagggctgaaattccaattacctaaatgacatccttgtaactccctgtagtaaagcagtttggggtacactcaagaaaaatgatctactggtaaatcactgtttaatcacaagaagaaatttatagagaataggggtagccataaaaagatgcctcaatcctcaagcagtaacaacaacggccaggatcatggcccatagctctctaattcttgcctggtcccaggattacaataatgtgataggtgagatctggcctaatagaaaattccttctcaaagtcatttaatataaaactcaacaacaaattaaagctacttgaatttaactgattctttatttaaaaaattactgagtattttcagtgctaatcataggtagatcctaataagataattcacaatagtcattttcaaaacatttgaacgtttgtgaagtaattttaggctttaggaagatttcaatgatttggcgctgttgctaatcaatcagtataaaatttcagttatacaaggtaagttctagagatctgtggtgcagcattctgcctacagatagcaatactgtattctacacttaaaaatatgttagagggtagatctcatgctaggcgttctcaccaaaataaaataccagaggagaagcatttcaggtggtagcagcagcaagggtgcttaaggcagaaacaagtctaacaaggagggacagaaaggtagctggtgtggctttggtgaacaagaaggaaaatggcataagatgatgttagagatgaggcagggcccaaatcaggtggagccttgtaggacaggataaggagtttgaattttactttaagtacaggtgtaacaaatatcctacagctttaagcagaaacaaatctacaatgacagattaccttattagttatactttactataagtgaaaccatttttggtacactaaaaaggaaatagccttttaacactggaaaggaaccaccacccttctcaacgttttcacatgtattaggaatgatgtgatttgaggaaaatttttcattaaattaagagagagacctaatagccatatgatgttttcagtgtttaaaacaaacaatatcataatatcaaatgcaaatacagtgcttacatttttaaaaattgtgtaagatattatggggaaaagaacagcaaactggaggtagtaaacaggcacaaatcgtggattccaattccagcgttgcgacaactgactgaaattaggtttaacttaattaccttctcaaatatatgaagacagcggagtagatcagtgatttttaatcagtgtttaaatggaatttttcagtgggatgaaatgatataggacactattcaggtctagcagtgccaaccacttccctacagctgaaaagtcacctaactaaacatctaagatttcttctggctctaaaattttatcaattcattcaacaaacatttattgaacaaatatgttctgaaggatttgctatgtaccaggcacttttcttccccacttactctatgcacttacccactgagaacaaggaaccacactggccagagccatcactatagggagctctccttgatcacccatcactgtgaccagttccaccaattgctcaaacccatcagccaataccgtttctgaagtgtgtcaaattctgtgccttgttgagggattttcatcagaacttccataaatgtagctgtctggagatccttgtagtaccctaaacctgatgtggacaaatggatgcaaatttactaacatggccttactgaagtaatttttgcttatcttacaagccagttctctaggctgtgtatttctatatgaaactttcatttgatctcacctatggagtgcatgagaccaccgtctatgctggcactgagtaagtttgacattgcaaggactgcacagtgcctccgtgatgccaacctccgagacatgccacgtttcctgccacctgtttgtgcactttcatcttcagcttcactgcagtcactcaaaaggttcataaatagtgtgaagtatctgagaaataaaaagactgacctttacatagcaaaggccgtatcaactagaaagctaaccagacattccaaaactatcacatgtgcacggtgtgactggccctggattaactgcttctctcctctctcaggataatcagccagggtgactcattatgaagcatgctgtgttgggcatgattatacctgatatagcctagcatacctttcataacataagcatcaaatagatgcaatgtttcctggtaaatgtgtcatttttaatgtttagtatataaaattagtggtccaaacagcttacacaatgtcacttttgtaaatgacttagtgaagcaatctgggttttattacaagcaaaatttcagggatcatattattttctttaaaaatcataaaacacagttattttcctaatcctagtcctgcatggggaacatttctttgttttcttttttgtttttttgtttttgttttgttttgtctttgagtgtgggtgtgtgtgtgtgtgtgtgtgtgtgtgtgtggcggcggggggctttatttgcttttgctttgtgttttttggtgactgaaatttacttaagaaataactgtgtcccctttggcttccatcaattccacaccatctccttcctcaggctgcacagggagaccagctagaagtgaaactactgcttccatgcttgcctggtccaaatctctgaaaaaaaaaaattagagaccataaatctttcaggttatttcacttcctctcaaataaacctcttattaacagatataaactttaggaactacctgtttcattaaacaaattattagcacaacccaaataatttgaattaatatgcagatcctagaatacaaaatcatctcaaatgaggagaagacaatagtaactttctacaaagtaatcttggcaaaatgactatcttcaatcagaagcatgtataattggccctctgtctcagcgagttctgtatccacagattcaaccaaccatggattgaaactatttgggggaaaaaaaagtagggtttcatctgtactcaacatgtaaagatttttctttgtcgttattccctaaacaatatggtataacaacttgtgtttatataagatttatatttattagatattataagtaatctaatgataatttaaaatatatgggaggatgtgcatagtttatatgcaaatactatgacattttgtatcagggacttcagtctgtggattttagtgttcatggaagtgagatgtgggcaggagtttggggggtggttcctggaaccaattcctgacagatactgagagatgaccatattataaagctaggtttggtcaaagaaacatatgtaaaggcttattatacagtccatagtgtttaatcactttctgatatgtgtcaataagcatttatcattaaagcagacttaattacacttaattacttccttttttttctgtctctggtgcctgaatcaggaaatcaattattttttagaaagaccaacacaatgagttcctcaaataatacctttttctatctaatcataacataaatgcaatctgaggctttatgtaccttatttcccaataacggtagactattcttcataaactgacaacactaacttcccaaacataccgctctcgcacatttatttttacagaaagtctatcagtcaaaaaaaagtagtaataaagattagtatctttacatatttcaaccacaaaagtttgacatctaaaaaatttaaatacacataaaatacaagtataaagctgtaaggaagtaattataattcttacaggaaaacccactaatacttgaaggtcattctcttttttaccttgtaatacattttacatcatcatctgctgcttggtttgatgttcccataacccagactgtcaggt

SEQ ID NO: 1886153 - DNA, 4001 bp, Homo sapiens; identical to SEQ ID NO: 1242235

SEQ ID NO: 1886154 - DNA, 4001 bp, Homo sapiens; identical to SEQ ID NO: 1242242

SEQ ID NO: 1886155 - DNA, 4001 bp, Homo sapiens
ggagtgcacaggggttgaggggaactggctaaagaaggaaaaggcagagaagaaggaaactcaccaaagaacattcaactttttcttttgtttaatgattacttccaggaaaggagaagaaaagcgggcaggggtggaagcaggatggagtttgagagaaagacagaaagagacagaggagaaaaacagaatggaaatactggagcaagggcagggtgtgaagatggagagtggagcctggcccacactggctgtcaggaagggaaggagagaaggcaaacattgccatcattccagcatctcagatttttcaccccaatgcaacaacaacgaagtaaacgctgctttcattacaatactctcccaagagactagagcaaggaggttttactttgcacttaccctgccgtcatctcttttaagggtaggattcattcactgtctataataacttagtttaaaagaggtactttccctctaggaagctgttcagatttgctggccacagatgtctcctataacaaactggtcccccatttgatttcagtaaccaagaaaactcttacaaaaaaagagctgcttccctgggcaggtgtctgcacttatccaacagaacaatcctaaccatttctcaaatctaacctaccacatgcactgtgatagcaacctcataagcgcggtgacttcttagggcaaagactagacctctgctgggaacacgctaggctgctgcatcactctcaccagtggcagccagccttgccttaaaatttaaaaatcaggttctgaagtccatctctgccttctcttacctgactttttagcttctcaacctttccaaaaggcaggctgaggaaggtggtattggcaaagcaaaagcattctggggggataaaaaggcccttttcaggaatgaggcataactgatcccacagagccaaagctgaaaacacacgaaagacaggcaactctttccctttactcccaggtctaaataaaggtgcactcttgccttgggagtcctaatatgtagcaggaaagaaatacctggagagaaaaagcattaggagtacatgaaatcccaaagaaagcaggttcacttcataaagtaggaaagtaaaactcatggggacactcccaggttgcaggaaactagagattcatttgcagaggccgtctgctcccagccaacgtccttcccacgcctctgcccagctcactgctgagtgcacatctggagggagtcaccagatattgtcagtgtcatcaacaaacctcctcaccagccactcactctacttactgcaggcagagagatttataactgctgagaagaaaggaaaagatggggaaggggctgttgctctcaaacatgtcctcccagagagtctaaagccactggcatgcctctggggccacattctttctgagggagcaccagatgtcactttgtattctccactggacagccagctctgtggggcaggatacagcaccacaggtgcacaaacacaggccccagaacagctggactacagctggcaaccccaccatcaccccgggtaggctaccactgagcccaggggcacacccatctgtctagtctagccagggacagactagtggtggtaacagtcggccaattaatttctgtacgccggtcatgttatagggtggggatggggagccagctgggaacctgaagtactgcagatacaagtctccatcagcagcttcccccttcacaggaaaaatcgatcaccaaaaatttcccaaggcttttctgactctaggcatatccaataacctaagatttcagctcttgctctttccagtgctcagtggtgtgctgtggttctgctgctaccatctcctcccttctctgaccctaggccagcttgagggcacagcctcggggcatggactccatttgttccgcctttgctatctctgtcttacactagatgggtggatacatcagactctcctttgtctgtgagacacagatggaaagccacccagcagagagcgctggaaacctatcaaagggaccaaccaaggaaccaaaagctggcttgttccaatggcttttctgagaacagtctgactgggctggggcagttacctacaggggctacaccaggcaaccatgtgacaaccagttagataccttaaatctgcctgaaaggccaggtggcctgccatcttggggtggcttctaggcttgacttggattctcctcaagctcaatctgcctgatgatctgtattgaaggaggacagagctgaacaaagagactgacagctgcccattcaccacatggggcctgaaaggcagatgggactagggtttggaaaacacccaaacagagggagagagctaaggacagctctagatggctaatgcaaaaaaaataaaaataaaataaaaataaaaaataaaaataaaaaactcttacgggtagggggttaggaactggtataagaattttccttctttcctttagggattgaatcccaacatccctatagtcctctttgggtacttggaaaccacccgaaggaaccaaccccagcagtacagctattttgtagggatgctcttaccgtcaggaacctcatctggcctcttcctcttctcatacacaacaatgatcaccacaaggatgataatttcagccagaattcccaagaaaggccagagtggggccaggtggctccgcaccctgaggacagtgacaacagaggcggagccaatggcgttggtggcattacattcatactcgccagggtcttccgtgatctgcaggttcacaatgttcaactcagtgtaattttccttgttgatgatgaagaagcggccagaggtattgacaatgtcctgcaaaaaagtgagaatacacaaaggtgagagtgagtaactgagctaatgttcaagagagggtgacactgctctccgttctttttaggcaccagccagaatgaggaagcagtgtctaggaacatttcattaatgatttcccttcagtatcaacaacaacaaatcaacttctgacagagccaggcaagcctcccttaccatcggtcctccagacttccccgacttccacgaagtgagtgcaggtcctactgcctggagactcagaaaagtccaacaacctagtaaatgctgcctccaacaccaggtaagaaaccacagcagaaagaggacggcagaaggaggggtacaacccctacagtcaggcatgcctcggggacctcaggcctctctgatgacctcagagtcagcacactgacttcacacttggtgagttctgaggaagtctccttaaacttcctccacaaacaatgctaagaactcactcctagtcagactgggggaaattcataactttcctttcatttaaggactagaggttagaggaaaggttattcaatcaatcaacaaatatttgtggctgggcacagaggctcatgcctgtaatctcagcactttaggaagctaaggtgggaggatcgcttgagcccaggagttcaagactggccttggcaacaaactgagaccccatctctacaaaaaatcaaaaataaaattagctgagcatagtggtgtacacctgtggtcccagctacacagaaggctgaggcaggaggatcacatgagcccaggaggttgctgcactccagcctggtagacagatcaagaccctgtcttaacacaaaacaaaacaaacaaataaaagagaacaaatatttactaaaatatgctgcatgctttatatcctactaagggcaggtgggagtgagaaggtgagatagggagaagacagacctagaaatgaataaggagcttggcctcaaaagggaaccagacatccaaaaagggatgactgatttcaggaatgtgttaagaagccccaacagagcgtgtgtatagagtgctgtagggcacagtgagtggccactgctggaaagagtcagggaaagcttcacacatgagct

SEQ ID NO: 1886156 - DNA, 4001 bp, Homo sapiens
caagaagcagccgaagagcgttagttccatttgtcaagtctgacatacatcttaccataacagtttcctaaaataaaagatccgtgtttccccattattcttctcttaaaacaaaacaaaacaaaaatccattagttaagacagtattaaactgtgagaggcagcatagtttatattcaattttcactagttaccgtattcttgcttcctttattcgttttggggagtagagaaagggagggggtgaatgaagcattcattatctgaaggcatggaatggggaacccctccccccaaaagaaatagatttcctcctcaggaaagttctagaataaggaccggaaaggggggaggcagaaatccacaggggagagggggaaaaatcacttggggagacttgagttaaaagtagaaaatgaggattccaaaggattcctaggaaaaatgttgccctcttgtctcaagttctatctttgatccaggacgagggaagcctgtctgccagtctgcgaggctgatgctttttccccctcctcttccacctctgttttttcccaacttgctttaggattagcctccatctctctcgaccccaaacagtggaatttggctgtgccttgggtcgtcttgctttgcaatatcgcctatagttgttggcggttttctgctgaggctgagccgtttgctccagcctccgactaaactcattaagttgggagatttttttcaattggacgggtgtttttaaagtctcgtctttccagccccaaacaaggtgtaacaacgcactcttccttctaaggaatgagatgagagacaaggatcactccagacatctcctacctacggtttggggttttttttcttaaaggcgaggcttgcattcctcagcagctatgtacaaagctccctgaaaccttgtctctctaaagttagtgtgcagggttttccaaggctgagagagcctaatacatggggaagcacttccttgaggtggaagatctctcccttcacctttcctctttttccctgcaggctagtgcctactttttatcagtttgcacaatcgcttagataaacaccgaggaggagattctctttaattatcaaagacacatcttttcagggggccaacaaagcatttatttcacccgccaaactaaaggagagttattccagtttaggaggaagatgcaagcggtttgggaccttgaacaaggcaaatatggttttggtatgtttacttacagtattttttctctctctctttcctttctcacttttctgcttgtgctgtgtggggttggggatgacttggggcttttcaaaatatcggtttgctaacgtgtatgaaatgccgaggactgtggtttaaggggttcggggaaggggggatcagagtcaattcaatgcattgccatattttattacatgtgtgtggtaggagagatggtggagggggaggggggaaaatacaattgcaaagctgccaaaatatgattaaaccgaagcgttaagactgcggagcctcctatctcctcgtcctgtctcctcaaactcatttccttccacagagcaaactaaaaaccagtcctataaagcgtggttttgcaagcagcagatgactcggttttctagcaaaggagctgctaggctcgcactaagtatcagaatttactgttcgctttgcctctgcgcttcattttgcaaccttgtgcaactgacagccaggcaggcagggagggagaaaagcctagcccggcgccctcggccacggttcgggtaggcgagcgctcggttaagctaggaggagaatcgcgacgagaagggtactcaccatcgggcggggcggtggagctggcgtgcggatttcaggcaaacgtttacctttttgctgtctattgcaaccgcgccgggctgacttaagaagcaattctgtgctctgtccagaacattcaaggagcggttcctcatttttaaaaagccagcgagagagacgacagagacagagagaaagaaaaagagaggagggggtgagggggacgcacataaacccagttcaaaaaaaaaaaaaaatcacctcttcgccagtgactcgggaaacgcagaggtggcgagatccgagtacggtccaaccaagccagagccaattaattttaaatcctgaagaattattcagattaaaatgtacagaagtttcgttctcctatgcctacgtgagtccaaagtcgtttccctttaagagctccttttcttttaaagttgaattttaggcagcgaggactcttacactagggggcagacagatactgtacttgctctaatcttaagcaattttttccctcccagcatatgctctgatttagcactgtaaatttttcagaggacctaactctgacagcccctggtgattttcaaagtaccacaagccagtggttaaaaattgcattgacttggaagttcagagggacacaatggaagcccctttccctattcatggagctccagtgtggtggaagagaaaaacacacacggactagattgagggaaaggaggaattcaatgaatcctggaggacggaactggtttctactgagttcagagttaaactcggcatttgctggggtctgtattcatattgtgattcaatctgtaaagaaatacagcccatcaggccactttctgcaagaaaattatattcctgggtgttgagtttctttcttttcttttttagattagggcaaatgttgtcccaactttctctaggcaaattaaagcttgccattcttctcattataataaatttacatctgcaaaaaaagactgagttggatttttaaaaaacaacaataatatattgattttatcttctcagagctttttaaccttagacgcacagcaagtgagcatctctggagaagacatttaaaaatatttttgcccttttttcttctcagtctgtagtcttgtctcttcttctatgcattaaaattaagtataattcatacggtgattttttttctcccttgtaacagcatttcataactgaatgagtcctaaaatacagagtgaaacacccctgactttatggcagccctgtgatcatttgcctagcaggctccaatttgttaagatatggttgggaaattattccattttaatctaaggccatcacgcatacttcaaattccaaaaatctctaagtggactggggaagctcttcctcctcgatattgttccttcccatgtttgtaaaaggtaatctgctatggaagtctcattcaggaggtgagatgaagatttccctataatcaattattttcatcctctattgagatgggaatgcccattagatttcctatctcaaccccagtctcatcacatctcagctgagcttgtcccgaatctgctgacatttgtaacattagcaattcctgaatcatagaggttggaagggaaaacaacaacaactaccaaaaaccttctcctgtgtaatgatttcttttccatccttcttatcctctttaggagaaagttatattgtgtctctaattaacctgaaattctcagcttggcttcattctgtggcaatcttattacacaccaggtttatgatagttcagtgtccactataggtttgctgggcttttttttttttttttaacaactttcaaataaaccgagaacctgcagctttagtgaaatacgtgatttcatcggagaaagagtgagggctgaggtttcgggaatgaagcttaaagaagatttttcctttcctaaaaaccagcccctatctgcccagatctttagtccttacctcatattctgcctatgtgtgtaaagagaattgaatgtaaaatgtgatctatgcatgtcaattatatgtatggtttatttttaaaatatctttaccctgtcaatttttttttcagctaccaaggatgttttctgtggtcatcaatttactcttcatatgtgttcatttctttcctggagctcag

SEQ ID NO: 1886157 - DNA, 4001 bp, Homo sapiens
gtgaatgaagcattcattatctgaaggcatggaatggggaacccctccccccaaaagaaatagatttcctcctcaggaaagttctagaataaggaccggaaaggggggaggcagaaatccacaggggagagggggaaaaatcacttggggagacttgagttaaaagtagaaaatgaggattccaaaggattcctaggaaaaatgttgccctcttgtctcaagttctatctttgatccaggacgagggaagcctgtctgccagtctgcgaggctgatgctttttccccctcctcttccacctctgttttttcccaacttgctttaggattagcctccatctctctcgaccccaaacagtggaatttggctgtgccttgggtcgtcttgctttgcaatatcgcctatagttgttggcggttttctgctgaggctgagccgtttgctccagcctccgactaaactcattaagttgggagatttttttcaattggacgggtgtttttaaagtctcgtctttccagccccaaacaaggtgtaacaacgcactcttccttctaaggaatgagatgagagacaaggatcactccagacatctcctacctacggtttggggttttttttcttaaaggcgaggcttgcattcctcagcagctatgtacaaagctccctgaaaccttgtctctctaaagttagtgtgcagggttttccaaggctgagagagcctaatacatggggaagcacttccttgaggtggaagatctctcccttcacctttcctctttttccctgcaggctagtgcctactttttatcagtttgcacaatcgcttagataaacaccgaggaggagattctctttaattatcaaagacacatcttttcagggggccaacaaagcatttatttcacccgccaaactaaaggagagttattccagtttaggaggaagatgcaagcggtttgggaccttgaacaaggcaaatatggttttggtatgtttacttacagtattttttctctctctctttcctttctcacttttctgcttgtgctgtgtggggttggggatgacttggggcttttcaaaatatcggtttgctaacgtgtatgaaatgccgaggactgtggtttaaggggttcggggaaggggggatcagagtcaattcaatgcattgccatattttattacatgtgtgtggtaggagagatggtggagggggaggggggaaaatacaattgcaaagctgccaaaatatgattaaaccgaagcgttaagactgcggagcctcctatctcctcgtcctgtctcctcaaactcatttccttccacagagcaaactaaaaaccagtcctataaagcgtggttttgcaagcagcagatgactcggttttctagcaaaggagctgctaggctcgcactaagtatcagaatttactgttcgctttgcctctgcgcttcattttgcaaccttgtgcaactgacagccaggcaggcagggagggagaaaagcctagcccggcgccctcggccacggttcgggtaggcgagcgctcggttaagctaggaggagaatcgcgacgagaagggtactcaccatcgggcggggcggtggagctggcgtgcggatttcaggcaaacgtttacctttttgctgtctattgcaaccgcgccgggctgacttaagaagcaattctgtgctctgtccagaacattcaaggagcggttcctcatttttaaaaagccagcgagagagacgacagagacagagagaaagaaaaagagaggagggggtgagggggacgcacataaacccagttcaaaaaaaaaaaaaaatcacctcttcgccagtgactcgggaaacgcagaggtggcgagatccgagtacggtccaaccaagccagagccaattaattttaaatcctgaagaattattcagattaaaatgtacagaagtttcgttctcctatgcctacgtgagtccaaagtcgtttccctttaagagctccttttcttttaaagttgaattttaggcagcgaggactcttacactagggggcagacagatactgtacttgctctaatcttaagcaattttttccctcccagcatatgctctgatttagcactgtaaatttttcagaggacctaactctgacagcccctggtgattttcaaagtaccacaagccagtggttaaaaattgcattgacttggaagttcagagggacacaatggaagcccctttccctattcatggagctccagtgtggtggaagagaaaaacacacacggactagattgagggaaaggaggaattcaatgaatcctggaggacggaactggtttctactgagttcagagttaaactcggcatttgctggggtctgtattcatattgtgattcaatctgtaaagaaatacagcccatcaggccactttctgcaagaaaattatattcctgggtgttgagtttctttcttttcttttttagattagggcaaatgttgtcccaactttctctaggcaaattaaagcttgccattcttctcattataataaatttacatctgcaaaaaaagactgagttggatttttaaaaaacaacaataatatattgattttatcttctcagagctttttaaccttagacgcacagcaagtgagcatctctggagaagacatttaaaaatatttttgcccttttttcttctcagtctgtagtcttgtctcttcttctatgcattaaaattaagtataattcatacggtgattttttttctcccttgtaacagcatttcataactgaatgagtcctaaaatacagagtgaaacacccctgactttatggcagccctgtgatcatttgcctagcaggctccaatttgttaagatatggttgggaaattattccattttaatctaaggccatcacgcatacttcaaattccaaaaatctctaagtggactggggaagctcttcctcctcgatattgttccttcccatgtttgtaaaaggtaatctgctatggaagtctcattcaggaggtgagatgaagatttccctataatcaattattttcatcctctattgagatgggaatgcccattagatttcctatctcaaccccagtctcatcacatctcagctgagcttgtcccgaatctgctgacatttgtaacattagcaattcctgaatcatagaggttggaagggaaaacaacaacaactaccaaaaaccttctcctgtgtaatgatttcttttccatccttcttatcctctttaggagaaagttatattgtgtctctaattaacctgaaattctcagcttggcttcattctgtggcaatcttattacacaccaggtttatgatagttcagtgtccactataggtttgctgggcttttttttttttttttaacaactttcaaataaaccgagaacctgcagctttagtgaaatacgtgatttcatcggagaaagagtgagggctgaggtttcgggaatgaagcttaaagaagatttttcctttcctaaaaaccagcccctatctgcccagatctttagtccttacctcatattctgcctatgtgtgtaaagagaattgaatgtaaaatgtgatctatgcatgtcaattatatgtatggtttatttttaaaatatctttaccctgtcaatttttttttcagctaccaaggatgttttctgtggtcatcaatttactcttcatatgtgttcatttctttcctggagctcagcgtcttttgtgtaaaatattttaattgttcacaaacctggttggtttaccggcatgaggttttttcttggtgcaaagtgtgtacaaaggagacacaattttcttgtataaatgtggaataatgataattcactaactggtcataaacaacaagtttactgcgttggaatatagtgtgttctgagagcaattctacatgtttgatgtttaaaaccagacaccctggaattcaaagacacaactg

SEQ ID NO: 1886158 - DNA, 4001 bp, Homo sapiens
aggaaggcattttgggtggctctttaccccttcgacggacttaagggggccggacctgcctttggtgctgctctgggagcacctccccttgcttcagcccagggccatggggctgcaaagcctggaggaattgcagtcctgctctttggaaagcccaccagccctctcggcttaatggagcttctgcttgcgctctcgcagctgacagtttgagggaaatggatagcccaggagatgtctctgactcctggcccaggagacaagcttgacccatatctcagctctgctgttcacccccttaccctcttcaacccggccagagatgacaagataaacagccaaggggcgggggtcagcagggagggcaggaggaacaggacagacccaactgtgcctctcccccactgcaggccacaggcttccagcattcccaaggatgcagggagaagggttcagagtgagactgttagggaaactcagacttggaagtgcattgctggggctgtatgtgtatgtgtgtagggggtggatgtgggtagtagggtgctggtgaaggtgggagctgagcagccagtcttggtgctcagaagcctgacctagagattgccaggggtgggccaagggttggaagaaggggcccctggtacccagcctgggtctctgggaatgggtgagctgcatccagtgtgctgctccaaggatgtgtctgtctgtagaaagccagtgggaggcagggatggtcacaatcacgtaggctctttatagccacacagaggtgttgctcctctgaaaatgatgctcagggaagcagtttcatagggcagagttgggttagcctttctaggctgccagaaaggtctgtgatgggaggggactggggtggcctcttgccctctttggtactggagggcctcaggagggcgtctgggaggatagtgagcagggagtggatctggagcccctctgtgtgtgtccccattcttgtttcaggacttggattctgagaggccatcaggactcctttctctaaatccacccaacaccaaagaacaagggaaatggattcccacaggagctgtgccagtggcaggtgggggagggtcagaggtcatgggtcaaatgacctctccttgccccatcttttccccagtgccctgttatatctatggctggtattgactgagctcgagaagagcccagatttccactccagagccagggggctggagagagggcggagagtcacgcttaccccggaaagtcagcatccccatccctgtttgacttctgaggaaatggaggcttggggtggtaaggtcacttgccccagacacacaatcccaacaggaacccccactgtgtggggctgcatatggagcaggctggaagagggatgtgcgggcagagagaagcacccgcagctggggtcagttcttgttttagtatgacttgggaagagggcttcagttgaagcccgtgccttgctggagagttgttcttcagatttctgatgttatcaaggaaatgggaccaagaggtcccctagctccctactggcctgaagctcttgatgctggtggctgccccagggtatagcttgggcacactctgggtagaagatgctgaggcctccacagtttcaccctcttgttcttcgggctgtaatgtttcgagatccttccttcaagtgctgaactgattgtaactgagtttccagagggacaagaggtttccctgtggttctgcttctcagggatggtgtgtggagtgattcctgtgtggccatccaaggaagctggctgggaactgcctctgatgggggaggccatctccccattcagctgccctgtttgtatctggaggaaatcagttgcaaggcatcagagcataagtgtgggtctcacctccacccctcaccagagccacgctcctccaaagggccctcccttttggcccctttctgcccaggaggccaatccctttgcctttgcagctgttgatacacaggaacctcatggagcctggaagggtccatgcgcagccacacccaaccaggctgtgacgtcacaaaggcaggagggtggtggccatggtggactgtctgggccgctttgctaggccaggcctacctggggctgggttggagtggtatggtctttagctgttagaaagaagatgaagtgggagaggatggcatggctggaccaggtatgcttggggctggctacctcggcttgcaaagaccacgggctcttagctgggactctgagtcgccagctgggtctcactctgagccgccacagggtccctggcatttggcagctctctggtcccttcatttccatggccctccctgaaggccctcttctggctggctgaaggatcattcggggctttggccgtcatgttggctcctgagtctcattctttctaaggatcaaggggagacccagccttgacaatgacccagcagggtatgagccaggccccaaaggcatcatggggctcactctcggtaggcacagtttggtgctcagaaccccaggattaggactaggtctgagagaggtgggcagaaatgtgaggggctgttgacatgagatttggaagcaggagtagttacagccccagagaaaggtacttccaggatcaaacctggagaccttggtctcctgaggccctggggttttccaccaaggaaaggctattggtggctccagagccaagaccccctgccccaggaagcccagcaggtcaagcttctgtcatacaccctggggccaagggcatctgctctgcacctccatgggacctgaggccatgacagctttgggcaaaaaccagcccaacctggccactgctttgaaagtcctcatctactggccccaggaaggctaagcctgcaacctggaaggttccttagggtcctagaaggctcctactaccctcctgcctggctgaacaggaggtgctgctgtgagaaagggagggcctgtccttgccttgccagtccctgccagctgctgcttctgtccaactctgtagaaggaccagggccccaactcagctggctcttgggtgggtgtgggtagcctgaggccctcctttggtatggcccttgccaatatcacggcatttccactgtggcctgggtccccatcccatgtgctcccatgggtggcttgcacagaagtcataggcatggtctccagcctcccctcggggcctccagttggctggtggcagagaaagggatggatcatgtgaatcccaccttggctctgcccctaactccctgtgagctccatcagggcactctagactttcagagcctgtaaattcaactatgaattgaggccgcagggcagagtgtttcttccaacttggacatatgtcatctcagggcccagagaacttcccccaggaggctcggccacgccacttttaagggcatctcctggggatggcagtgatccttgtgatggtgccaggaggaggtgcactccctcactgaccttgggacagtggttattctcctcttccttcccttcccacctctagcaaactcaggccacccagaatttgacaccatttgtgacacatgacactatttagagtcaactgcccagaccaaatggcatatttaacaagaatgtgctggggcctgcagcctctcattagggcctggacacccagcttcgtgactccccatctgcaccctgggctcagggccaggaaaagatgttcttttgcaaagctttcagcccattgctggagcacagctctccactgggtgtgagaagaaaacactggaacttctattgcaaattatttttgcctagaaaagaggatatttcatatttaatgtatagataatagatatataaacatataaagtaataaatatgagtgtttggggtttataaaataaactttttgattgctaaatcatgcatgatcaatacagcttggtacccactgctcttgtgattgggagggtt

SEQ ID NO: 1886159 - DNA, 4001 bp, Homo sapiens
gaaaaagaacattaaggatatggccctcactggtgctagtaattttagtatacaatattactcaaacagacaagctattgttaaaaaaaaatcaatatcataaactattcaaaaggaacagtaagaaagcagttactctctacctgcactggcattaattttaaaaagatgtcaagtcttggagcagtggttctcaagcttttatgaaacagtgtcctctttgagaatctgatactatggaccttcttcttcccacaaaaatgtataattgtgcataaaatttccagtagtttatggacccctacttaagacctttgtgtcaggcctctgagcccaagcctgcacgtatatatccagatggtctgaagcaacagaagaatcacaaaagaagtgaaaatggccagttcctgccttgactgatgacattaccttgtgaaattccatctcctggctcagaagcacccccactgagcaccttgtgacccccacccctgcccgcaagaacacaaccccctttgactgtaattttccactacctacccaaatcctataaaactgcccacccctaactccctttgctgactcctttttggactcagcccgcctgcacccaggtgaaataaatagctttattactcacacaaagcctgtttggtggtctcttcgcacggacgcgcctaacactttgctttagtgtagatgaccactcccctctataaggtagggaggaagaatgttcggttagttcctctcctctggccgatattttttttcttctcctggatgagacaaagacaaaaaaacaaaaaataaactgacagagcgacaaaaaaggtctcatataaaagtccttctgtattatttttcagctctagcaaatccagggccaacaaagagcatacccaaaaacattcatttgtctaatggtgtgtccgttggaacttaactaatgtgccagttttaaacaggccacaccaattcagaaacctagtaacaggaactttcctagaatcttacctgagagaccggatgagggtaaggttacaacaatccaaattaccaaaagagacaacccgttcggttaaaggagaacagaataccaaatgcctcagtgttgacactgtgcaaccccaccactttacacaaactacgttctaataacatttccctatcattctgtctctataaaaacaatattgtacactgaactcctgtacttctgggtcggaaaccaaaaacggtgaattctatcaagaccctggcatcagccaaaattaatgcgccattagaacgttatcaggacatcagtgccagaaccgcttactcagatcataaaagtttgggaggtgggagtgggagcggacggctttagtaaaagttgcaccagggtgtccgcgataaacacacccgaatgcaattcccaagggaaacctgttacaagtctcaaggtcaacgggctggggacacaaaatactcagagccacaacaggcctcaactgataccgctgacgggcaaagagggggaacgaagtcctaaggcgaggggtataagtaaatcaataaaacaaagatattcttcgaaaaataaatcgatggcagaagcagcggctgccagatacagccccgtgtgggtgcaagcagaaagcacaaaggtggctaaaggcacggcactgggaaggaccgagacgggctgaggggtgggccgtgcaacacacccagaaggcgggtgacggctgccctggagccgccgaggttggaacccccgcccagccgaggccgaggccggctgcccgcaactcgcaggttcctgcgcgcttccgtacccggcccgtctgggccacgccacctcctcggcgcctgctcgtcccaccgtcactggccttctcggctcacctcgcacggtccaacagatgcactcggcctcccgggggctgctcgcccccggcccagaggccagtttgcagcggcacgccttactccgccatcttcgcagcttctcaaggtggccaaccctgcggtgggccgttcccacaagccccgcccccgccgctggggctgagtgtttattgggcatcgtcttgctcgcgcgcgctctccttgcgtcgtaggttggttggaatgcacgtcaatcaatagcactcgccccactctttcgatccggattgggtcccagaattgaggtaacagggagaaatgcttttgtaattcaattattaagaatgtaaaatttccgccgtagaagctgtaccacgtggtaagatagtgtggctaggccgcgtgactattttaagccactgttaggttaaactgtagtactaataatttcattctcaggcccgagggtttttgttttgttttgttttttgagacagagtctctcactgtcgcccaagctggagtgcagtggcgcgatcttgactcactgcaacctccgcctcccgggtttaaacgattctcctgcctcagcccctcaagtagctgggactacaggcgcatgccaccacacccagctaatttttgtatttttagtagagacgagatttcactacgttggccagactggtgtcgaactcctgacctcaggtgatccacccgcctcggtctcccgaagtgctgggattacaggcatgagccaccgcgcccaggcttttaatccaggggtagcacaacacctagggaaaaaatttaatgcttccagtttgtctctgtctttgactcttaaagggcccaaacgttgtccggctgtttacagctttggtcaatacaggagagaaggattcgtcacttttctgaaggccctcctgcatagaggaaacctgctgtaactggcagttttgttgtttgctacacccaactgtagggcatcctttcttctgcatcatttcccagaggggcaggtgtcaggcctctgagcccaagctaagccatcatatcccctgtgacctgcacgtatacatccagatggcctgaagcaactgaagatccacaaagaagtgaaaatagccttaactgatgacattcaccattgtgatttgtttctgccccaccctaactgatcaatgtactttgtaatctccccacccttaagaaggttctttgtaattctccccacccttgagaatgtactttgtgagatccaccccctgcccacaaaacattgctcctaactccaccgcctatcccaaaacctgtaagaactaatgataatccaccaccctttgctgaactctcttttccgactcatcccacctgcacccaggtgaaataaacaggcttgttgttcacacaaagcctgtttggtggtctcttcacacggacacgtgacagcagggagggtatacgtggggtggctcctcttcggggttatgacaagcgaggcccagcgtaggcagtgtaggtccactgtgcttgccaaacaccaagagggctgtcatctgggtggattcttagaaatgcagattcctggcctggcacggtggctgtaatcccagcactttgggaggctgaggcgggtggatcagctgaggtcaggagttcaagaccagcctggccaacatggtgaaaccccaatctctaccaaaaatacaaaaattagccaggtgtggtggcacgtgcctgtaatcccagctactcaggaggctgaggcaggagaattgcttgaacctgggaggcggaggttgcagtgagccaagactgtgccattacactccagcctgggcaagagtgagactccatctcaaaaaagaaatgcaaagaaaaagccatgtaaaaccagagtatgtcaccgctgaggctgcacatgaatgaggaggtgggcaatttaaggaatggacatatactggatttttaggctttttctacatttaaggagtcagggagtcaagaatagaaattgcgtcttagctggaatgaatgggaagtggccacggctgacaaaaccatgtcgaagccaaaagtgctggcccctcgatgaatgtttccacttcatatatccaggcagc

SEQ ID NO: 1886160 - DNA, 4001 bp, Homo sapiens
tttattgagactgaggcccagaaaggttaaattacttgacaatgtctaagagctaattactacagaaatcttcctctggggcactttattcttaatccagagagggttttcttttttttttttttgtaactgaagatggtgtaatacgatccattacattaataatgactgtaaatattcaaataactgactagtttatttaattaattaatttattttgagctggagtctcgctgtcgcccaggctggagtgcagtggtgtgatctaggctcactgcaacctccgcctcccaggttcaagtgattcccctacctcagcctcccgagtagctgggactacaggtgcaggccaccacacccggctaatattttttttttgtattttagtacagacagggtttcaccctgttggccaggatggtctcgatctcctgaccttgtgatctgcccgcctcggcctcccaaagtgctgggactacaggcgtgagccaccgtgcctggccgaccagtttatttaaaaaaaaaacttgtttaacttaagtggcatgaatttgataactttcatttctttggttataaagacgggtgatattattcgatgggataaagaaaccaaaattatagtttcaatatgcaaatttaactctcctaagagacactggtctcctgggggataaacagtccccaattatctgattgatcattcttgtccttggatcattccccatacccaccaggcaaatactaggtgcctccttaaaaagccatttttgtaaggaaaactttaaattcattaaatttaaaatcatcttccccttaggagcactcataattaggctatactaagactctgggaacgatctatggagatatggcaaactagcctccgtgacttgacggtttctaatccacatgcgaatgtggaaaaatgccaaaaagagaccaatcttcagcagaggtacttagcgctctccagagtatgcataataaccgagtgtggtatataagtctagggcagaggcatctgtctccatccatcagacagtaaatgtggagctggggaggaaaaggagtgcttcctaacaggatgggtgttggtgtgaacaaagggggcttttgaagcctgtagtggaaattttccttctggagctgtgtccttcaggaattctcttcctccctatcccttcccatctgcctggtcctctctacaccaagtcctcttttaccatttaaacaaatcttttggtttaacaacgtctgcaggcagatgctaaaagctttctgtgaggcagcccttttttaatgtcaggatgaaactcaggagctgtttattactctggggtggggggcttggagggaaagaacaccaagtaattttgtgcaggaatgctgaccaaacagtactgaggtacttctggttccagttttcctcctagcagtcattttaatcagcacttcccccttttaatgagctggtagtgccattacataatcacccagctcactggattaatgatgaaaagaggaactgatttttccagttgcatcatttgaagtaaatgttaactttctttctgagtccttagttaaccgcattagtgtgacaaatatgtctttgtctagcataagtaattagaatttaatcactttaactgcatcttaattaccccaaatgaattgaaaggacatttaatagcaaagattaaattgccttaatgaacgatttttgtgactccatcaatactcgaatcgctttagccactcctctcacgcacttcagtcgcagaatctgcagcgagcacagaggtcactaggtggcgcgcttcgctcgtttgtttatttaattttccccattgatctgttttagaagacaacaggaaagaaagcaaaaagcacatagtttattgcgttccttcgataacctctctttgggactatgagatcatcaccagatgtgaaaacgaaagcagtgatttcagaaaccgtcgattctgaatatcccgtggcggcatatgcaaaggaagatgagaaacacatggtgactggaaacatgcagtgtttgacagaaattgcaagatgccctctagacaactcccagcctatatactctgttttggtcaatttattactttttagtgcagagccctaaaatttgagttacaggcaatctttgaaatagcaaggcaggcactgatgtggagccaagaagtgtaattgctgtccaagtgcagatcagaatgccaatgcctgaaggtatgggaagatctgagcccttgggcccccctcaaggcaagggaccgaatggaccagccccacccacaggcacatctaatgagataggtcttgtccatcaataattgtttaagtgaacaaagggatgggaggctggggtttcacatctacttctggcacttcctcacattttctggctgcttcttcaaaaaagagtaataaaaaatctcttttacaagtcttgagtataaaagaaataagttttcataagtgactctttttgagagtcccaaaggaaagacacactttctctaatttcaagagcttattatgtagagacttttgaatcagttatttccacattctgactccactaacctggtgcacctgtcctggcaacagaagcatgggatggaggataaaatgttctgggctttggactgggaaagctgagctcagggcatcactgttttccagtggtgttatcacaagtaaattatttaacctcactgaagagagcaacagggaaaaaagtggtaaataccacttagactaatggttcccaaacttggctgcacatcaaaatcacctgggagtttataaaaatccaatgcccatgtcacgtcctgtaccaattacatcaaaatatctgaagctgcagctaggcatcagtttttttaaaggtctctaagtgattccaatgtatagcaagatttgggaaccactggtataaatgttgagtcttcaatgagaacatctatgttccgatcacagtacccaacaaatagaatgtgcacaaaaaacttaagcttcttccttatcagttactatgacaaatgagattggttgtactttagggtctagttctgtccagctgttgtcttattaaattgcctcatctaaaagagaagaaaatttctttttttcttcaacttttattttgagttccagggtacatgtgcaggatgtgcaggttttttacacacgtaaacatgtgccgtggtggtttgctgcacagatcaacccatcatcttggtactaagcccagcatctattagctattaagaaaagaaaatttctagaaattaatttgttacaattttatgataccgtaacatctcttggaagagacatatgtggatgcttctatagcaagaccctgtgataagtaatttttatgtttgtatcaaaataatcagattgtcttgtgattggtctagtcacctagcccaatcttattatctcaggaggaaattaaacttcgttagtattaacatacttgtattaaaataagaacctatacaaacctattgatagaaggtaggaatttatgattgtgcactaaatccattcacataagaaatatttttctttttactggactctatgagactgacattttttatgtagaaataatgtggctttcttctcccaaagatgcttatccatcttattcaaatagagacacaatgagagtattatttaataaatatttgttaaatgttttctccagcattataagaaatgcaccctctaacaaccacaacttcagtaacaccttccttctgttgctaccctaggttgggggccattcaattttaccaagagtgtggaaattctgctgttttaatggggactgaaaggaaactagtcatttctcattcaaaccatcaaggctcctagattgatttaaaatattaagtcggtgtttaaatattccaataaatggactttacaaagagcacaagcaatgtcacttgaggaacaag

SEQ ID NO: 1886161 - DNA, 4001 bp, Homo sapiens
catcagtggcatttctaaattatctaagtcatactacttaagaattcaatatttctcttttttggccattcctgtgctttatcatttcaacagcccaaaacttcttccctgctcccagctgaactttctggttatttgttttaagcctatgttcacttgtctgtttctttttaaaagtaaaaatacaggtgtccttatatcctctcatataaatcattaccatgcttgaattaagtaatcaaactaaattactccttcctttcatctttcctcttacggtcaattttcatgtccctggattcctggattccaaaaatttgttattttacctgaaatgtatctacctctattttacattgtaatggccaaaactagagaggaagaagaaaaaaacaactaaacgtccaacgaactatcatagcagaataatttattcctccattagtaccattataacagtttttcttcttcacagttgaaaatgatattaagtgtgtagtaaggcatgcaggtaagggcaggtgggctctcagaaagacagtttaccggtcaattcttctccaaattctgtttatttcatttaatttggtcccaagaagtgccacagaacatgagtctctagcagacttcctttttaaacttttctgcaaagacagagatagagcaagtggtcttcacttttaacttctataggttattaatttcccttcacgcctatcaaacaggttaagaagatttttaaataataaatcattttctaagtcaccatttgaactcccaaatctcttgcctctgctaaagacactgcattgtgctgagtccaactctccttcatagccttccttttactgtggatacccatgatacatttctactaccaggtaaaagtgaaagtcagttatttgcctttcttcatgatctgtagccccttatgtatgccctaatgtgatctgttccttcttccctacgttataacctacttgaccacaccaaaatcttatttgataaatgcaaagagagattctgccactacactattttgctgaaactaaatttcataaatcaatttaaatttttttcctgctgttatcttgactttccatctttccacttacctgttcccagaccacatgatcttcaggtaattagaatacaggtaactgagcttctgcttgtgccacttctattatataaaaagctaagagaatcacaaaaagtagtgaattaacagcactgaagaatactgactagctgcttttgcagaaacctggatttgccagctttgttcatgtggccaggggaattgtccctggaacctgattggcttggtaagaaccaccaaaagaaaagtcttgtaatgagtcctggagaggaaacaaaactgagactggatattttaagaccctcacccttggagattttatctgctaagtccaacttgctcattggtggtttaaaattaggaagagggggaggggcagaatggctgaatagaagtctccaccgatcaccacccctgccacacacacacacacaagaacaccacgtctgacaactatctacacaaaaggagtagcttcataggaaccaaagatcaggtaagcactcgtagtgcctgtttttgacttaatatcactaaaagaggcactgaagaggatagaagatgtcttttctatcctcttgaaatattgaattcagtcttgagttgtgacgccaccgctccccccgaccacccacagcactgggtggtggagataggcatagcacagcaactgtgaggctttgcatggaactcagtgctgccctgtcccacagaaagcagaacagagctgaactcagctgacactcaccacggagggtgcgtttaaaaactgaaccatgagaacacttggacacaggaaggggaacatcacacactggggcctgttgtggggctggggttgggggcagggatagcattagaagatatacctaatgtaaatgacgagttaatgggtgcagcacaccagcatggcacaggtaccctagaacttaaagtataatatatatatatacataaaattaaaaaaaaaaacaaccagcactaactagccagaggacatcacccatcccttcagtgggaggatgagttccagccagcctcaccacccagggctggagggctgtggggccccatattaacttgaaaggcagtataggacgcaaagactgcaattcctaggcaagtcctagtcctgagctgggctcagagccagccgactgaggaggtggggggcacgtgacctttgagacaccagctggggcagctgagggagtgcttacattatcccttccccaaccacaggcagaacaatgcacctctccaaaagagaccttttccttatgtttgatgagaggagagaagggtgaagaggacttttctcttgcatcttaaataccagctcagccatagtaggataggacacaacggtcagcgtcatctggccctaactctcgaacaacatttctagacataccttgggccagaaaggaacccactgccttgaagggaagaacccagtcccagcaggatccacaacctactgcttaaaaagcccttcggcccggaagcagcagcagccatatccaggtagtatgctgcaggccttgggtgagactcagagatgtgctggcttcaggtgtgaactggcacattcccagctgtggtggctatggagagagattcttctgcttgagaaaagtacaggaaaaagtaaaggggactttgtcttgcacctcagctatcagctcagccacagaggggtaaaacaccaagcggacttttggggtcctcagttccaggccttggctctgggatggcatttccggacttactctgggccagaggggagcccactgtcctgaagggtgagtcccaggcctcattcaccacaggctgactgaagagccctgggacccttaaggaacatgggccatagccaggaagtgggtatagcagaccttgagtgagacccagtgctgtactagcttcacgtctgactacttcaaggcatttaataagcaaactcccagaggtaaaggataaagaaaggatcctaaaatcagcaagagaaatgagaaaataaacaatggagatccaatatgtttggcagcagacttttcagtggagaccttacaggccaggagaaagtggcatgacatatttaaagtgctgaaagaaaaacttgtaccctagaatagtacatctggtgaaattatccttcaaacatgaaggagaaataaaggctttcccagacaaacaaaaggtgagacctgtcccacaagaaatgacaaagggagcactcaatcagaaagaaaaggatgttaataagcaataaaaaatcctctgaaggtacaaaattcaccgataatagtattactttaaaattatttaaaatatttctgaaacacagaatattataacactatgtagtgtgtaaactactcttaagtaggaaaactaaaagatgaaccaatcaaaaataacaactacaacaactcttcaagacatagactgtacaataagacataaatagaaacaggccaggtgccgtggctcacacctgtaatcccagcactttcagaggtcaaagcagatggatcacttgaggtcaggagttcaagtccaacctggccaacatggcaaaaccctgtatttactttaaagagagagatatatataaatagcaacaacaaaaagttaaaaactgggaggatgatgttcagagcttttattagttttctttttgcgtgttagtttgtgtgtttgtttatacaagcagttttaagttgttatcaacttaaaacaatggattattataagatagggtttactgtctgatggaaatctcaaatcaaaaaacatacaacagatacataaaaaataaaaagcaataaattaaatcataccaccagagaaaatgaccttcaccaaaaggaagatggaaagaagaaaggatgga

SEQ ID NO: 1886162 - DNA, 4001 bp, Homo sapiens
agactttgcagtgattttgtgaacacctctcttgatattaaatgatgttttgtttaaaatagctggaatggtttcttctctctgacacaaaatcctgattggtctatgaaaagactgtcattattaaacttacagtgaaatcaattggcaataaggtcaaacatacagctaaaagtcataaaaatttgctaggattaataatgaagctgcagaaaaaaaaagtaaaattttttttgatctttttcagtaaaagtaaccagctttcttttgccactctctgcttacgtatgtaagaaaaattggtagtttaatatctttcaaagtgcacttacaaatataatattttcctcttaatgatatttttcaactctttgatatctgcatagaatcttgagtttacagccctaagtcatttatgacccttcagtagaggaatcactcttttgcttaaagccacagaatggcttcttattgtaattgtaataaaatgaaaactcacatttactatgtagaccatatgtttttgacactaccagtatctctaactttaagtttaatcattttcacattaaattactatattcttggtaacatggactttattgtattcttcaaatataccaagttcatcatcatctttgagtttttgcactgcctgtgccctctgtctaccatactatagccacaaaagtttgcatgtttggcttcttcagtttatccagatatgatccaaaatgtcagctcttcaaggcctttttttattattaaacacaaattggttactcccaatccagagtcacagtttatcatttcacttttcgttttagtttttacagagcagtatctcttcctgaaactatgctgtttattttctaccttaacggcggtctatttttactaggttgtatctcttggagagcagatagaccttatctgcctcaatactttctttcttcagttcctagaatagtcctgacaaatgggaggtattcaatgattgcagtacttggaaataaacaaatcaatttcagataaaattctacagtctatttttattctttttttttttgccctttttcaggctatgtgtttattaaacacctttttcatggaagctttcacttcctggttatgaagggtataaatgacaggattcaacaaaggaagaatcactgtgtggaagagagaaaccaccttgtcggctgggaaagccctgaaggggcacgtgtagatgaagatgccaggtccaaacatgaagaatataacaatgatatgggtggtgcatgtggacatggccttgttttttgcctcagaagaagacgctcgtatgcgacaaagaatgactgcataggaggccagaagtcccagaaagcacatgagtgtcatcaggccactattgaagaccatcagaagctccaccacaaacatgtcggtgcaagccagcttgatgacctgtcggacatcacagaagaagttgtccagctggtttgggccacaaaaaggcaagcggatgatgaggaccacctggataatggagtggacaaaacccccaagccacagagccaacatcattgcatagcaggctctagagttcatgacagttgaatactgcagaggcaggcagatggtgatgtagcggtcaaaggccatcacaacaaggagtaatccctcccctcctccaaggaagtgcaagaaaaagagctgagtgatgcagcctctgtaggagattaccttcttctcagagaggaagtccaccaacatcttgggagccacaatgaaggagtaggatgcatccaggaaggccaagttgcccagaaataaatagaggggggctgtgagcccagggtctgaccttatggtgaaaataatgagaaaatttccagggaggatgaagaagtagaatattaaaactagcacaaagaccaggagctaaatatctcgaaactgggtcaaacgaaggaggatgaattctcttatcactgttctgttctcgctttccatttccctggcctgcagtacattaagaagcagaattaattgttattgctatgtcttccaactagatactagttctacagctaaaaaatatttggcacatatagtacttcagctaaaaacaacacttcccatccctctcctattctggggaaactccgttaccttaatttctccaaatttaaaatgaaaaatgaaaacaaaatatggttctcaaagctacaggtttattcccattcaaccatgtgcttctacagaatcattttccatgttaggagtctggtatcctccacgttgggattcctacattcctaaatcatgtaagtttcctaatggagacacaacctaacttcaaatctgaaggtctttgagttttttggatatactatgcttgagggttagttcttttcttgggattagaccctttttctccttgtccacaccacccccaaattttcctagacattttcttccctcagttcctgtgtaattcccagttcctagctggtaactctcttccttgccctctgtcttatcatctaatttacttcttattatactccttttggtctgatatccttgaatactcttttcccagactgttcacgagaatcccaagctatagctccacttttgacctaacacaggcacagtgctccagctgtaactctgtttgaacaccactcctgtggccactccacacctgcatgcagcttatttagcactttttgagtttcaaatactaataaactcacaacacatttctttctctgttccaagtatgacacccaagatacagccctttaacaaaaaatatgctacaatataaaatttgcaagtataaaactttaaaatatcattatctcaactcataagatcatagcatagatacactgtaagtagccataaagatactgtagtgttattcttccatttcaaagatgagaaataacctgtagttatattacttaagtttagagtgagttttattttttgctctgcttgataagtagtaggataatgcaagtgtatactattcagtttaaatagataaagaattttttaatcacagcttcaatgaatgaatgttctttttgtgcatctgaataactaaagataatattgctagtctaaaatcactcccgtattgctttgatttgtaagttcaaccttgtttaaataaaaagaaaaacaatgtccattgtgaagaaaattcatatttaaaattcagattgttttcatggggtatactcattccagaaggtgcacatgataatccactgaagtatagaaagaacatagtaatttatctatatttagtcagtgtataacattttatatgtatcactacatttcattcttttctaaattcactttttaatatttataatggataacatagtacaatggtttatatatactttataaataaatatgcatacatttaaggttacatattcaaaaaatgtcttaggggagtaaattttttaagtttgaaaattgttggcctacaacaaaatacaaactgtaatataaaaggatattcttaatatgatttaactaaacagtgtatttgttttaaataagtgctctagcggccgggcgtggtggcttatgcctgtaatcccagcactttgggaggccaaggcgggtggatcacgaggtcaggagatcgagaccatcttggctaacatggtgaaaccccgtctctactaaaaaaatacaaaaaaaattagccgtagtggtggtggttgcctgtagtcccagctactcaggaggctgaggcaggagaatggtgtgaacccaggaggcagagctttcagtgagccgagatcatgccactgcactccagcctgggtgacagagcgagactctgtctcaaaataaataaataaataaataaataaataaataaataaataagtgctctagcacatggggtacggaaggaagggaaaatctttgacagaaaatgctactgcaacagtacctagaaaagaaagaca

SEQ ID NO: 1886163 - DNA, 4001 bp, Homo sapiens
gagcttgtctcaccagcgctggctgtgagttcacaactgagcacaacccgctctgcaggaaagcactctccccgcccactgggctgaggtccctttaacagatgccaacattgactctgccaccatgagagtgggccctaaagcgtagcccaggagagggactgcagtgacctccattcacatccggtgtgaggatgggtggcagggtctgagtgtcttctcggagggacagaaggaacggggagagaaacgagtggccaggcctacacaagccccttgggcaagcaatagaagaggaagtcgcatctcttgcatcccagagctcacagtccagagggagaacctggaggcacagaaatgaaaccgtgcaaccagcgtggaatcaaggctcccgtgtgagtctaaggggagtcatgagcacagtcgtgtgcaacctgcccaaccacaccccgcagttctgcagtgagaccagacaagccatggaatattctgagacgagaaatccacatggagtaattggggtggcttttccttgcccacaagtacagcaaatgtaggcttagcagtacatttggatctgggcccatgccgtgtctccaggtcaatatgaaacaagttgccaggatcatcaagggggcattctaaaaattagctctagccagccctagtggcctgggagtaccaaaatggtcatttgctaaaattggccattaacattttctactaactgctctctccaaagacttggaaaacgagggggaaactccttggaaatcaagtgttatgtagacccttatggcagcctggactccaaccttcagaagctattcatttttaaaaatacatggtgggcattttctacatgtggttgagtattttatccaacagccaagtcattccagttttccccacagcagacatgttagccaatgtgctgcctgctcagtcagtgcctccttttctgaccacccacaggaactgtccctgccaccatgtttatccacattcacgtacctctccctggctgcagctgttggaacagcaatggactcctgactgaggggaggcaccccattggctagccattgaccaatcagattctgtctcctgggtctctggacttagattcttggtattgggcccataacctgagagatcatgtccaagtttaagtgaacaagttaaaacctagaaaaggcagaacagccgggtgtggtggctcatgcctgcagtcccagcactttgggaggcccaaacgggtggatcacctgaggtcgggagttcgagaccagccttaccagcatggagaaactccgtctctaccaaaaatacaaaattagccgggcatggtagtgcatgcctgtaatcccagctactccggaggctgaggcaggagaatcgcttggaacccacgagacagaggttgcgctgagccaagattgtgccattgcactccagcctgggcaacaagagcaaaactctgtcaaaaaaaaaaaaaaaaaaaaaaaaaaagaaagaaagagagagagaaggaaggaaagaaagaaggagaaaaagaaaaggcaaaacagagaaagccagtctgcagagaaaagaatgaaacaaagctactgagataagctgagatgaaaaaaaaaaaaaaaaaaacacccagagaaacacaggcaagaagctaggaaagtctctgagcctctcacgggtctggttgtcatccctgcccttgaagtcggtgagattcctcatagccttccaacgaaatcattgttattactgagagttaaatttataatacttctatttcttgcaaccaaacaattattgaccaagacccctattaagacatcacctatgtgctgcactgtacttgttcaatactgaggatctcacctcttcttcttcttcttgcccacctttaggtctaactggacctcctttctctcctggtattcctctgtcttcatttctttagtgcttcctttcagggtctcaggtaataataaccagcagtgtgccccagtgattagcagatgagtgagctgtgtaacctagacaccatgttccacttaatggtttgtttgctcagcctacttcaaaggaggctgttagcctataagtcaataattagtcattcaacaaatacccatcaagctatggcccaaccccagcaaagatatgttgaaaaaaaaaaaaaacttttgaagagcaaatataagcctttatatatggttgacttagccgtttctattttcctttcacaacagagaggcaatgttgatgtgctaccagtcctaatgcagctagaagttatctgttacaccaatgaccccatcaaaaagagaactgttaacacaggcccagtttttactttgcttgtagtggtggggtattagctaattgttgcccattaagagaaacaaataatccccagtgagtcccaaaaagaagtggaagtggagctgaatcacctgtaagatcagggcttctcttagctgctcacagctgcctgacccagtcacagaagaagatgtagaggggattcattccatcttacttttattgggttttcttttactatgtgaaatgaatctcaagaaaacatctctcatccccccaaactctatcattgttctactcctcaattttagtattactactgtaatgataagattatagctactacataataagattaaacatttaaaaccatctaacaaatcacccataagcttacccccatcattcaatcaacagtcttctctcttgtctctttttttttttcttttggcacattacctcccaaaggtagaattttcacagacatgaccctagcatgcatgtcaggttgcaatttgctgtttgatcctgcctgccattttttcatgtgtaagcaatattttctaggctcatgtttcccacttatgaccttcaaccccttctaaagctctacccaattatgactcaaggaattcccatttttccctcctctattctccagctctcctttggagtgccacttgcagagctgcctgggaggtgcctcactgctgtcctacagggcccactgacaaaccaggcagtcgcgtttccccaggcatggccacccctgcagccacccctgtggcacgctgccacttctgtgtgagtgttccgcccatgcccatcacccatcacacactccgctgggtaccacacactgcctccccaggtactgatgtttcctcagagtgctcttggcctttgcagggaccacagctctcatttacctccttgaacacccagcacctaacacagaacataatacatagcagatgctaaaaaatattggatgaaaaaatgagtgaataaataaactaatgctttgtggatggacaaaggagccataaggtcccctggcctcctctttctgcacatgcttctccttctcccacagcgctctgccacccttgccaacgtatatgctttgaggactcattccctaaacatccacctcagggcctacaagctgcacacacaagaagggccaggctgcagggactgggagttggttcagtttatgttgtcttgaatcagagaaaggagcatcccaggacttttcccaccgtcagctgttccctcccactctttcctgtctgagctctggctctcctccccatctcgccatgaattcttcccatcacatcggggcatctcccttctcttgctcacttaaaataagtagtgagcacctgctgtgtctcagatgcagacacatcagaggaatcactgtcctcaaggagctcacagtctggcaggtcactgagatgaaaataagtgcagtaatatgatcttacggaggagaaggccgagaagcctcgccacagagcataaatggtatctccagctgtgcacgagtagtttacgtgccatgtgggctgaggtccctcagtggcctgcagtggggtctgatgttctagtttcaaggtgtccctttgggttaagcattgccctcttcttgctactgc

SEQ ID NO: 1886164 - DNA, 4001 bp, Homo sapiens
ttgaccactagttccattccatactttaagacataaactactcagattaaaaacaagcaagtgtttatattcaggttaattggtaatatggctcacttaatattattcaaattaaaacaataacatctagctattaaatgaaaagtacaaggaatttagtaagcttaattcattgtaaggctattcaaaatagccacagaaattgtatgacccagtttggttcaaatatcctgacaattcgtattttatatagataactaaatctcaaacgaatcatttctcctccccgttaatactctccatacctaaaaagaagtgactctgagtcacaggggcgccggaatctgaggataaaagcacacatttgacaaaaacattttggatactataatgtaaattctaaatcaagatgtaacatattattttgtaatataaactacacagaataaaggtctataaaatcacctggccttgagcataaattaggagaggaaaagagagagaaggaaaagtcatttataaatgatttattaacatttcaatttagtcaacaaagagaaagctcaaaaactaagaactgtattcctaattaaacttttaagaagtgtattcattggaaatattaaagaggctaaatatacaattcaaatgtattaaatttctaagactatagttacataaaatttattttcagatgatagaaaaatttcacactttgaaaaataagaaaaaatataaaacagcttagagaacttttagctttattgttataaatttcaaaagaacaaaatccctgtaacaaaatattcttatttatagggcttcattcataagaaaaagcttgaatctctgataaagtataatctttttaatgttatgtaaatatcaacgaaaagagcagagagagacgcatatttactcgatatacaatattcaactagatcctatttgcataaaaagtaatggaaggtttgcctacaagactagtaagaatcaaaataaaaaacatttcttctgagtccattcctgtccccacattaaatattcaacagtttagcaaaacctcaaaaaccaatgggaaaaaagcacaactgagtacaagggcaaagctgaactctggaatgacaatgaacttgctatgatacaaactacgtgatgaaaaacagaatgaaaaagtataggacaatctctcttaaaaaagcacccattttaatttttttatttatttttttcccttcatggaaaaacacactgactgccttcaagctgttttctctatccttctgtctacagaagttcaacatcgttgcaaagattaaaagagatatgattgtgtgcccacaattacaaaaatacagactttaatctgggacgtggggaaagagctaagcatcatgtggagaaagacacaaaacaacacaaaacgatcccctacaaaaacaagcaaaataattttgtagtccaaaccggaagactgccctagaaatgaaacttttaaatgttgaatttcttttttttttttttttttttggagttgcatacatttttttaatccaaagaagtcagcctcctaagtattgcttaaacaggtttatcagaattaagtaggcacgacactcatactttcagaaaagcatttgcagccaggggagtaacgtggcactcaccagcatgatatctgttttgccaacttgctgaggaacgagtaacctgaaatgaagaagcgagaatctcatcctcagccccccaacagcttcctcagcttctttttattctgagtcactccctgaaacagtcgctgcatctaagaccagcctcgggctaaacccagctggcctgaaggctcaactcacatcaaacagagctgggagttgcttttgcgtgtgtccgcagtttgaagtgtcctctccgaaggtgaagtggaggaagcaggtgcgctctgggatgaagtgcagggaggcaaactctggctgggttcctgtaaacatccatggcagttgcaaataatgagaagccgaggccaggccatcggtgtgacgctgcaggcagatgaggtcttgggacgccccttgcgttcccccttctgtgggagcaggtgccttcccaatctcagcactcagtcccaatctctcttccactctcctgggtccaaacaggaacctctctgttggcacgaagcttttgagggtagcaggcaggcctcggaggcaggggagggtctcctcctggggaaccatccccgtccagatggtgcccccaaccagctgctgcggcgccatgatctgggcggctggtccagggcgtgggttgcggatcgtggagggaagaggggaacggcagtcgagaccctactccaagtacccatcaaagacgtcgagctccgagtcagcatcgtaaaggcccgagccggggtcggagagcacgccgaggtccacgagcgcctggtccatgtcctcgaacaggaagacgaggcccacgttgaggacgatgtactccatgaggaaggcgtagtacaggatcagcacattgacgaagaacaggcccacgtagaacatagagggcagcagcggcggcggcacgtaggggaccagggggcccagtgcgtccaggtgggccgcgacccgggcgccgagcatgcagccggtggcaagggcggcggcggcccggcgatcccggcgaactcagccgctgtggcgcccgggccgccggcgagggcacagcgcagccatccaggggtaccctggagcccgacagaagcagggccgggctccagatgtcccctggcaaatgcgccccgacccccgaaatgcgccgggcgggtcaccgcaccccgagatgtgcccccaaggctctttcgaccgccctgaagtggcgggcccccctgaagtggccggcggctgcccggctccctcgaggcgcctccctggcgctcgcagggcctcgcagagccggcggggatcccaccgcggctcagtgtctagggccggtcccggcagccctctctcccgcccggccccgcaggtcctagcgtcgccctcccccccgcgcccctgcaggcccagcacccatggctgcggccgcggcgtcgccctccgagtcgcgctcagagccactgctttatgttcaaaactgaaaagcatagatgatacacattgcgttgatactctctgacaagctcgtttgcatacatgtttatattccttggctttggattcagaatgataaactgcacctatagtagaaaataaaatccagttgttaattgttaaaatatcaagagaccttgcttatgttatataaatactccaataaactgatgctgtcctagtaaaaaacaaaactattgccctaactgtatggagttttatgatttctttctccaatgtaagcctttttaataccatgccttatctccgttttcaaaagctcttttcctgccaaaagccctaaaaatagctcatgtccccagaggcttcaccaaggtcacctcccctcttcttttcaagaagctttttccaaatcaggagttcttttgatctggagctaacaacccagaaggtgtcagggacagggtccctccaggttcctctctgctgaaagcccctgccatttgggaagttactgtttcaaatccagaattcataagaataattcagaaagctggattgcttctgaacaacattggaagttgaggcatcttacatctcacatgtccacaaccaccaccaattgcaccattcctaaccaaacacttcacgtcctctcaataaagttgctagattagtctcatttcttaaaaagctgttttttgacaaaatgggagaaaattttcgcaacctactcatctcacaaaggactaatatccagaatctacaatgaactccaacaaatttacaagaaaaatacaagcaaccccatcaaaaagtgggcaaaggatatgaacagacacttctcaaaagaagacatttatgcagccaaaaagcacatgaagaaatgctcat

SEQ ID NO: 1886165 - DNA, 4001 bp, Homo sapiens
cagcactgtcactcccagaggctgcaccccctttccccgcttttccagaaccactttttcctttgggcggcatcttggaagcttgttgttgaactctgaactctgggcctggtttttaccccagtttgaaagaatctgaattccaaactacccctgatgcagagctgggaccacggtttgagtctcaagtctgcctgttgggtggagggctttaagaggcaggaatgggccagacacgatggctcccatctgtaatcccagcactttgggaggccaaggcaggtggatcacttgagccaaagggttcaagaccaggctgggcaacatagacactgtaactataaaatttttaataaaagagaggtaggaatggggagaaggggaatatgtcatgcctaactgggtttcatcaaataccgaatatccttgtaaaaacccagcatacagcatcttgagcttataaggtcaatatttttggatttctgcagctgctctcagtctcttcagcctccgttctagctgttctgactttgtggaatgatggggtagaaactctctctgctcttcttgagggggcatgggagtagtccctggccagctccctctcttttcctctgagaaggagctgggtctagaataggctgaaaagctcccctatctttagacacttcagagcacaaaacagtttgagaagatcttgttgcgggggtggatttctcttacatttggtaggaggaaggggtattctatcccctaaaactacccattatctcttctctcttcccaaggttctcacaggactcaagccctggcagggaaaacaggagctggttacactctcaactgaacagcagccacccaggccagaggctttgggcatatagtgagtgagcgcggcccccatcacagtgctcccaaggaaatggcttcttgttttaggctcaatgtctgcattttccactcctggccatcttggtgatgctggtgtggttctctctgcctttgtgacctatgacaagaaaagccagtccccttctgttgccctgaaatagtccctgacaatcccagactgaaccagattcccagctcagtaaaggttttacctaagtcaggttgattagggagttttttggttcagggctagctccagaagcccaaagggtctcttttttccccttcttccaggacatgaagcagtccaaaggtctctcttaaaaaggtgttagtaacctttcagaagcagtgtgtcccatcttccttggctccctcatggcttggccgtttgcacccaggcagcctgcctgaccagccttgtggagcctgtcttggcacaggcacagttaaggattctccagaggaatgagccctggaatctgggttatgaatgagtaggacaatggggagagagggtgggggcaaaggcagggcacctgccatctagttacgctccccattgcgtcacggctcatatatttgccacagctctcaatctctgctttcagaagctcctcatagtcttagctgtattttttgtccctgtgctaaaatcttaaatttgtataatgctttcatctttttaaagcactttgattttatctttcagtaactccacaaggtagtgagggcaagaggttatctgaagtcatgtggttggcagttaatggcaaaaccaaggatagaatccaagccgctttctagttcatgatcctgctgatcatatctattaagtcctcatgttgtcaacaggttcctggaaaccatgactttaagccaaatgatgttacagcaggtcctccaatgttttcttcagcatcattttgttataatttttttaaagttctttagttttttgagacagtcttactccattgcctagactggagtgcagtggtacaatcacggctcactgcagcctcgacctcccaggctcaggtgatcctcccacctcagcctcctgagtagctgggactacaggcatgtgccaccacgcctagctaattttcgtattttttgtagagacaggtttttgtgctgggattacagatgtgagccaccacgcccagccccattttgttataatgttgatgagaaaaaaaaaagtttaattgtacatcattttgcttaaagttgcagtttctaaagaccctgtcaacgctgttaagtgatgacttaactgtagtcggattccatggaatggaaccatgggccaggacggattaaatcaacagccagcatctaccttagatttaggtcttaattgctcgagaaactgttttgaaataacctgaaattaagagtctctgtcccttgttctagagctcttgctgttcctctgatctctcttccacagtattcctccctgatgtccccatttgcacatgcagcttgaggaatatgtaccttgggacaggttatgggtcactgataaagcagaaaccttaaggccctggttgcagcatattgcttgcttggctcctttcccaggcagtcctcagccccattgcatagggcgcctgccaccctttcaaaggcctgccccttcatgaagacagctctgactgcaggatctttcaaagtatgaaaagcttagcttaacctacgattacacccctcagcttgtggggaaggagaggcagatgctgtgacatcagaagaggaaaatgtcagaggaccacctggagccacatcatactgggagctgttggtgctctcattaaacaagataatggatagataggcatttctttttttttttcttttcttttttttttttttttttgagatggaatctcactccatctcattgcccaggctggagtgcaatggtgcaatctcggctcactgcagcctccgacccccgggttcaagtgattctcccacctcagccctgcgagtagctgggattacaggcgcccaccaccatgcccggctaatttttgtatttttagtagagatggggtttcgccatgttggccaggctggtctgagctcctgacctcaagtgatctgcccatctcagcctcccaaagtgctgggattacaggcatgagccaccacatccaattagatgtgcatttctagtagaatgcctgacaaatacagttgctcagtaaatatcagttggtctcctcccttaacagaagatctcacctgtaaggtgaccctcccacatcaggttagtcctatattagaaactgttttcactgctgtaaaagccaccacctgtcctgccatttcatcgaacctgttattttgggatagatgggatgggtgccgtgggaaggatctgcgctaactggcacagcaaaacaggagagccttttttaccttggaaatgctccagctgattcccttgcccgggggtcacagcagtcaggaccctaccctggagccggggccccatcctcaggatgcgcacacttaggggccgaaagcagtgattagtcagccggagctggacccggactctggtgtgaatcttaatcagactcttccccatggtggcccaggaaggcaaatacttcttcagtggaaaccagctgatctcttcagagaaaccagccaggcagggagagatacagagaggcaaagatggaaagccaactaggaacaaaggatttctgcagatcccacatcatagcagccccttggcagtgcctcgcgtgttgcagggagaaggtcacctccccaagcttcacatcaggctgaactgcagggaaggagcagctctgagaggccaccgttatcaggggactggatttagtcagaagcacttagagccataaaaagtaatgcttccttggcctgcagctctttccctgaggcctggataagggctccaacctctcagagggcaagggacagagggggcagagaacaatcccagagggtaaggggaatcaagaccgtcccagaaaatccaggatgtaaagtgacaaggccattggcctttatccaggccatatatagtccaggcctgccctggtgccagccaagttgca

SEQ ID NO: 1886166 - DNA, 4001 bp, Homo sapiens
tcacttagtaataggcatttaagtttcctctgtgtctttttatggcttgatagctcatttctttttagtgctgaataagattccattgtctggatgtaccacagattatcctttcacttactgaaggacatgttagttgcttccaatttttggcacttatgaataaagccactatgaacatccatgtacaggcttttctgtggatataagttttcaattcatttgggtaaatactaaggagctgatttctgcatcatatggtaagattgtatttatatccgtttgtttttatgtattctaaaaaaatacatcgaagcttttacttttgttgtcaaatatgtcagcctttgctttcataatttctgtccttaatgttggttagaaaggcttttccaccgccaaattgtataaatctcttgtaccttcttctagtagtgcagtggtttcattttctttttacatttcaatctttgttttattttgacacaaggcagatgtctaactttattttcccttggctttcttttcacttccctagttacatacaattccctccaactatgtgacccacacaacaactccaaaggagtttccattttgctcttaaggaaactagggcagagaggtaactcatcacatttaaaatcacacagccattaatttacatagtcaaggttcaaacccagatcttttgatgcaaagtcctgttctctcatactccaagtatggtccagggatgggtagcattggcaatacccgagagcctgttagaaatgtagagtcatgggccccatcccatacctaccgaatcagaatccgcatttctgttaggttggagaagtactgcagggtgtactgtttccccagacttaggccacatcagagtcacctagggcatctgttgagctccatctctcctcaatattttaactcagtaggtctggactgaagaccaggaatctgcattttaacaagcatcccagctcataaatgcatatatgcaggtggccccatggatcacacttgagaaatgctctaaaacaactaagaaatattcctaagctacaatcaaggacacaaaaggtgattatttcccccaatctcaacttagataagtgagtatccttttaacctagaaaagaaacaggccaggggcggtggctcacgcctataatcccaatactttgggaggccaaggcaggcggatcatctgaggtcaggagttcaagaccagccttaccaatatggtgaaaccccatctctactaaaaatacaaaaattagctgggcatggtggtgagcgcctgtagtcccagctactcaggaggctgagacaggaaaattgcttgaacccgggaagcggaggttgcagtgagccgagatcgtgccactgcactccagcctgggcgacagagcgagactccgtctcagaaaacaacaacaacaacaaaaaacagctaggaggtgacaatgactcacatgtcaatatgtggaaataaagttgtaataatgaggataatgtaataatgagagtaatgactaaattttcggctttacagaaaaacacataaagaaaactaaggggaaaaagcctttagctgatccagaatttagtgagggcaatgtggagaagtaggagaaacggctactcaaatagattccagtccacttcccctcaagattgtgtcaattatgcccgtgagcctgggtctcttggcctgtaaaacggagtcataaccacccgcccccgggaagacagaacctgcctgtccactttctgaacttttcatccccagtatcgacgtccagaggcctgaatgagtaaacgttccaggagatggagcagcctccggaggctcgctttgggcagctcagatttacccggaagccgatgccacctggccagaggtgaggcaccggcaaccagaagggggccctgagcatgaccggtcagtgccacccggccgggaagacaccatctccccgcccagtcctctagaatgactccgtcatcaataattcattaagaacctcctctcaattggctgacgccttcagccctctctggcagagatccaatcaggaaggacctgagagagctcgtctgaatagtgggcgagcgcgcgtgacgtagcggccgaagactggctgtggcagcacaaggcggggccctcctcgggcggcggccagcgcggccggggcggctcagtgcgagccggggagagtcgaacccggagcagggtcccatccgagcgtggactggcggcaggatgttcagctggatggggcggcaggcgggcgggcgcgaacgcgctggcggcgcggacgcggtgcagacggtgacgggcgggctgcgctcgctctacctgcgcaaggtgctgccgctggaggaggcgtaccgcttccacgagttccactcgcctgcgctggaggacgccgacttcgagaacaagcccatgatcctgctggtgggccagtacagcaccggcaagaccaccttcatcaggtaccgtcaccgcccctcgcccggctcccgccccgctccgccctccccacgtgtgcgccgcagtcggccgcctcccgccgctgcccctcccggccggcgcgacctcggggacccctcccggagctcggcgcccggtgccctcggccccgccccggctggccagccccgcgcgctggagggtcccgcgaacccgcgccctgcgcactccgagccctccttccttgcggttcggaaggcgttgctcccgctggcctcgtccggtcgccctggcgggagggtccaagggagagagggggcgcgagccataatcagcatattcttgacgagggagtgatgcctagggatggaaatggggggagaggcgtagggtatccgaatgggacagagtcctagttggagagtttgtttaactattcatttgttcaactatttcttgaacaaatgaatggcagcaggagagcgtatcgcccaggcccccttcccttgaggtctttacgtgccaccccacagtgttgtggggaggggataaagaggccgcctacgttcagttcatgcaccgcctttagccgcccgtaggaagtgagctgcgtgtagcagccgcaccagcctgtggaactaagggggagtgtcatattactatttgttagtttccatttcttaggtgggtcattccctcctcgcttacccttgacaactgaaaatatttgtcatgcttaccgtgtttctgaaagcacacaatcactgtgcataccctgtggttcaaatcatatagtttcaaaagaagtgacttttgctgggaaattatttagacagaaacagattgctttgttgatcacctgttttatttctaaagcagccagcatatttaggctcactgtttttggtaagaagaacttatttttctgacttaagccgtgtatcagttgaaacaaagtgctgatcatttaaggttttggtccagggttttggaaattgtaacaatctcttcatcatttgatgtgcaacaggtgttgagaaaactgcatctatatttggatacatgccatttctgttaagtagcgacctctttttctccactccagtgacctaaatagttcctacaaatagagtagctatcactacaggaaatatgttaaatccaggcctccagatacactgcgaatgaattccacaaaacaaatatactgtgtattgaaatgtcgttctagataataaattgagtgtgaagaaagtaatttcaaaattgctttatttggtgcttatggacaagacaaaaatagaattaaatatgtcaccgtcacccagacactcaaaatgaaccatagctgtattacagtaactggcaccttgaaagatgacaaatgtcacatttaaggtctcagtaatactgtctagtttttaggtactagggataataaagtgttatggccaagtggtacaagagtgggaagcggtactgttgaaacatacaaagaagaaaggcatatatttttgta

SEQ ID NO: 1886167 - DNA, 4001 bp, Homo sapiens; identical to SEQ ID NO: 1242294

SEQ ID NO: 1886168 - DNA, 4001 bp, Homo sapiens; identical to SEQ ID NO: 1242301

SEQ ID NO: 1886169 - DNA, 4001 bp, Homo sapiens; identical to SEQ ID NO: 1242302

SEQ ID NO: 1886170 - DNA, 4001 bp, Homo sapiens; identical to SEQ ID NO: 1242301

SEQ ID NO: 1886171 - DNA, 4001 bp, Homo sapiens; identical to SEQ ID NO: 1242302

SEQ ID NO: 1886172 - DNA, 4001 bp, Homo sapiens; identical to SEQ ID NO: 1242305

SEQ ID NO: 1886173 - DNA, 4001 bp, Homo sapiens; identical to SEQ ID NO: 1242306

SEQ ID NO: 1886174 - DNA, 4001 bp, Homo sapiens
cagggatagagaatggaacagttggccaaggctgcagctagttttgatcactgaaactggcttcctactccagcatgtttttcaaattacgtggctggtggtgcttctacctttaaaagtgggtgtgtgtcactctggctgattgctggacagaggtccagctttctctttttcgcttgttcaaccaaggcccattttatctgaggcttaaatgtacctgcctatctgtgtggctagtcctaggtaggttcgtctggtttgggttgctatggctgatagactccaccaggcagcaccaaagccggtaaactaacctctgctaatatctgtctttctcaatagccattcatgctttatcttttgctgctctaccatgtgctccagcatgagatcaaatcaccagcaggttacaaggcctcagccccagggattggtagatatatgttctggcccattgttttataaagggctcaagagaccaaagcttgttgcctacttaccttgacaactctaaagtagctctgtgaagtagagtcatgcctcgcttaatgacagggatatgttctgagaatgtggggcaatttcattgtgcacatatcagagtgtacttaacagtcctagacagaacagcctacacacctaaactatatggtatggcgttttcctcctaggctacaaacctgggcagcatgttacagaaagaatactgtaggcaattgtgggtttttttgattcaggctattcctgggatactgtaggcaattgtaacgcaatggtaagtatttgtgtatctaaacatagaaaaggtacagtaaaaatatggtataatcttatgggaccaccatagtgtatgtggcctgtcgttaactgaaacatcattatgcagtgcatgactgtatgaaggatttctcttctgtgaggtgtaacagaatggactggctgaggaaaaaggggtcacgggcatgcgtgcacatgcactctgtctgtgactaatagaatggtgctcagagttcctcaccttttactcctaacgcagcctattgcaggctagggatctcagagaaactaccttcaagggaccttttgctgacacttaaccaaacttagaagggtgggccatgtgtaagagaggcagtatggccactgatgttatttatttttcaacagcgagaactttcaaaggcttccaaatctgatgctacttctggaatcctcaattcaaccaacatccagtcctgagaagccctgatcagtcaaccagctgtggcttcctgtgcctagactggacctaattatatgggggtgactttagtttttcttcagcttaggcgtgcttgaaaccttggccaggttccatgaccatgggcctaacttaaagatgtgaatgagtgttacagttgaaagcccatcataggtttagtggtcctaggagacttggttttgacttatatacatgaaaagtttatggcaagaagtgcaaattttagcatatggggcctgacttctctaccacataattctacttgctgaagcatgatcaaagcttgttttatttcaccactgtaggaaaatgattgactatgcccatccctgggggtaattttggcatgtatacctgtaactagtaattaacatcttttttgtttaggcatgttcaattaatgctgtagctatcatagctttgctcttacctgaagccttgtccccaccacacaggacagccttcctcctgaagagaatgtctttgtgtgtccgaagttgagatggcctgccctactgccaaagaggtgacaggaaggctgggagcagctttgttaaattgtgttcagttctgttacacagtgcattgccctttgttgggggtatgcatgtatgaacacacatgcttgtcggaacgctttctcggcgtttgtcccttggctctcatctcccccattcctgtgcctactttgcctgagttcttctacccccgcagttgccagccacattgggagtctgtttgttccaatgggttgagctgtctttgtcgtggagatctggaactttgcacatgtcactactggggaggtgttcctgctctagcttccacgatgaggcgccctctttacctatcctctcaatcactactcttcttgaagcactattatttattcttccgctgtctgcctgcagcagtactactgtcaacatagtgtaaatggttctcaaaagcttaccagtgtggacttggtgttagccacgctgtttactcatacagtacgtgtcctgtttttaaaatatacaattattcttaaaaataaattaaaatctgtatacttacatttcaaaaagatatagtgtggtgtttcctttttttccccagtcactttttagttggttggtctgtgtgtgaaaaacaaacacaaaaaactaaaaggacctcctggaaatttttagtcaggagtgtgatttttttttttgagtctcactctgtcgcccaggctggagtacagtggcactatcttggttcagtgcaacttccacctcccaggttcaagcgattctcctgcctcagcctcccgatttgctgggattacaggcacgcaccatcacacctggctaatttttgtatttttagtagagacaggctttcaccatgttggccaggctggtcttgaactcctgacctcagatgatctgcctgcctcccaaagtgctgggatgacaggcatgagccacagcacccggccgagtgtgatttttaaaatattctctggtacatttctaaattaagaatatctcttactctaattttttggtgagaaatataaaacctaacccctgatgtgtagagagcaaagggagtcctaggatgcttctggcttcaatgccgtttgtctcaatatggggaggctgcccaacttcaacagcgttactgaaggaggatggacataaactgcacacatgtgaagcgtaagagaaaaaccatcgccacagtccagttaaccaagtctctctaccccagcagttcttcccacccctttctcactcctccttcccagcctcaccctgccgagcaaccactgatttttttttttttttttttttttttttttgagatggagtctcgctcttgccaggctggagtgcagtggcacaatctcagctcactgcaatctctgcctcccaggttcaagggattctcctgcctcagcctcccgcgtagctgggactgcaggcacgtgccatcacgcctggtaaatttttgtatttttggtacagacagacagggtttcactgtattagctaggatggtctcgatctcctgacctcatgatccgcccacctcggcctcccaaagtgctaggactacaggcatgagccactgtacctggcccaccgatttgttactacagattagtttgcgttttctacagttcgatgtaagtagaatcatacagtatatatttttttggtctggttctttcactactttcagatttacccatattgttgcttatatccataattcttttttttttttttttttttttttttttttttttttgcttagtattccatggtgttgatataccagtttattcgcctgttaggtttatttttcacatttggcttttctccagtttttggctattaaaaacaaggctgttataaacattcatgtacaagtctttgtatggatatatttttttttctggataaatacctaggagtgaaatggctggatcacatctatggtatgtgtacacttaactttttaagaaatgccaaactgggccgggcatggtggctcacgcctgtaatcccagcactttgggaggctaaggtgggcagatcacgaggtcaggagttcgagaccagcctggccaacatggtgaaaccccatctctactaaaaatacaaaaattagctggctgtggtggcacacacctgtaatctcagctattcaggaggctgaggaaggagaattccttgaactcaggaggcggaagtggcagtga

SEQ ID NO: 1886175 - DNA, 4001 bp, Homo sapiens
acgggcggatgacttccttccagacgcagatgagggacgggcggatgacttccttccagacgcagatgagggacgggcggatgattccttcaggacgcagatgagggacgggtggatgacttccttccagacgcagatgaggaacgggtggatgacttccttcgggacgccgatgaggaacgggtggatgattccttcaggacgcagatgaggaacgggcggatgacttccttcgggacgccgatgaggaacgggtggatgattccttcaggacgcagatgagggacgggtggatgacttccttccagacgcagatgagggacgggcggatgacttccttccagacgcagatgagggacgggcggatgacttccttccagacgcagatgagggacgggcggatgattccttcaggacgcagatgagggacgggcggatgacttccttccagacgcagatgagggacgggcggatgacttccttccagacgcagatgagggacgggcggatgattccttccggacgcagatgagggacgggcggatgacttccttcgggacgccgatgaggaacgggtggatgattccttcaggacgcagatgaggaacgggcggatgacttccttccagacgcagatgaggaaagggcggatgacttccttcaggacgcagatgagggacgggcggatgacttccttccagacgcagatgagggacgggcggatgattccttccggacgcagatgagggacgggcggatgacttccttccggacgcagatgagcgacgggtggatgacttccttccagacgcagatgagggatgggcggatgacttccttccggacgcagatgaggaacgagcagatgacttccttccggacgcagatgaggaacgagcagatgacttccttccagacgcagatgagggacgggcggatgacttccttccggacgcagatgagggacgggcggatgacttccttccggacgcagatgagggacgggctgatgacttccttccggacacagatgagggacgggcggatgacttccttccggacgcagatgagggacgggcggatgattccttcgggacgcagatgagggacgggcggatgacttccttccggacgcagatgagggacgggcggatgacttccttccggacgcagatgagcgacgggcggatgacttccttccggacgcagatgagggacgggcggatgacttccttccggacgcagatgagggacgggcggatgacttccttccggacgcagatgagcgacgggcggatgacttccttccggacgcagatgaggaagggattccttccggacgcagatgagggacgggcggatgattccttccggacacacctctcaatgtgcacgtgctgctcctgccaggcggatgacatcaggaatgctcatcaacttgagggcgaagaaatgcttggcggtcttctccttcaccgggtgcacccgcccgaacgtcccagtgcccacggtggccagtgtgtcgaagtcctgcaggcggtgggcaggcggctccggcgaccaggccttggggctggggcagaatgcgggtgcccagccgggggtctcctcccacacctctcgggggtcgctctccgccacggccgcctgggccagtcggggctcctccatgcggacacactcaggtccggggcaccgggccaggccggagcgctcgggtagccgggcttcccgggacgcagcctcggagggcggcgtggtggtggcatcaacggaggctccccatgcgtgccctcgcctcccagcgcgcggcccggcgcagctgacaacgcccccgggtgggagcagctgccggcctcgtcggggggtgggcactgagtgccgcgcagcagcggggaagatggggcccgtggcccaggctgtgggggcagggagggggccctgcgcattcccagtctcgcgcccgccgcctcctccagcttggtagccgccagcgtgctctacggtgtttttgtttgttttttaccagctgattcacaactcaagtagcacagtgaaggtggacaatttggactgcctaagcatcccagcatcgtctgttctacatatcactattccaaatggcatgctgctgtgtttgtgaatccagcctcccacattgggtatgtcaccattggcctataacaactggaatgacacatcttcactagaggcaggccttggccatcctccacagcagactattgagtaacaaaataagcagtactatttatttacttcttactatgctgtttaaaaaaaaagcctctgatgaaatcctggtggcttcttctctgttcttaccaatccaggaagtgtagagagctgttgagccctgtttccaaatccccaggtgaagctgcgctgacatgccttctgtccatacagccctttccaagactcagctatttgtgatcacccccaaatgttaccctgattctattaccaatttgtaataaaactcacttgtatggtggaaaggctgttgccaattaattttattttcgtcacccattttcccttccatgtaatcgtcaaattgtttattgtacatattaaaaatgacacacaatcaagagggcatatgctatattcaagcaaagaatgctatgtgagccacgcgtggtggctcacgcctgtaatgccagcactttgggaggccaaggggggtggatcaattgaggtcaggggtttgagaccagcctggccaacacagtgaaaccccatttctactaaaaatacaaaaaaaaaaaatacccggacatggtggtgcacgcttgtaatcctagctacttgggaggctgaggcaggagaattacttgaacccaggaggtggagattgcagtgagccaagattgcaccactgcactccagtctgggcaacagaatgagatgccatctcaaaaaaaaaaaaaatgctatgcgatacaaaaatgatgtacttgtcaatagtccagtgagtcaggggaaccctttctctttattgtggagaaaaatagcacaatcagaaaaaaaattaaaagataattttcaggaaaactgacagttaaaaatccaattctgttttacacaagtagtcttttgtgttttgcagaaaaacaaatatctgttgatttggagatggacaatatatggtccttagcaaataaaagaagtttagctgtggggaaacctgcacttcctcataatttattgaatagcttaaaaagatgtcatcagcaattataagtgtgcttctggggtgcttacttcacaggcctcaaagggagaaatgagtctgacaggaggcttgaggcacttaaaaaacacacagacattctgattgccacccctagaaagtgcctttttttttttttaaagttacaaaatatgaaatgcttcataaatttacatgtcatccttgagcaggggccatgctaatcttctctgtatcattccaattttagtatatgtgctgccaatataagcatagaaagtgcttttcagatggccaggcacagtggctcatgcctgtaatcccagcactttgggaggcctaggtgggcagatcacctgaggtcaggagttagagaccagcctgaccaacactaagaaaccctgtctctactaaaaatacaaaattagctgggtgtggtggtgcatgcctgtaataccagctgcttggtaggcagaggcaggagaattgcttgaacccaggaggtggaggttgtggtgagccaggatagtgccattgcacatttttcaggtaaaaccatgcttcaactctactgccttcaatgattgggtaggctctaccaaacagcaaacacctgagccattctcactggaaagaaaatcacaggcagatcacattccatatctcaatgcttctaaatatcagagaactgctgggacagtggtgtgtgcctgtaatctcagctacttgggaggctgaggcaggaggatcctttgagcccaggagt

SEQ ID NO: 1886176 - DNA, 4001 bp, Homo sapiens
atgaagtgtgtggctgggacacagcaagaccacaataaagggtaacgacgggacaggattatcacatttacttctgtgcctgtcattcagtacagaacataaatcagccctgaatgggaaggggttgtgtcaattgaagcacatacagtattgcataatcttcatttatgatgttaaaaaaatagatccattataacttcaaaagttaaatctcatggtttcagctatgaactttctccagatacgagtctctctttcatggaggtcataactacaagaaacttcccacagcaagtagggaacaaatccctttgcccatttattcagtcattcacaattttggtgacttattcaatagacgaacattgctgtgacatcttctctatgccaggtattgtaccagaaacaagaacaccaccctctcctcgctgctttcgtggaactcagcatggtgttgacagccagtgtgaggctggcaatgcctctttgccctctggatcatatttacctgcgtctctgatactcacctcctcaaagaggaggtatcacccaccacataccaaactccatggatgttcaagtcccttatataagatgtagtgtattatttgcatatgatccacatgcatcctcctatatactttaatctctagattacttatcatatctaatgcagtgtcaatgctatgataaatagttgtcatactgcattgtttagggaataatgataagaaaaaaagtttgtgcctgttcagtacagatgcaaccatatttttaaagaatatttttgatccatgattggatgaatccacaaatgtgaaacccattgatacggagggtcaacagtatatacatatacacacacacacacaaatacacatacatacacatatgtggctgactgtatatgtaatctatattattacccactccttcaatcatttgataaaccattcaaaatgctaaaaattgcatttacttagcacataccatgatcagaaaatacaggaagctctgacatcaggatatgaaaaagacaatctcaaagagctcatagtttatcaaggatgaagaaaacagtgacagtaattaaaatgaaaataactggatgaaattacaaaccagttccaaacctgacgacgcaatttctttctgaagtcttatgtgaaagataacttttctcatttttttccctcaatttacacctttaaccttgttagtgatgaatctgacatttctccacaccagggtagaggatcagtgcagagcatgttgaagagcgttccctgtggtctttgccatggctagttatggctggcctctacactagctatggctccctctgcaggatctttaggagatgacccagagacagaagatacccagcactgccatttttaattgcagttaaatataacaggcagttggtactattttccctggggcccacccaggacactagtaactgcttcttcaagttgagttgctaatactgcatttttatgcctgaggctcatattttaaaaatctgtactctaactacaatgagagaaacagatggccccaacgttttccttcaagtggtactattttgatatatcaggatgaaactttttcacttgtggtacaggctaataaccttcttatatatcagataggtagtttctttgtcaaatttgttcattttacagatattaagaggagaaaggctaatttaattttacacacccaattctacaacagcctgaaaatagcatcagtaaggtagaggacaggaaggtagggtgggtgtgggggctcacacataactcagtggaaagaaacaagaagaaaaagaaacaataatttatatgcctaacattctttatgttcctcttctagttcctccaaggaaatcctaccatatgcccacattccacatggaccaaggcaggcgttccactggggagctggcaattattttgagattataccgaagtagtgcatgaacatagccttgtggatatcatggcctgaagtcttagagtcttcaccaaaaaagataatgatgtatatgggtgtgggcagctattcatgatggtgctgctacaaagaattaagtaccatttccagctgtccttctgaaagcagagaatagcccacaactttgtggaggcaccttttctgcctataacatgtaaggagcctgaaggtcaggtggtaatgaaactagaaaatctgcaatagccatattcttcccaagccacagtaagatgagagaagccattaccaatgcctccaggcatacactagtttcctgaaaggagggcacatgccacaggcccttaaagacagtccatttaggaggttatcacctccagaaggaagcctgaagccaagggaaaaaaattttttttttctctaaacctgaagtcataacttaggtacattgattagaaatggtgcctgataatatttcatatcccaataagttccctcaaccaaattgcctggaagcctggtgcttcaaaggaattgtgtatgcagattggaaacctaaagcctaaccaacaaaacaacagcaattctctgaggctctgataaaagcctaagtcataatagtccacaaaaaaggggctttctaccactgctacagcttctaagacccctagaaaacggagcgcttccataagcaaagcgggagcagctggataaaccaacaaatgaactccttccttgaaggagggcttgttgctgcccaccaggcaccagtgtttatttggggtacgtgggattgtttgatagtgtgagctggtggtataaatgttaactcacatctatgggaataaagacttgtgttagagtacctggcaccctagtggtggtggcagcacttacactttatgtaagtgtactttactttgacactttatataaagtgtctggcctggacatgtttgcaacaaactccctttccctgactcccacggaatatttcattccagaccatgaagtcctaggggagctggtaatcatagtgagggaaaaggacaggaaaaattacttgagtaaacagctaagagactagtcctcagagaagctgtctgcctgaaaaaatcacagctacaggcaaaaacagagcagccaggggaaactcaggctatagctgcacagataagccatagataagcaggcaggcaaagtctggcatggaagccctttattctttgtatgattaacaagctcccagcaaaaagtttccttcccttttcagatatgtacatggtgggctccctggaagcctgcacagaaaggagggggcttacctaaaacaaaccctcagttacacaaacaaaaataagcggcgctttgtgcttgcctagagacatacccacagctgcataagataaggggagttgtacagacagctttgctgataagagaagttactcaaagtgctacagagatgagaggagtttcttaaaaaagcttttgaatgactgtaaaaacggcaatccacttggactcccctctctgctgcagagagctttcttctttcgcttactaaacttttgctccaaccaacctcaccctgtgtccatactccttaattttcttggttgtgagaccatgagctcagataacaccttggacaatgagaccagtgaccctgaccttttcattagggtacattgcctccattggggatatgaccagacctatcctgagttattcccaggtcagtgaatgtcttagtgactcaagccttgtccatctcttcacccaccaacttttacatggacaaggaggagggaaggaggacacatcctaccaagattgcaaggcaggtaataattgcatctagggcttcaaatgatccctttgcaaattcacataaagaaaaagtgactgaagatttaagccaaaccaagaaatggagaactaagagataagggagcaaacggtcatatgtgtctttaaattctggactactggactccattaagcctgacgccagaccc

SEQ ID NO: 1886177 - DNA, 4001 bp, Homo sapiens
tcaccacctctcttcagaacaatataaggttctcgacactgactgaacccaaggcaccttccctccctgcacatgcatccagcaggaccatgatatactcaccacagctcagtgcaggaggccaggatgccaggaaaggcctgagcttcagtgcaccaggggctgggaaactggctgacagacactggcccagggccattgggcccaatgcaaatcttcctccaggctcaccatctggggggacaggaggaggatatgtgtccaaatagggcctcacatctccatgtggagaagggatcccctgtaatgggttctatgtggaacagacccatcacagatgcagggcacccttggccctccccatcaccaaaccctgagaaacaaggcaggctggtcattgggtttgggccagatacctgggctgagccatacttccgttccggagagcacctccactgccctcaccagctcccctgcatgatcccagggttgccctgtgaccactgggcatgggccatggccaccaacccgctcccagccaaccaaggagggtagcctggaagctatgcaccgttgcagacctggcagtcacatagcctgcctctgggcgtggtgggcacccactgaggagccctccccaagtgtgcactaaaaatcacagcctggggacctgggccatgagctttcactggtgggaccccattcatatcccacacctctcaaacacagagctgggccacactcggccaatcaagggccacatggtatcttctcgtttccttgggcccaagatcccgagaccctggaggtgaccccttggctaagaaggcggggtggcaaattcccggtacaacaccctagacagtggaccttcccacctcagaatgccactgttactgccactcaaacatggagaacaggtgacccccatgggacatgggatgcccccttagcccaaagcccatgggtcacaggactggcctgaagcaccaccaggagctggccagatctcaaccttgacccaaccccattgaaactgcaccacccctgaccaggctcaatacgtgccactgggatggcccattgttcaacaggatcagccccattcagggtcacaggtgggatgagatccttgaacctccatggcccgaccccatcaccaccccccccaggaacatgcccggggaccgagagctcccaagtgaaacccgtggcaccctggagcccttctggcccgcctcatgtggcctgggcagtcctcaaggcctgacctgcacaccaagtctcaactgggcgatgtcctgcatggggctgaaggaaccctttgctatctggaccattgtcattcctgcagatcttcagggaaggcatcctcctcaggtaagattcccaaggaagccgccctcctggagaaaccatccctccctgatgggaattggggtcagctccctgaggaaaccctcatggcctgaagtctgaccctcagtgaacccatgcccatgatgccagcaggatccactcacctatgttggtcaatgccaggaggcccccccttggcagaagagctcactgaaagacacaaggggagaactggggctcagggaggagccacccacgtgccacttcactggggaacagaaaggccaacaccaagcccgcacagggagcctgggctgcctcacagaggagtgcagagacagagttgggcctcctccagatacctttcagggcctccagggctccagcccaaaatacagtggccctgccggaaatctcgggatcccagcatcctcctccaaatttctcacctaggttgggcctcagcgtaatcattgagcatggtaattttaagtcatcacctctcttcaacacaatatagggttctcatcattgacccaacccagggcaccccccctgcccacacatacatccagcgggacccggatgtgctcaccacagctcagtgcaggagatcaaggggccaggaagggcctgagcttcagtgcaccaggggctgagcacctggctgacggacacttgccagggtccattggtcctgatgcaagtcttccttcaggctcaccatctggatggacaggaggaggacatgtgtccaaacagggcctcatacctccaggtggggaatggggtaagggatacccatgtgatgggatccatgtggaacactgacctgtcacggatacagggcactctcggccctccccatcaccaaaccctgaaaaaacagggcaggtggatcactgggcttgggcaagacccctggtcttcatgctattgcagaccttgagggcacatccagtgccccctctgacttctccttcacacgatcccagggctgccccaggaccactgagcatgggacagggtcaccgacatgctcatggccaaccgaggagcctggcccagaagccatgtgccaccgtggacatggaagttgcatagcctgccgctgggcatggtgggcacctgcccaggcactctctccaagccacacctgaaatcacagcctggagtaccagggccatgtgctttctctggtgggtccccatccatgccccacacatgtcccaaacacagatccgggccacccttggccaatcctgggccacatggtgtcctttcctttccctaggcccaagaccctgccaccctggacatgaccccatggcacagagagtctgggcagcaaattctcaggataggaccatcaacagcgggccttcccaccgcacattccactcttccagccactcacccatggggaaggggtgacctccagcaggacacaagctgtcgacttggcctaaagctcacgagtcccaggtccggcccacagcctcaccaggcactggccagagctcagccttgacccaaacccagggaaacagcactgccccccaccaagctcaaagaggcaccatgggatggtccatagctcaacagggtcagtcccattttgggacatagttgggtacaatccttgaatctccacggcccaatcccataggctcattcaagcacccctctccagggaaagagaactcttgcatgacccccgtggtgccccggaggccctgtggcccccatcatgtggcctcggcaatcctcgaggcctgacacatgcactgagtctcagctgggagctctcctgcacggggctgaaggaagtctttgctgcctggaccactgtcatccctgcagggcttcaggaaggcaacatcttgggtccagttcccaaggaagccgccctcctgtagaaaccatccctccccggtggaaatacaggttggctccctgaggaaaccctcctgtcctaaagactgacccttggtgaccccacgcggcctgactcatggcccatgacaccagcaggatgcactcacctaggctaatcaaggtgaaggggcccttctgagctgaagagctcactgaaagacacaaggcaagaatggggactcagggaaaagccaccaatgtgccctgcccctgggaaacagtgccaacaccaagtccgcacagggagcctgctgtgcttcacggaggagtgcagagacagggttgggtccctgtgagaggcccttgagggcctccaggtctccagcccaaaatacagtggccctgccagggtccttgtgattctcagtgtccacttccaaaattgtcacctaggctgggactcagcgtaatcctattgagcatgatttttaagtcatcacctctcttcaggacaatataaggttctcatcattgacccaacccagtgcaccccgctccccatgcatacatccagaagaacccggatgggctcaccagctccatgaaggagaccagggtgccaggaagggcccaagcttcagtacaaaaggacctgggcacctggttgatggcctctggccggcgcacagaaggcccagtgcaagtcttcctccaggctcaccatctggggggacaggaggagggcccatgtgatgggattcaca

SEQ ID NO: 1886178 - DNA, 4001 bp, Homo sapiens
tgcacacacgcacatacacgtgtcatctcttccagagattcttattttcaggggatttattttaagtcatctgtgaagtatcaccccacaaatgaggttgtttggatgggctgggccagcaactaccactgcattctctaagttgcaccaaacatctgaaggtaaaagaccccctgtcaacactacacctcaacatatctggcactaattccctatttttctcacttaactgcttatttctaatctaattcagttagtaggaaaggaaaaactcatttttctcaattcatccaacatatcgctaactgcctggatcaagaacactaagagaaccaaacaaatctgagaggttataaatacactaacatttctaccagaagaacagagactcaaaggcaagaactataaaataacttatctacctcacttttagaagaatgttcatttctctgaaccccaacagcttttcactataaaccagtcatttgtcatgtgatcacagtatcaacacccacatcattaatatgtacatatgtatacacaaacacataacacatacagaatttatcaactaagataacaactagagaataagatcttgctatattcaatgttcatggtatatttaatataggcttttctaaattaccttcttattcaccattcctccttcataataacgacttataggcaaagcaaaagcacctactcatagaatgtcaatcacagataatgaaagacccatcaatcatacaagcaaaaaatagagtacagaataatgtgagattagagatgtgattcaaaaattgcatggtgtttagcaaatcttttaatctccgtggggctcagcatcaaaaactatataatgccaatttcatcaccttaactgaatctaagagtcaaaattaaatctccacctacgtcttgtaaagatacagcaaagggttaacttaattaaaagtagaattaaattaatctctggaaatgtaacttaagcattctgctaaatatataaattacgtctcctctcaaaccaatgtctcagccacaaactagcaatttctcaattatatgccaaatggagaagctgcctcagtgacagaaacatgctcatgaaactttcatatagggttggaaccgggtgatgcaagcaacagggttaaaaaaaaaaagagcataggagctcctaagtacttattctcttgaaatgatcacttgaaatgcatagtagaaataagcaaaggtgtggctgggtacggtggctcacgcatgtaatcccagcactttgtggggctgaggcgggtggatcacttagagaccaacctggcaaacatggcaaagcctgtctccacaaaagcatacaaaaattagccgggcatgttggcacatgcttgtaatcccagctactctggaggctgagacaagaagtgcttgaatgcaagaggcggaggttgcggtgagccaagatcatgccaaagatgagacataccaatgcagtgaacatagaacacactctacaaaacattaactgtactaaaggatctagaaccaacttccttgtattgcactggaaaaacctacaacacgccattatccttaacctgtactgataggaaaaaccatgtgaaatttagagtctaagaatttatgttttgagtatttgtatcctgagtccttagactgacagtaaggctggacttcagagtaatcacgttgagctttacttcatcatgctcagtaaacacagctcatcacaaatccagcccaggtctttcccaatgtctttcccatcaactagtaaaaatacgtaaaaaaataaattcctgcagatagtgtatctctacccataaggacagtccctggcctggaagaataaatgataagagttttatgtgacaatggatataaaacaacagtaacaacaacagtgtcattcaaagcacacagaattaaggggaattatgaagaaaaagacacacacagcaatctacatgaaggaaacaaacgcgggcgcgcatacacacacacacacacacacacacacacacacacacacagagagagagagagagagagagagagacagcaatctgccagtcgggtctcacagagctaaatacaatgactatttccactagcaaactgtccaaagaactgaaacagaaatacactaatgccaccacagatactatcgacaacttgctattctccccaataattaaatgtaaaccaattttaggactagagtacactgaaaacatgcatcaaaaaattctagagttaagtgtaaacaaatggtatagaaagacagaggacagacaaataaaatcaaggctggcacaacgtaagaaacacaaagtccaaagaaaggattctgaaggaggtctaaactactaacttctctgacaagaaaccaaagtagcacagtaatgcaatccagattttctcatgagaacccacactattattcctgatacatatctccgaaacatgaaatcatagatttcaggaactgtatcatttcaactcaatttttgctaccaaagaacaaatgatgtaacataaaatgaaaatatctatacaaacaaaacatccaaaagacaggaaacagcccgaacaattcagatgtacaacctaaccctcaaggtcactgtattctcattagttcaacagaaaatgattcacattaactaaacatcaagttcaaatgtgagcctccttcttgattcttgggcacttagtatggacctcgctttttaagttgaatcggctcagcaaagcaaattaacccagccaagtttttcctactaatcatttctacactgtactagttcttaaaactcatgggcaagcaggcattgtgaaaaaggattccagtgacccacacagatgatactgaaagtggaagagctagaagaactgtttctccatgtctgcaacccccttcttattgtacaaccacctgatccctttatcaacatatacttctacaacattccccacctctttactttatattggcttaataaatacatcctttgaactttatatctcatttttttctttttttttccagacggagtctcactctgtcacccaggctggagtgcagtggcatggtctcggctcactgcaacctttgccgcccaggttcaagtgattctcctgcctcagcctcctgagtagctgggattacagacacacaccaccaagcttgggtaatttttgtatctttgagacagggtattgctatgttggccaggctagtctcaaactcctgatgtcaggtgatccacccaactcagcctcccaaagtgctgggattacaggcttgagccaccatacctggtctcaaatatttctattgaattaaatgttccccatctcaccatgcaagagaggacttctcactcctgtaaactcaaatagcagttgctgatttctattttttttttttaccttgagatgggagtctcacctctgtcactcaagctgaatggagtgccattggcgcgatctcggctcactgcaacctccgcctcccgggttcaagcaattctcctgccttagcctcctgcgtagttgggattacaggtgcctgccaccacgccaggctaatttttgtatttttagtagaggtagggtttcgccatgttggccaggctgggctcgaactcctgacctcaggtgatccacccgcctcaacctcccaaagtgccgggattacaggcattttaacaacaaccaaataaccccaaaaccatacccaaaaatacactgtaaatatcatcgcaaggtagtaaacaagtgctggtaaacactaagtaactcaaatgacctctatctgggaatggctgactacacggtataaacgtatggagtcagatatcagataggcctagattctgatgagatattgtcataaggaagtaactataaaatacctaaaaacttgttttctaacataaaaaaaattagtacctggcacagtggctcacacc

SEQ ID NO: 1886179 - DNA, 4001 bp, Homo sapiens
aaggattccagtgacccacacagatgatactgaaagtggaagagctagaagaactgtttctccatgtctgcaacccccttcttattgtacaaccacctgatccctttatcaacatatacttctacaacattccccacctctttactttatattggcttaataaatacatcctttgaactttatatctcatttttttctttttttttccagacggagtctcactctgtcacccaggctggagtgcagtggcatggtctcggctcactgcaacctttgccgcccaggttcaagtgattctcctgcctcagcctcctgagtagctgggattacagacacacaccaccaagcttgggtaatttttgtatctttgagacagggtattgctatgttggccaggctagtctcaaactcctgatgtcaggtgatccacccaactcagcctcccaaagtgctgggattacaggcttgagccaccatacctggtctcaaatatttctattgaattaaatgttccccatctcaccatgcaagagaggacttctcactcctgtaaactcaaatagcagttgctgatttctattttttttttttaccttgagatgggagtctcacctctgtcactcaagctgaatggagtgccattggcgcgatctcggctcactgcaacctccgcctcccgggttcaagcaattctcctgccttagcctcctgcgtagttgggattacaggtgcctgccaccacgccaggctaatttttgtatttttagtagaggtagggtttcgccatgttggccaggctgggctcgaactcctgacctcaggtgatccacccgcctcaacctcccaaagtgccgggattacaggcattttaacaacaaccaaataaccccaaaaccatacccaaaaatacactgtaaatatcatcgcaaggtagtaaacaagtgctggtaaacactaagtaactcaaatgacctctatctgggaatggctgactacacggtataaacgtatggagtcagatatcagataggcctagattctgatgagatattgtcataaggaagtaactataaaatacctaaaaacttgttttctaacataaaaaaaattagtacctggcacagtggctcacacctacaataccagctgaggcaagaggatggcatgaggccaggagttcaagaccagtctaagcaacatagtgagatcccaactctaaaaaaattagaaaactaaaattagccaggcatgttgacacgcgactgtagtcccagctactctggaggataaggtgaaaggatcgtttgagctcaggtgttcaaggctgcagtgagttatgttaatgccactgaactccagcctggactgtgagatactgtctcactatacaaaaattagcaatgctgcctcattcattcacttaatatttcttaaacatctattgtgtgataggctctgtacaagttaatcaactgcacacagctgaagaaaaaagaaaaaaaagcaactgtcctaaaaaaccaacagtattcatttaaaggcaggtactatactcactgtgttccataatatatgctccataaatattattcctcctccttcctggacatcacttagaaccctagaactctggcactttttttttttaatccgagaggtggtcgtctcatttttacacatccttgtttccatctcaccaaatgcctctgccttccgtgatccaaggataagtttccttttagctttcgacaacgtacaacatgtagaaaaaaaaaggaactcagaatatctatacaaataaaaaagggtatctgagcaactagcaaagtgcaatactacacctgccatttttaagtattcaaagttttcaaaacattttctgcagaaaatcttgaaatcgaaaagtctagtgaggcacactgactggatttcagagtgtcatttttaagctcaaattttgaaatcattatgttcagacaaggtcctgtgtcatcatgaacctagccaaggcctctgcaatatatgcttatttctctttataaggttattttacctgagcagtttacgtttctgtcctaaaagcacttaatatgattttcagcctcgttgtgacactactgagtaggatccacactgacgacacatcaaattttagcgatctgattctctcttcctttcagaggcatcaactaagtggtcaaaaaatggtatcgtatgacactgaaaaagttacaacacaaatatcctatttcaggctcagatgtcattctcccactacaaaaatcccatgaaaatataccttgctttattatatactaagcattattatgtgtatggacaagatgaagagaactgaaatgcaattataagacagaatcaagcaatgtattaactaccggaaaacatgcatttaaaaacttcaacccatggcggggtgcggtggctcacacctgtaatcccagcacttcgggaggctgagttgggcggatcacctgaggtcaggagtttgagaccaacctggccaacatggtgaaaccctgtctctaccaaaaatacaaaaattagccaggtgtggtggcccacacctgtaatcccagctactcaggaggctgaggcaggagaatcgcttcagcccggaaggcagaggctaaagtgagccaagatcacaccactgtactccagcttgcgcaacagagtgagactctgtctcaaataaataaataaataaatcaaaacttcaatccatggattataactgactacctgctgaaatcagtgaaggtagtatcagaggtaaacataccaggtaaagggtgtttttgctaatctttgaaatgagatcatgaaaatcctagtcaagcagcactatttcacataattatctatgtaaatcagtttctacttgtaatattctattacaagaatctataaaaagcaaaataccggtatgttaataacaaacttctgaaatttgacatcataattaaggaataatgagttcacaaaagcagggagctccctaagcaactttcaaaatctttttaattccaagccaagtttacctatcatataaaaagagaatacctcaaatacttcataacctattttaaggtagcataatttttatcccaaaattctatttgaaattattctataagctacaatgaaagcatgtcaaacatgatatgcaacatggatatatttaaggagccggttaataaaatgtgtatcaggaaatcagaaagttgttgaccaaccatgttttagatgagacatgtatgtattttcttttttttttttttttctttttttttgagacagagttttactctgtcgcccaggctggagtgcagtggcgcgatctcggctcactgcaagctccaccaggttcacaccattctcctgcctcaggctcccgagtagctgggactacaggtgcctgccaccacgcccggctaattttttgaattttttgtagagacgaggtttcaccgtgttagccaggatggtctcgatcttctgacctcgggatctgcctgcctcggcctcccaaagtgctgggattacaggcatgagccaccgcgcccagccacgtgtatgtagtttaatgcaagaatgtaggatgatttttaagtaacatcaagcattaactaccaagaatgttttaagactgatatgttgatgtgtgtccctagtggaaacacacagaagcttagactagcattccataacaaaagattcaccacactcaattatactatctatatcccaagttttctcctattatatcatcacaatcaggattctcaaaaagtccaggaagctccagacaaaagaaaatgtattatcaccaagcaaaataactacaagaagcaagcatcttgcagaatctagagctcttataacttacctttaactcatgtaacaggccatatttaattaaaaaggtcctgaaaacaggttttcttcaaataggctgcataatcactcatgccaaaatc

SEQ ID NO: 1886180 - DNA, 4001 bp, Homo sapiens
tcctgtaggcccctcaggaagaaattcagaataaagaatggcagagttcatttcatagatcccctttatctgaggtctatgtgccagtggatccatttggtagaggcgcagctttctgaacaacaactcagggacatatgctaagctttgatttttagtttccatagggaaccccatattcccatgactctccattccttgctactgttttaacttcttgcttgtgaagtggctcgtgtacttctcagaggtagagaggtgcctggaatttctgtgaagggactcaagattttcctttatttccatgcttcgggtggtacacaggcccctataaggggtccctgcaccttctcaggacctaaatgaatcctcatctgcttgtgggactcctgaatttcttctaccattttcttgtttttgtacggcttgctgctttcaggtaagaatattcctgttcaaccttggaggatgaatctcatcttcactggccaagacatttggatgactattcatatatgaattatgtcaagagtgccaaagttcggtataaaataatacacatcagttgatccactattatttaatagaaggtgggtatatactgactatgtcaatgaaaatggagatacaaatagttgccagcagaaaaatatttttaaaatattaagctaaatgagaaaaaataataaaatattttaacacccttcctaaaactgattgttacaaatatatttgctgaatagaacaaaattatgtgtacattttctaagtggcattttaaaaatttgtcactgagactatttattactgactcaatttcagagccattcttggtctgtttagggattcagttcctccctggttcagtcttgggagggtgtatttgtgcaggaatttttcattctttctagattttctagtttatgtccatggaggtgttcattacattctctgatggttgtttatatttctgtggggtcggtggtaatatcacccttgttgtttttatcaacaaggttttatcaaataaaaccaagattgcatttatttgaatcttctcaacgtcactcattactagagcaatgcaaatcaaaaacaacatcaaatacaatctaacacccgccagaatggctatattaaaaagtcaaatataagaaataacaaatggtcaaacaaataacagagactggcaagattgtggagaaaaaggaacacttatacaatgttggtgggagtgtaaattagtttaaccactgtggaagacagtgtggtgattcctaaaagacctaaagacagaacttccatttgacccaacaatcccatttctaagtatatatccaaaggaatataaatcactctgttataaagacacctgaacacatatgttcactgcagcactattcacaatagcaaaaacatggaatcaatctcaattgtccatcaacaatagactgtataaagaaaatgtggcacatatataccatggaatacaacgcagctataaagaagaaccagatgatgtctttgcagggacatgaatggagctgcagtccattattcttagcaagctaacacaggaacagaaaaccaaatacctccatgttctcttataagtgggagctaaatgatgagatcacatggacacatagaggggaacaacacactcagagttcctgaaaccatcggtctggtttccaatgaatggggcaatcagacacacaagcacaccaaggcttaaccatcctggccactggaagggaaagaaactacccaggaatgccacctgcttccaactagctgatcccatgataggggctctagggaatttctctttacctgccgagatgtttttgtcttggggaacttcctttctcttcttcccactgcaccagctgctgactacacttccttaccacatggcaagtgacatctgaagaggctgacagacttcagagctgggtaaggcaaccagaatacccctgaactgcctctgcctgttctgtgatgtcacctgagctctgctctgtttagatacagctgattgtgacatcatctgggcgtgtatgttatctgtatctatgtcaagacctgggctttgctccacttggagtcagctgattggcgggagggcatctgaaattgagaggaggtttcaggacttttacccagacctttagtggggatctgtccgggactgtgcagtctgaatctgcaactgtaaaagtgtacaatatctacatttaggcccccatctctgtctctctctcctcttccttctttcctctgcaaggtgatctgcataagccccactccatccaggatccagccctggagggaaacagcctccactgctctagcagggtcactctttttagggccctggagcacttctcacaacagtgccagtttttctggggaaaggaaggatgcgaactattccataggttatctaaagggcttgccaccatgcttatggtgcttaatgttgtttatgtgaaaaaaagcttaacagcatatgggataagtatttaggcagtcctgactccaacccctctgccctctttgtgtgcctaatttaccatttaatttgttgccattcagttaccctctactagggtactaagtacagcagaacatggacctgggatgaagttgatgtgctgttggggccggtcggggcgtggcggggcggtggtgggggagtgctgtgctagctggtgctaaccactagctgcccaaggagtttattctctgatctctttggctgtcccagctgtgtggtgagatttgcacaagtgttccttttaggaccatgagtggtactaattgcactacttataagaagctagaaaagtctttccaacccatagagctctggttgaaggatatgagcagtgtagaacagaagacagacaacaaataaaagttgtcatcactgtttcaacaggaatgagcagtatggatatagaaaccaagtcaggagggaaacaaggtctctatcccctctgggaggcccctggggcataccctagctaagtgtagatcctatagctatgagcccttgactaagagaaaaaccgtctattattgcagtgctgtttggactgtggacaagttaggttataaattttgacctctgaacggacgcaaccaatactagtctttaatgcagttagactcattttgtcagaggtctggaaaatcagaaaaaataccatatgtccaagcctgcacgctttttgaaaatcaggattcataccatgagggaagacgccagctgccagctgtaccaagggacagaatggaaaaaggactcttcacaagccagatagccaaactcaggcagaaagcaatgaagaagaattaggacttttaaatgtcctacacccaagctgttttagcagctccaaccaccacagccagaacgcacctggcctctgctccacccctaacagctcccactgcggtgggagccctatggggcccttagcattggcctctgcattggcccggattgccttgatgctaccaagcgaggcatcagaccaataagagggagctactctgccacctcagtataataagagaacagagatggcctctccctccagtgcttgacagggaacacgatttagcaaggaagtgccatggccggagcaagggaattaccatttacaaggacggccatgggtggcttggatgcgagtgggcaacctgtcagacattactggacatccagcccattttcaacatctaacttgtgaaacggaaaaactccaccccactttatagaatggatccccagaaaatgactgctctctatgtgtctatctgtgccacccaccagtgtacctgagcagatgtgtagtctctcctaaatatgcttctggctgcagaccaaagaagatccagagtcttggtgcctccatgaaacaaatccaaataccccaaacctgaaggcaccattctggatgcaaaccctaattggggctccaattgat

SEQ ID NO: 1886181 - DNA, 4001 bp, Homo sapiens
gaggcttcctgttttggtacccctttcctgagtccaaacaggaagaatgtttgtgaatattccagatgggccatgtccccttatcaattggagccccaattagggtttgcatccagaatggtcccttcaggtttggggtatttggatttgtttcatggaggcaccaagactctggaccttctttggtctgcagtcagaaacatatttaggagagactacacatctgctcaggtacgctggtgggtagcacagatagacacatagagatcagtcattttctggggatccattgtataaagtggggtggagtttttccatttcacaagttagatgttgaaaatgggctggatgtccagtaatgtctgacaggttgcccactctcatccaagccacccatggccatccctgtaaacggtaattcctttgctccggccatggcaattccttgctaaatcatgttccctgtcaagcactggagggagaggccgtctctgttctctcattatactgaggcggcagagtagctccctcttattggtctgatgcctcacttggtagcatcaaggcaatccggtccaacgcagaggccagtgctaagggccccgtatggtggtactgcagtgggagctgttgaggtggagcagaggccaggtgcgttctggctgtggtggttggagctgctaaaacagcttgggtgtaggacatttaaaagtcctaattcttcttcattgctttctgcctgagtttggctctctggcttgtgaagagccttttttccattctgtcctttggtatagctagcagctggcatcttccctcatggtatgaatcctgattttcgaaaagcatgaaggcttggacatatggtagtttttcctaattttccagacctctgacaaaatgagtctaactgcattaaaggctaatattggttgcgtccattcagaggtcaaaatttataacctaacttgtccacagtccaaacagcactgcaataatagaccatttttctgttagtcatgggctgatagctataggctctacagttagctagggtatgccccaggggcctcccagaggtgatagagaccttgtttcccctcctgacgtggtttctatgtccatactgctcatccctgtgaaacagtgatgacaacttttatttgttgtctctcttctgttctgcactgctcatatccttcaaccagacctctatgggttggaaagacgtttctagcttcatataagcagtgcaattaataccactcatggtcctaaaaggaagacttgtggaaatctcaccacacagctgggacagccaaagagaccagagaataaactagttgggcaggctagtgattagcaccagctagcacagcactcccccaccaccaccctgcccccgctccaccccctgccccggcccaccagcacatcaacttcatcccaagtccatgttctgctgtccttagtaccctagtagatggtaaccgaatggcaacaaattaaatggtaaattaggcagataaaaagggcagaggggttggagtcaggactgcctaaatacttatcccatatgctgttaagctttttttcacataaacaacattaagcaccataagcatggtggcaagccctttagataacctatggaattgttcacatccttcctttccccataaaaactggcacagctgtgagaagtactccagggccctaaaaagagtgaccctgctagggcagtggaggctgtttccctccagggccggatcctggatggagtggggcttatgcagatcaccctgcagaggaaaggaggaggaggagagagagacagagatgagggcctaaatgtagatattgtaccttttacagttgcaggttcagactgcacagtcccggacagatccccactaaagggctgggtaaacgtcctgaaatctcctctcaatttcagatgccctcctgtcaatcagctgactccaagtggagcaaagcccaggtcttgacgtagatacagataccatacatgcccagatgatgtcacaagcagctatatgtaaacagagcagaggtcaggtgacatcacagaacaggcagaggcagttcagggggtattctggttgccttacccagctctgaagtctgtcagcctcttcagatgtcacttgccctgtggtaaggaagtgtagttggcagctggtgcagtggcaagaagagaaaggaggttccccaagacagaaatatctcagcaggtaaagagaaattccctagagcctcaatcatgggatcagctagttggaagcaggtggcattcctgggtagtttctttcccttccagtgagcagagcggttaagccttggtgtgcttgtgtgtctgattgccccactcattggaaaccagaccaatggtttcaggaactctgagtgtgttcttcccctctatgtgtccatgtgttcttatcatttagctcccacttataagagaacatggagatatttggttttctattcctgtgttagcttgctaagaataatggactgcagctccattcacgtccctgcaaaggacatcatctggttgttccttatagctgcattgtattccatggtgtatatgtgccacattttctttatacagtctatcgttgatggacaatttagattgattccatgtttttgctattgtgtatattgctgcagtggacatatgtgttcatgtgtctttataacagaatgatttatattcctttggatatatacttagaaatgggattgttgggtcaaatggaagttctgtcattaggtcttttaggaatcatcacactgtcttccacaatggttaacctaatttacactcccaccaacattgtataagtgttcctttttctccacaatcttgccagcctctgttatttgtttgattatttgttatttgttattttttgactttttaatatatacgttctgactggtgttagatggtatttcattttggttttgatttgcgttactctaataatgagcgatgttgagaagattcaaataaatgcaatcagaaacaacaagggtgatattaccactgaccccacagaaatataaacaaccatcagagaatattatgaacacctccatggacataaattagaaaatctagaaagaatgaagaattcctgcacaaatacaccctcccaagactgaaccagagaggaactgaatccctgaacagaccaagaatggctctgaaattgaggcagtaataaatagtctcagtgacaaatttttaaaatgccacttagaaaatgtacacataattttgctctattcagcaaatatatctgtaacaatcacttttaggaaaggtgttaaaatattttattattttttctcatttagcttaacattttaaaaatacttttctgctggcaactatttatatctccattttcattgacatagtcaataatttacccacctttctattaaataatagtggatcaactgatgtgcattattttatactgaactttggcactcttgacataattcatatacgaatagtcatccaaatgtcttggccagtgaagatgagatttgtctgccaaggttgaacaggagttttcctacctgaaagcggcaagcagtacaaaagcaagaacatggtagatgaaattcaggagtcccacaagcagatgaggattcatttagggcctgagaaggtgcagggacccctcataggggcctgtgtaccaccccaagcatggaaataaaggaaaatcttgagtcccttcacagaaattccaggcacctctctacctctgagaagtacacgagccactggacaagcaagaaggtaaaacagtagcaaggaatggagagtcatgggaatatggggttccctatggaaactaaaaatcaaagcttagcatatgtccctgagttgttgttcagaaagctgcccctctactaaatggatccactggcacatagacctcagataa

SEQ ID NO: 1886182 - DNA, 4001 bp, Homo sapiens
aaataacgttaaccatgataaggcagctgggcatggtagaccacacctgtaattccagcactttgagaggccaaagtgagaggatcactagaggccaggacttcaacaaaaggctaggcaacatagggagactacacctatacaaaagtaaaaagtaaaaataaattagcctggcatggtggcacatgcctatagtcctagacactcaacaggatgaggtagaagaatcacttgagcccaggagctcaaggctgccttgaactagtatcatgccactgcaccccagccggggcaacagacagaatgagaccctgtcttataaaaaaaaagttggaggggggcggtgggtgcggtggcttacacctctaatcccagcactttgggaagccaaggcagatagtatcacgaggtcaggagatcgagagaccatcctgactaacacggtgaaaccccatctctattaaaaatacaaaaaattagctgggcgtggtggcgggcacctgtagtcccagctacttgggaggctgaagcaggagaatggcatgaacctgggaggcagagcttgcagtgagccaacatcacgctgctgcactccagcctgggcaaaagagtgagactctgtctttaaaaaaaaaaagaagttgctagtatatactgagtcatcactcagcctgtacccatctctaagatcacggcatggagggttgggggtatatcctacgctgcttgttcttttgtttttgttcctactgagcttccttgacttacacacaatgcacgtgtatcactccctaacattcacctgagaaaatcgtgatgtgtaaaaatttatatccaggtttctgtaagcagggactggcctaaatcaccctattagaaatattttttgtactctgcttactacctgctagcgtagaagctttaggaatgccaattggcaatataattccacgatatgagtgtccacataatgcatggtctcaaacaattcctgatggagtctgtagagttaaaaagaaaaaaatatatattagtacaggtttcctgaaaggtttaaaagtacagttgtcttttgattacttgcagaagaagtacaagtacttcttgtactttcttggtacccttgtaccaagaacattatccagaaggcagaaatatgatttatgctccctgtcactgaaatttcttattcttggcttctagtatctcagagtctatctcccaaaaaggcttcagtgggagactgcatatacactgctaaatgacgcccacagatgggtctttccgggatatgtgaaggaaaggcaactttctttgaaaaaggggttgctgacattcaaactggtgactgcataatggggacggagaaagaggatgacagtccctggagcttgatggtgccttcctgaagcaggtgcacctgggtttagaaaggtgactagataagaaaagccagtttgctattctcaccctacatgctattgtgtctctggaggccaaatttttgccttatgtcttcattttatttctataaaacaaattaataattttaaaaaacatttactttgaaataactgcacattaacataaagatgcactggtagtacagagagttttgtataaccttcagctaactacaatgttattatctattataaccataatatagttttaatgaaaactaagaattttaactgtttttcaaaaccatcagctgatctacaaactttcttcctattttaccgtgatttctgataatgatgtatttatctattccacacctaatccagaatgccatcttaaaattactgtcagttatattacttattacttggtgcacaacaaattactatatacctaagtggctcaaaaaacacacacgtattactcacagtttctttgggtcttcagtccagatgcaggtgatggcccaggctgaggctcagctggggaaaggtctccttccaagctcacgtgattgttcctaggatttgcttccttgccccagtcaagataattcattagtcagttattggaatcacttaacaattaatattaatttataataagttgttaaaaacaacaacaacaaagtggagaaggcatcgcatttcatttatactgtgagttggtttaccctgataccgcaactagacaaacagatttcaaataatgaaaattaagaacacaccttacgaatatagagccaaaaatcatcaaggaaatcctagtaaaacaaatcagcaacatgtaaaaagtattataaaatatgtcaagggtatttacctcaggaaagcaacatttggttcaacattcaagtacaattaatgccatgcactatattaatatgataaaaaacaaaaccacatagtcatctcaaaagatgcagcaacacctgagaattcctgaactcactatgataaaaacatgcagcaggccaggcgcagtggctcacacctgtaatcccagcactttgggaggccgagataggcagatcacgaggtcaggagatcgagaccatcctggctaacacggtgaaactctgtctcgactaaaagtaccaaaaaaaaattagccaggcgtggtggcgggcacctgtagtcccagctactcgggaggctgaggcagtagaatggcgtgaacccgggaggcagagcttgtagtgagccaagattgcgtcactgcactccagcctgggtgacagagcgagactccttctcaaaaaacaaaaacaaaaacaaaaacaaaaaaaaacatgcagcaaataaggcagataagggaagtcaaactcttgtttgcaaatgacataatcttatgtataaaaaaatccaaaggactctaataaaatatatttaaaccttaaagatgagtaacaaacttacagtatatacggtcaacatataaaatcctttgaatttctatacactagcaattaacaacctaaaaacaaaactcagaaaaccattccacttgagatggcatcgaaaataggcatgtttatcaaattaagtgtaagacatgtacacaaaaactagaaaacatattgaagaaaattaaataaatagaaaatatttgaatgttcattgcttagaaggattagtactgttaggatggcactattttccaaatagatctatagattgaatgcaacatctaccaaaatcccaggtgatatttccttcccctaaattaacaaggttattttaaagttcatatgcaatgcaatagacccacagcagcctaaataatctcgaataagaggcaaaaggttggaattgtagacatctacttcctgatttcaaaacttaactattaatacagtccggcacagtggctcaatgcctgtaatcccagcacttttggaggctgaggtgggcagagcacttgaggtcaggagtttgagaccagcctggccaacatgatgaaaccccatctctactaaaaatccaaaaattgggcatggtggcgcatgcctgtaattccagctactcgggaggctgaggcacgagaattgcttgcgcaagaattgcttgaacacaggaggtggaggttgcagtgagccaagactgcaccactgcattccagcctgggagacacagcaagactctgtcctgaaaaaaagaaaaaaaaagaaaaacttactgttaatacaaaagaatacaaatcaagatttatggtacttgtataaggatttacatattgatcaacagaatagaatataatggacaaaaataaatccttacatttatgaggaaataatattagcatgtggtcaaataaattaggtatggagtttttttttaatcaaatgtttctgaaaaacgcagatatccgtaggcaggtcggactcctgcctcacaccacaaacgtaattgactcaaaataatcatacatctaaatataatagctaaacaggcccaaaccatacaaaaaacacagaaatacatctttgcaatcttaggtgaaacaatgttttctaagatatgacaccgaaaacacag

SEQ ID NO: 1886183 - DNA, 4001 bp, Homo sapiens
acagagcaagactccatctaaaataaataaataaataaataaataaaaataaaaataaattggtaagtggagggaaaatagatctaaccaaatgacttgtcttcttaaaaacttcaatgatttcttcagtacctagagaccaaagctccttacctttttttttttttttgagacggagtcttgctctgttgcccaggctggagtgcagtggcgtgatctcgctcactgcaacctccacctcccgggttcaagcacttctctgcctcagcctcccaaagagctgggattacaggcatgcaccaccacgcccggctaatttttgtagttttagtagagatggggttttgccatcttggccaggctggtcttgaactcctgacctcgtgatccgcccaccttggcctcccaaagttctgggattacaggcttgagccaccgcgcctggcctctccttacatgttttgttgttgtcgcttgtcttttgagacaaggtctcactctgtagcccaggctggagtgcagtggcccatcatagctcactgcagccttgacgtcctgagctcaagcagtcctcccacctcagcctccgggatagctgagaccacaggcacaagccaccacgcccagcttattttttttttttttttttttgagatatggggtcccactatgttgcccaggctggtctccaactcctgagctcaagcgatcctcccccaccttggcttcccaaagtgctgggattacaggtgtgagccaccgtgcaggccttatatgatcttcatatcctgaactaaatgtaaccttccagtttcggcacttgctctggcacttttcctccctcgccagataatactaatctttaatcatgtagttcgtttccatgcccatactaccctatttgcttataatgtcttccacttcgcccaagaatccctactcagctagcttgtggtgttgttttgacacagtctcgctctgtcgcccaggctggagtacagcggcgagatctcggttggctgcaacctcctcctgagttcaagcgattctcatgcctcagcctttcgagtagctaggattacaggcatgtgccacaaaacctggctaatttttgtattttttactaaagacgaggtttcaccacgttggccaggtttatctccaacccctgacctcaggtgatccgcctgccttggcctcctaaactgctgggattactggcgtgaaccaccgcgcccggccctactcagcctttaaaaccggaatcacgggtcaaaactttctggtaaaccacgatacggtttaggttatgaaattcaatgcccccttcctctgaactcctgcaaatctccagtaaagcaccacagattgacgaatattccagccatttccctctcccgtacgctagctccatttcccacttctatccatcttctcgagcttcctcagctcctccacctccatgaggcctggaaagcaccttgctccaggaatgcgagtaggaggctcagagcgaccagaagtgccaaaagctgacattcagatactgccgaaacaaaccacaagagcgctagggcccccgctaatagtccagctgcgatggtgagaactcgcggacccgccggcgatgcatgccgggagatgtagtcccgggccgacgcattacctcttgggagtcgtggtcttcgatctggtaaacagaagacggcaactcggttaagtcttcccccaccgccccctgaaatccctcgccccacccgcgagggactggggtaggagtaggggcgttgccgtggttagcctcgaactcctaggctcagacgatactctcgcctcggcctcccgagcagctgggactacacgcgtgagccaccgcccccggcataaagtttgaattagtccttacgcaaaaagggaagagggcagtctgtaaactcgcgcaggatcaagctctcgagctcccgtcttgggttagcgcgcagggcggaagcggggagaaggcggatccgggaggcggggatacgttacgtcgacgcgggcgtgaccctgggcgagagggtttggcgggaattctgaaagccgctggcggaccgcgcgcagcggccagagaccgagccctaaggagagtgcggcgcttcccgaggcgtgcagctgggaactgcaactcatctgggttgtgcgcagaaggctggggcaagcgagtagagaagtggagcgtaagccaggggcgttgggggccgtgcgggtcgggcgcgtgccacgcccgcggggtgaagtcggagcgcggggcctgctggagagaggagcgctgcggaccgaggtgagtgtgtgaggcgcaggctgggccctccagagccgcggctcgtcctcgcccacctgcgtcctggccggtccagtgctcagcggcagttggggcctccgcgcgcagtgtgaaacccggacgtggcagggcgtgtccgcgcccgaccgaccctcagctgctggggcgaaaacacaagtggacctcagtctttagaactaggggagaaacattagagcctttataggcaacacctattttatgggttcgagcgagaagtccgagatcagagcggtgtagccacagctgtttaatatcacagccagggcttccggattcctgatctgtctttccattacaccgtgcttagaaagtaccaatctccgattgccaaaacagtgttttcatcatctaatgcggaaaaccattcacatgatgcctagagaatgatctgaagtgaggtttggttttcttaaaactttttttttgagatggagtctcgctcttccgcccaggctggagtgtagtggcgcgatctcggctcactgcaacctccgcctcccggattcaagcgattctcctacctcagcctcccgaggagctgggattacaggcccccaccaccacgccgccaggctgatttttgtatttttagtagagacggggtttcaccatgttggtcaggctggtctcgaacttctgacctcaggttatccacccgcctctgcctcccaaagtgctgggattacagccgtgagccacagcgcctggcccctgtttttttgtttgtttgtttgtttttaacttctaaagcgcaatgtaatatacatgtagaaaaattcacattcacaactgtatacaactccgtgaattattacaaaatatactggccgggcgtcgtgtctcacgtctgtagtcccagcactttgggaagtggaggcgggaggacgattgagcccaagagttcgagaacagcctggtcaagatagtgagacccgcatctctacaaataggaaaaattagctaggcatggtggcgtgcacctgtaggcccagctattcaggaggctgagaagggaggatctagcctgggaggtataagctgcagtgagctgtgatcaggccactgcactccaacctgggcgatagagcaagacaaaatgaatatacacctatgtaatcaccacttaatagaatggtcctcagaagccttcctgtgtagtatttaatattttcccctttttacagtggtaactgctatactggtttctaatgagatgaactaatgttgcttgtttttgaattttatataaaaatacatcaggagtgttgagtgtttcgttgtttcacatgcttgccaacacgatatttttcagcctttttgattttaactattctgctggttacacagtaatgtcttaatgtgattttaattttcctgattaataatgatgttggacatctgttcatatgtttttgcccattttgatatcttctgtgatgtgcttgttcaaatctcttgcctatttttctattatctttttcttactgatgtgaagttctttatatactggttatcagccctcagttatgtttgtgctaaatgttttctctactgtggtttgacttgtcactctcttagtggtgtcctttgatgaatagaagtgctgaatttatttttttattatttatttatttattta

SEQ ID NO: 1886184 - DNA, 4001 bp, Homo sapiens
catagaaattattagtgggtggaatctacacaaaggagtaacaaacagcacatgaaactgaccataaatgactgagattccatgaataggcgacaatttgctggcatgtcaaggcttacatggattactagaaacaactacatttcctaggaccctctgcgcagcacacagcctgaaatgtagggtgggagctgaacttaaaaagaaaactatagtcttggagataaatgtcacacacaaaaaaaccaatgtatgtaccacaaccacttcttagaggaagacattaaaaaagaaaagccacaacctaggattgaaagacagctttaaaaacacacacaaaaaacctagcaaaccagacggtgttctcagccactcataaaagcaaagtcttatcaaagttttaacttcaaagagcttaaagacactgcaaagaggcactcagcaagactggtcccgactgcaacctattcccttccaaaaaaataatcagtttgtaatctaaatacacatcacaccaggtcaaagtaatctcttccggtagcaaaattttggcactggattgcaggggcctgttcaaaatagctggagccccaaacactttgcgttttcagttctgaaacacttagacaaaagttcacatcgctaagtggatggccaggatgcccttccggttcaatttggagacgggagatctttaacctaacctaacattctttaaggcaccagtgccctcctactcaaacgtcagcctgggttttgtttctaagggtcgccaataaataggtttcatgggcatttaaggctctaggagtctttttctgtctgttacaggtagcccggctcttaaaaacgatcacacacaacgctcacaggcatgtgcacattcataaatacacacgtgtgcacacatacatacccacatgcgacacacgcgtacatcatacagcatgcacgtgtccataaatgagctcacacggacagccacgtcccgcgcgcaggcccccagcaacacaggccccaagcagggcctccacctgtatggagtgagcagctcagaaggcgaaggccggtgccttgcaatgttcacctcacccgcggcttctggcatggccacggctccttccttttctagtaataaataccagatttggggaaaccaaggcgccgcaatgtgtgttatctgtcacccaagggtcccattaaggggacaaaggccttatcgcgtttgcagccggctaagtgaaaggagggcacttgggactgtgagctctgaccgcggacgtctcccgcaccgctcccgcggatcctcggacccagggcccctgcagccgctcctgcccaaggggcgcgaggcggagatctggaggctttggggcacgcagaggagactgagggtgtgggctcagggccgcggtgcggtcttggggcttgaagtgcagacttagggtgaggagtgcgggcttaggatgggggcttgggacacggggtggggacttcggatgtacggtggaggcttggagaggtggggcacacatttgggatgcgacacagaggcttaggatggggcttgggacacgggctgggggctcgtggtgcaggctggaggcgtgggtgggggggtcgcggcgcaggcttggaggcctgggtgggggctcgcggtgcaggctggaggcttcgcatacagagttggggatgcagggttggggtacagagcagaactcggggcgggcacgcaccttgtggcaggccaggcaggtggcccccgccgccgttcaggctgctctggatctgcgtgagctcctggcacagcacctgcttctggtggaagctgaaggcgcggtggttggaggacatggtgaacggcagcaggaactcatcgcccgtgcggccctcgttgagctgcagcccgtagttgtggatgatggagtcacgtgcgtgagcttgcggtagagcacgcccgccgcctcgctctgctccgagcccagcagcgccagcgacaccagcagcttgctgcgcaccacctcgtccgtcaggttggtgaggctgcccaggtcggccgggttgttggccttgatctccgagtcgcgcagcgagtggtagtccttgcgggccaggtcctccaggcacgagccgaagaagcggacctcgagcggcatgcacaggtccagcaggccgcataggaactccacgcgctgaggcgacggcagctccgagaaccagcggtacacgccgtccctctgcagcgggcagcgcttctccaccacgctgccgcccgcgccgcgccgcgccccggggcccgcgcgggggaggccggggggcgccgggggccgcggccggggcgcgccgggaccgggggcgcgcgggccggggtcgggtccgggcgaaggcgcgcgggcgccgcgggccgggcgggcgccggggcggggaccggagccgggcaaggctcccgtcaggggccggcgggcgggcgcgcgcggggcgccgtagggggacccgcggcggccgggggcgacgagctgccttgggcccgccgctcacggggaggcgccttcccgagcccatgcccgtgcccagcagcggccggtgagcggcagcggcggcggctgctcctcgtcgttgtcgtcgtcgtcgcccggaaggcggccgcccccatctccccccgcgccgcagggtctgtcactgcgggccccaggccggccgttacccagggccgcgggcgcggcgtcgcagcctagggagcgatgggggccgcggccgcggaacgggcgctggagggggagggacgcaaggcggcagtcgcggagggatcctgccgggacttgccggccttgctgctcccgcgcggcggacgggcggcggacgggcggcggcggcgacggcgacgacggcagagcaggcaccggccgaggagcagagggatcgtcgcgctcgcggctgacgggcggccgggaccagcagaagtgggcggggtggccgcctctccgggcagcccgggccggccgggcccaccctcccccctccctagctgattggctcaggcggcccgttctccgcccgtgattgtgccgggtccccaatcccattcgcccatgccgcggccacgccgccctggggggctatggatcatattggagccaccgcctctagtctctcggcggccgtcaggacgcgattggtccgcggagagcagagaggcggaaaacccgggctggatttctggtggcttttgttcccgcaaatttacgtggagcattgtttttgggcgaaaacggggccttcggccttcctgctttattcctgagcggtgtaagagggaggtagtgggtatcttcgagaaacggccgccgcggggtccggagccccgggttccaatcccgggtcggccactgctaagctgtgtgaccttgggtgagtcacttggcctctctgagccccaggcgcctccccgggaaaatgagggtaatagtaaccgctcccgggggtttgtgcgaaggtgttcagctcacagagggccggcaccggcacttttgaggcggctgacttgccctgggggtgtgatgggaggtgcaagctttctccaaaagcctcctccaaatggagcctttaaatccgccttctttccgcggctactccaccagctcgccaaaccgagaaaatgcaaacacaggggcgggggcaagggagctgacctggctggaagtaaacagaaacgccacccctcccctggcacttgcattggcaccggaggattgcaggtgggggaagggcctctgcacccaaccacctttaaatcccaccacttacacacaggcaaagaagcagagccgtggcggctggacgctcattcctcccctgcccttcccctagagcgctgctttgaatgtctgttgatctagaacggggtctgttcattcatgggttccaggtcccaagcgcccgggggcagctgagagcaaagctggcgccctccctaccccgtggagctcacactctggttctgg

SEQ ID NO: 1886185 - DNA, 4001 bp, Homo sapiens; identical to SEQ ID NO: 1242341

SEQ ID NO: 1886186 - DNA, 4001 bp, Homo sapiens
ttgtagaagcaacattcaatcattacaaatttttctgtagagactctccctatagggaaggtagttggtggggggcctctaggtctcagctcctattacgttacctccgttcttcgaactccttgctcatttctgctgcagcctccgcgatggccacaagagggcccaagttccatttagtgctcagttctgactccaaggcccacccgttatggtcgtggcgtcaaatatcttcttcccttaaatccgaaaagtatttcgaaaatgtatgctcctcttgcacattttaaagatcatgtctacagctttcttgtgataacttacaatataagtttaaagagatgcaaaggatgagtatcttgtgcattttaatattaacactaaaaactgttacatcactaaaaatttaggccgggtgcagtggctcctgcctgtaatcccagcactttgggaggctgaggcgggtggatcacttgagggccaggagttcaagaccagcctagctagccaacatggtgaaaccccgtctctactaaaaatataaaaattagcccggtgtggtggcaccacccctgtagtcccagctactcgggaggctgaggcaggagaatcgcttgaacctgggaggcggaggttgcagtgagccgagatcgcgccactgcactccagcctgggcgactcagcgagactgtctcaaaaaaaaaaaaaattaggccaggagcggcggctcacagctgtaatcccagcactttgggaggccgaggcgggtagatcatctgaggtcaggagttcgagaccagcctggccaacatggcgaaaccccatctctactaaaaatacaaaaagtttgccgggcatggtggtgggcgcctgtaattccagctactccggaggctgaggcaggagaatcgcttgaacccgggaggcggaagttgcagtcagccgagatcgccctactacactccagcctgggcaacaaaagcaaaactccatctcaaataagattagccctatctaccaaagcaaggactacagtatgggcaaaaaataatgtaaaacatctctaattattacatatacaagtgatagtattttggattactggatttttccattctttaaaagtagtttaatgtggcttttaaaattaaaaattccacctatacctcgaattgttttttttttttttttttgagacagtgtcttgctctgtcgcccaggctggagtgcagtggtgcaatctcggctcactgtaagctccctcccgggttcacaccattctcctgcctcagcctcccgagtagctgggactacaggcgcctgccaccacgcccggctaattttttttgtatttttagtagagacagggtttcactgtgttagccaggatggtcttgatctcctgacctcgatggtcttgattctcctgccttgatgaccaggattggtcttgattgtcctgcctcggcctcccaaagtgctgggattacaggcgtgagccaccacgcccgatcctcgcgttgtgtttcaaccggacagtgctgcaaaaagaaaatgaactgaatactgtacattacaagtaacaaaaaacatgcatctaccaaacagtcttgactaagaagatcccggaggaggtactacttgtgtatcaactgtctatcacaaaaagttgaaaagcatgaatatacaagccgcatttctttggaacatatatacacagaaataattaccaataaggtagggagaaaagaactaaacagggttcagtgcttttaccacacagaatctgctagtcactgctttacaacaatatcaaaagcaccattgaacagaaaaaggaacacacaaacttaaaaataatttctattgttggattaccacatatagccttgccaaagcaaggcctcaaaaaattgggttaagactcagagttgttcctctccacggaaatctttagtaaaaggcgaaagatttatgcgatctgaagagaaaccagagtataccagttacttctgtaactcaattttcgggtaactgcaattcctagtacactgatggtgtctactaatcccaagggttactacctgagaaagtttatacaaaaaaattctgcatgcaaaattctcatacttaaaaatgtcaagcaatatataaatgtttttccgaaaaaaatactgtttgcagtgtattatgggtatgcaaatgagacctgaataatcgtctttagactccggaaataccttagcagtcacacggtgctcttggggcaacctttagggggtgaagtggaggccttgctgcccaggactttttttttttttttttttgagacagggtctcactctgtcatccaggctggagtgcagtggcgcgatctcggctcactgcaacctctacctcgggttcaagagattcttctgcctcagcctcccaactaggtgggattacaggcgcacgacactgtgcccagctaattgcccaggacttttaagccctgtctctaaaatatagaaacatcttaaagatttttaagtatatctcgtaaataatgtatatagtctatgtgcatacataattcaaaagtaataaaacactgatgtctcccatccagttcaaaaagtatattgttaacatctttgaagccttcgttggcccatttcccctatcatacccctcactcgctatatgggtagtcactatctggaatatgtattaaccattcctttgcacttaaatgccccccccccccccccgccccaactattagaaaactccctcctagcaatactcccacctcagcctctcaactagctgggaccacaggcacgcgccaccacacctggctagtttttgtatttttcgtagagacgggttctggctttcttgcccagcctggtctcgaacttctggccgcaagcgagcctcctgcctcagcttccggagttgctggattacaggcgtgagacagccgccagctcttctttcactttcttcacgagattttgcatatatataatatatatattacatattatataaataatatatactatatataattacatagtatatatctataattatatattacatatatatacattatatattatatatagtgtattttaacatgttttctagccttcatttaaatttttaaagtttgttttgttatggtgctaaaatacacatgaaacttaccgttttaaccatttttaagtgtacagttcagtggtattaaatatattcacactgttctgcaaccatcactactttccattttcagaattttttcatcatcccaaaacccattaaataatgactccccattctcacctgagcccctggcaaccaccattttactttctgtctctatgatattgcctttctaggtgcctcatataagtggaatctggaatatttgttcatttgtctctggtttatttcatttagcataatatctttaaggttcatccatgttgtagcatgcatcagaattttattccttttttttttttttttttttttttgagacagttttgctcttgttgcccaggctggagtgcaatggcgcgatttctgctcactgcaacctccaccttccaggttcaagtgattcttctgcctcaatctcctgagtagctgggattacaggcatgcgccaccacacctggctaattttgtatttttagtagagatggggtttcaccatgttggtcaggctggtctcgaactcctgacctcaggtgatctgccagcttcggcctcccaaagtgctgggattacaggcgtgagccaccgcgcccacccagaattttattcctttttaaggatgaataatatgccattatatgggtacaccacattttgtttacccattcatttgttgatggacaggtattgtttacacctcttgggttattgtaaataatgcttccatgcaattatttttatatttaagttaacagtaaaattgaatttttctggtatacagatctacg

SEQ ID NO: 1886187 - DNA, 4001 bp, Homo sapiens
acatcacttaaaaagatacagaatttatttaataatttgaggtggtgagttgtttattaaacaaaacacacaaaagtacaaatgagaatgaagaaaaaaaacaaatcaatctgacattaaaaccagtcaccaagagactctataagagcaaaaagagaagctgtaaactgggagaaggtaattgcaccatataaccaacaaagaattactatttaaagtctctgaagtctagaagctgtgcaaaaaactactatacccactaagaaaaagattcgccatctaagaaaaaaatgggcaaaaggcacaaacaggcattttacaggagaaactatgaatggccaaaaaatctttgaaaagatgttcaacctcattagtaattagggagatgtacattaaaattactataatgctggaagattagacatttgtaaaggaaaaaaaaaaaaaaaaagccaggcacaatggcacacacctgcaatcccagcattttgggaggtcgaggtgggaggataacttgagctcagaagatccagagcagctcaccctgggcaacatggagaaatcctgtctctacaaaaagcataaaaacaaaataaaaatttttaaaaatcagccagtgtggtggtgcacgcctgcagtcccagctgcttgggagactgaggtgggatcacttggatcaggaagttgaggctgcagtgagaggatatcatgccgctgcactccagcctgtgtgataaagccagaccctgtctcaaaaactaaagtaacatttaaaaaccactaaaagttacaatttcataactaccagatggacaaagattaacttctgagcatttctttttttttactttttttttttttttttgagatggagcttcactcttgttgcccgggctggagtgcagtggcacgatctcagctcattgcaacctctgcctcccaggttcaagcgattcttctgcctcagcctcccgagtagctgggattataggcaccaccacgcccggctaattttttatatttttagtaaagacggggttttgccatcttgggcaggctggtctcgaactcctgacctcaggtgatccgcctgccttggcctcctaaagtgctgggattacaggggtgagccatcacgcccggcaacttctgagcatttcaaggccagtaagggtgagaagcaatgggaatataataggccatttgtgaaaatgcaaataagtacataatttgggaaaaaattattatgcaggtacctacctgccctaagacccagccagccattccattccacactttaaggaaatataaccttgcacaggttcaaggagttccaatggccaaaatctggcaaaaccccaaaacctacaggaagggagaacggatctacacactgtgctctgttcaaacgttttacacctagcagaggtgcacagggcaattattagtcattgtccatgtgtgccgattgagcgcttgaaatgcagctagtcctaattgagatgcgctaaatgcaaaatatacacaggattcagaagactaagaaaacaatgtacaacgtgggtttcaccacgttggcccaggctggtctcgaactcctgacctcaagtgatccgctcaccttggtttacccaatgcagtgggattaccggcataagccaccgcgcccagccagaacacttttaagaatctttcacattaatgacactgaagtaaatacttctaacttgttggaagaagcttcactagaaaaagaacgcttgcacttacacaaagtttaaacgcatgagcgattgaagcgtttacaagcagaaccgaaaacttaaacgatatctgtaagaaacaccctaaatgaagtcaatctgattttttaacagctttatatagccttgtcggaacaaggcctcaaaaaattagcttaagactcagagttgttcctctccacggaaatctttagtaaaaggcgaaagatttatacgatctgaagagaaaccagagtatgcttgttaatttcataactcgtttctcgggtaacagaaactcctagtatagtgatggtgactagtgaatgccaaggttctatacctagaaaaaaattttaagagtattgtttaaacaaaagtctaactttcacagaatatgcttagaataaaaatgtttgattttgcctttttaaatttgtactgtgagcagtgcattatgggtatgcaaataatcggatcaatcttttgattccggaacagagcatttcacagagtgccttatgtcaccgttagggggcgaagccgaagactggctggctggaaaataacgctttcctggtcagagactcgggttttatctgttttgtgtatttgtacgtctgagtttgatttcttttaaataaagactgctattaaattgaaagagaaaaaattggcaagtcaatgattaacacagaattcagaatagtggttcctcccttcggtgaggagcgagagatgtgacttggggaagggcgcacaggggtttaaaaagtttgacaatttccgttttcttaaactgtgtggtgggcgcaggggcgttctgatgttatttttaaccgtgcactccggggatatactgaattttgcatgccatttgagaattcccggcaatgtcctgtttaaaattggaacttgagcgctctgtttcaggtttcctgcccgaccggaatctgctgttggggatgcaatcttgctattccagtttcagacctcgtgtctccttattctaggcgggaggatcgcctgacgcccagagttccagacctgccatctctacaaaaaataataatttaaaaacatagtgctgccctctccccctcggagctacactgtcggctctcaccagcctacagggaattcctttctaaggaatgtgctcactcggcaaccagtgaaaggaaagcagtgcaggctggtctggaattacgggccacaagcaatcctcccatctcggcctcccaaagaattgggattacaggcctgagccacctcgcccagccagcactaagacttttacagccgatggtgtaaacatttcatttcccgactttcacaccttctctaaaccaacactttttttcactttgctgctcctttgctagcaagtcaatcatatttgacatgcatgtaatttaaatttgtctaatacatttaaaaaatagatttactggatataatttaaaagccaagcgatccatccatttaaagtataccattcggccgggcgcggtggctcactcctgtaatcccagcactttgggaggccgaggtgggcggatcaccaggtcaggagatcgagaccatcctggctaacacagtgaaaccccgtctctactaaaaatacaaaacaattagccgggcgtggtggcgggcgcctgcagtcccagctacttgggaggctgaggcaggagaatggcgtgaactcgggaggcggagcttgcagtgagctgagattgtgcgactgcactccagcctgagcgacagagcgagactccgtctcaaaataaataaatagagtatacaattcaatggtttttagtatattcacagttgtagaatcatccccacaatataattttagaattttttgttttgggtctgttattgtttttctttttttttgagacggagtcttgctctgctccccaggctggagtgcagtggcgcaatctcggcttactgcaacctccgtcttccaggttcaagagattctcccgcctcagcctcccaagtagctgggactgtaggcgcctgccaccatgcccagataatttttgtatttttagtagagacagggattcaccatgttggccaggctggtcttgaactcctaacctcaagtgatctccccgccttggcctcccaaagtgctgagattacaggtgagccaccgagcccagttagaatgtttttgccactccgaaaaatgaaacagtacccattagaagttacttcccacctgctcattcacccagc

SEQ ID NO: 1886188 - DNA, 4001 bp, Homo sapiens
aaaccggtgctttttcaagcctggactattgagctttctgaagacacattcataagaatctacaagcacagaggttggaagggcatcctgcaacgccaatgcatggactattgagtttctggagacacattcataagaatctagaagcacagaggttggaagggcatcctgcaacgccaatgcattgactctatgtgtccaaagaggcgaagacttgcccaagttccctcagcaggttagtgcagaggaaaggaagtcagccaggtctctggattttctggggctaggaactgcctgtctttttcctaatttctgttctaatcttttcttttcttttaagtagcgacagggcttcaccttgttggccagactggtctcgaacccctgacctcggtatcctcccagctcagcctcccaaagtactaggattacaggcgtgagccactgcgcccgaccagtttctttagaacaatctcaacagtcctttttgggccaagtccttcactcttggattctattttactccccataacacccccttccacatacgtagactaataatattccagtctgatgggttgtctgtgctgaaagagagggagccacatcgacattggtcgttttcttatttggcatcccaagggagacatttaaaactactcacccaattgcccaagtggcctccaaagaaccagatatctctaggggaagaacagaaatccagccaacaaagattgtcctctaacgccttacatcgaaggcccagagccaaggaagaggcggagatgtcccgcagtcccctatgctcggctgttacctggaaaggatcatttcacttccactgaagagaaaaggaatgagtcctgaatggaatgctgcccggcagctcccagcgcccgctggtagagtacccgccgctgtccctgggtggctccggggcttcgagcctaacagtcctcctgcggcgcgcctggaggctgggagctgtgcggccgctcccggcagatcgactgaggtcccagtggccgcagggcccacgtgcatgctgaagcactagcaaagcagttgcaccatttttctgttggaaagatatttcagaaaacattgcctaagtcatcgcaggaaatctgaacgtggttggactttgtttcctctttgtcttaccactcgggactgtgtttttgtaactcaattacctgagacctgggtcccgatcttttcagggtctgtgcctctgtaagtcttatcaggctttacctctcagtgattggtgtaaaatgatgacagtaaaacagtaaaacccacagggtggggctgtcaggaattttttaaacattattttatttttctgccccctcccccttttctttttttcttttattatttatttatttggtctggaatatttcaatgaaatattggtgaagcccttgacatatggtagatactcattaagtggtggctttttttttttttttgattcaaaggattctgtcactcttattgcaagttcctcatacgtttatcgttgcactagttcctgttatgtttcggagctgaaatggatcaactttggcaagacgaaatttccttaagtgtaaggtactgcaatactcaggattgtgcagagggaagcagaggcaagatgggaaagatcgcaaactagggcccgagggccagaggcaaaatgcaccgcagagatgaatctgcctaggccccacctccttctattccgtctcctaggactactacattttatttgtgttaaaagatatcacctgtagatgaaaggtgttttcagtggtaaaccgtgcaccggcgtataaacgtggtgtaaaaaaaaaaccaaacagaaaaacaacctgatgtaaaaacagaaaaacaacctgatgtaaaaatatggaacgcttcacgaatttgcgtgtcatccttgcgcaggggccatgctaatcttctctgtatcgttccaattttagtatatgtgctgccgaagcgagcacggtgtttcgtcctttccacaagatatataaagccaagaaatcgaaatactttcaagttacggtaagcatatgatagtccattttaaaacataattttaaaactgcaaactacccaagaaattattactttctacgtcacgtattttgtactaatatctttgtgtttacagtcaaattaattctaattatctctctaacagccttgtatcgtatatgcaaatatgaaggaatcatgggaaataggccctcttcctgcccgaccttggcgcgcgctcggcgcgcggtcacgctccgtcacgtggtgcgttttgcctgcgcgtctttccactggggccggggcggcgcggagggttcagacgcgggctcttactcaaacgctgatccccgaaactaccgagcagtgtctgcgcgacgcgaaagcatttttggagcgaggggccatggtgcccatgggattcccacgggtgttggactcgggaccccgaaaaggttgcgagtcgctggttggacccttccctgcgcggggacccgagagacgtgaccctagcgaggcctggggccacccactgtgggctggaaggggccgacaggggttgcggcgggggatcgtggggagggttggccagggcgcgccttcagcttcccctcggcttctcggaactagctctctgcattcggagccaaggcgatgagggtgtctgctttgggacgcaaacttccagtagtggtggaagtctgggaagggtcaccaccgtttgagccaacatttagaaagagccaggcgcttaacctaaatggtatcatttcccccattttgcagtttagcaaacaggctctgggaggttaaaccatctgctccagtgatcctgccactggttaaagtagttgggatttggatgcgagtctggtttcaaagactttttttttttttttttttttttttttttacgcagtggagtttggaaaagatttgagaccacaagtgcagcctccgctttccttgttagagttactccagaagccctgaccagctcagactttccttcctacttccattccttcaacaaatattgaacatctgtggtgtcagcacccgggcttcagggatgcgtgagtgggcagggttgctatggtcatggagctcggttccagcaggggagccaggcagacatgaaagagccctctggatgccgagacgtgtgctgtgaaagtgtggcatagaaagtgcctgggggatgatggccacttcagtggggcaagagagaaggtgacattggagctgtcattgatgataacggcggcagcgctgaggggacggggaccgagatccaggcagaggaccttgcaaccacctgactcagtgtcacccatctgggccagcccttcccgggagaccactgtggtggtagttgctgctcccagcagtgctgtggctcagtactgagagaggggagggacctggggagccactgccagggagttcgggctttggaggcttgagttctccccactcggtacgcctcttaagtgaaatggaagtcatttgactagcttctcatctgaccttactaaataagcagtaggcaaacgcaaacctcagaatgctaatatggcctttactgagtgaaaagagctaatttggacaatgatgtttacctcagatttacaaaagagaattgcaaataaccaaaaagcacattaacatggatgggagatgatgctaatcttcaattagcatccacatttttattcatttatttagaacaggtagggctggtggtttcataaatgccttattgtggaaactagcatgagatacacctagttattggttcaacatttctggctacatgagcatgtgttactttgagccagaggtagattttttgttgttgtttgtttttttgagatggagtctcgatctgtcacccaggctggagtgcagtggtgcaatctcagctcactgcaacctctgcctcctgggttcaagcaattctcctg

SEQ ID NO: 1886189 - DNA, 4001 bp, Homo sapiens
tgtgctctctctctctcctaactctgctaacacttactgccttttaccacccttttcgtcttgaccatatgtttcttaataactatttgatatcttctcacagaaagtgcctcatctgtcccactggatcctctgttctacagctcaggggttgagtcctggagatctctgtattcccgtgtcatatctcacatagcaccttgcatgactggccattttcagaatggactaattcagtacttgattgtttgcacagttagagcaggttagggtccttcttgcaggagtctgcagtcttagataggtacagacagacatagagaaagcctacagagatgtgaataaatgactaaatatatttctgggggaggcacagagtaggagtttgagtccttatgggagagggatgaggggaagaagccccttgtttaatctcattttttctcttcattaaaatgccttcttgcatccttggtctcttttcacagaaccctgccatcagcatcactgaaaacgtgctgcatttcaaaggtcagtatcccagcaaatgctcccatctctatacacagttaaggaggtgtggtggtggtttcccttttttaaaaaaatgtatttgtcttacttgttttttgctgatgttcacgcctctgatcctcatgaggtaagctaaattgttttgaaatatatgattagaaaagtcaaagaattggtttaaaatcctgtttcccccatggagaggcagtagatacagtgaaggaaaaaaaaaaaaagaatcctgggttagaaatcaggagacgtgtcttctagctctaattctgccgctatcttggacaagttattgacttctctggacctgtacaatgaagatgctgggttttaatctgtgtttctcaaactcgaggacccgtggacaccaaataatgtttccacaggactctcaagggctcatggacccgagattgagaaacgtgaagaattaaatatggtcactttaagtgatatttggctccactgcagctgtgaatacagacacacatacagctactgattgcatggcagtacttgattatgaagtggccatctagatgatccagaatatgctgctttttttaaaaaaaaattattatggaaacataaaatagaaaatttatttatttatttattttgagattgagtcttgctctgtcacccaggctggaatgcagtggcatgatttcggctcactgcaacctccgcctcctgggttcaagtgattctcgtgcctcagtctcccgagtagctgggattacaggcatccgccaccacgtccagctaatttttgtatttttagtagagacagggtttcactatgttgtccaggctggtcttgaactcctgacctcaagtgatctgcccacctcggcctctcgaagtgctgggattataggcgtgagccaccgtgcctgttttttgttttttgtttttgtttttgttttttttaaatatttttcttttttttttaaatttattatttttttattatactttaagttttagggtacatgtgcccgttgtgcaggttagttacatatgtatacatgtgccatgctggtgcgctgcacccactaactcgtcatctagcattaggtatatctcccgatgctatccctccccactccccccaccccacaacagtccccagagtgtgatattccccttcctgtgtccatgtgatctcattgttcaattcccacctatgagtgagaatatgcggtgtttggttttttgttcttgcgatagtttactgagaatgatgatttccaatttcatccatgtccctacaaaggacatgaactcatcattttttatggctgcatagtattccatggtgtatatgtgccacattttcttaataaaaatatggaacgcttcacgaatttgcgtgtcatccttgcacaggggccatactaatcttctctgtatcattccaattttagtatatgtgctgccgaagtgagcacatatttttctttttaaacatttaaaaaaataataattatttattacatcccttctcactattcctaagaaattttcttgatgagactttgtggctccctgatactagattagcagaccagtttgagaaacactacactctagatgatgtctcaggccttttcagctctgacagtctctgattctgtgaatctgcctctatctgccttctcctcagtccctcagcagatttactgctctactggagagggtgggatttccattcactgtcacccagtggggtaggattctctctgctctctgttccagttcctgggattattggagcataaagagtttctgctttatgtgaaattccatctactgtaatatacttgcatgaaagtacagcctggcttttgtatctgcttttcaagatgagagtagtcaccactcagctcaggttttttgggaattatatacatttacatgaaaattaaagtgataaaagcatatcttgccacttagaccttatatactgtcctaccttaaggaatttatcgtcacagagaataattgctacctgtagcgaatattaggcaggttattagtctacatatgatcagataaggaaagagagtcccagaagggaaccaaatggtaaatgaatcagagaggagagtggaagggtggttcagcagcagctgctgggtccagcagtcactggcatctaggcatggtgccagctagaattggggaaaggagccatgtcaaggcatagggatggggcattggccaactcaggtacttccctcctagttccacctgtccttcataagctgcgaaagattgtatttctttttccttgttccatttgggatgtgctaaaggaggagtcagcttctgccttcattctctctccctggttgggaggttttagattcagagctgtccaagacaacccagcatttccatgtaccctgcagtcaagatgatacacccaccaatttttgtctgctctagatttagagccaaagtaattgtgaaagttaaatttatatccgtgtggctcctttggcattgctttctctattctttttcctgcctgttatttgtgtggggtatcatcagggtcacagtggaagattgggtaaatacgccaaaactgacatcagaggacatatggagataaacttgtgtcaaagatttggcctatctagctgttgaggagctctgcgcacaagcccccacacattttaacaggacccattaagatttgtggactacgatgcttcttggccttttggctacaatcaagtatgatattcgtgccaggtacagtggctcatgtctgtaatcccagcactttgggaggctgaggcgggtggatcacaaggtcaggagatcgagaccatcctggttaacacggtgaaaccccgtctctactaaaaataaaaaaaattatctgggcatggtggcgggagcctgtagtcccagctactcgggaggctgaggcaggagaatggcatgaacccgggaggcggagcttgcagtgagccgagatcatgccactgcactccagcctgggcaacagagcaagactctgtctcaaaaaaaaaaaagtgtaatattcgcatacttgggaaagaactgcaccaagctggcttttggatggccttgctctgctcaagtttgcagtaacccacatttctttctttatagctcaaggacatggtgccaaaggagacaatgtctatgaatttcacctggagttcttagaccttgtgaaaccagaggtatgttctttcctttctcacttcccttcccattttaggaaatgaataccagtagtttagtgaaatggggagcagggtttgtggagagaagaagataaaaaccaaaggggaataatagagttcttttatttggaacagagcccaggttttagctgcagaggaatgggaaagtcagagaccccaagttgagtcagggccctgccatttattagcagtgtgatcttgaac

SEQ ID NO: 1886190 - DNA, 4001 bp, Homo sapiens; identical to SEQ ID NO: 1886188

SEQ ID NO: 1886191 - DNA, 4001 bp, Homo sapiens; identical to SEQ ID NO: 1886188

SEQ ID NO: 1886192 - DNA, 4001 bp, Homo sapiens; identical to SEQ ID NO: 1886188

SEQ ID NO: 1886193 - DNA, 4001 bp, Homo sapiens; identical to SEQ ID NO: 1886188

SEQ ID NO: 1886194 - DNA, 4001 bp, Homo sapiens
ccaggcattgtagtggttgatttttttaagcattcacaaacactgtctcctaactggcctcctcccttcaatgaattccgtaggttgccaggtgaactttcctgaagcacagccagccagttctgattgtgtcattatgtaagcttttttgtttgtttgtttcctagcattttatttcttatgcaataaagtcaaacttccttagtctggcttataaaatcttacgtgttctagcttcaaccagtttttccaaccccttttcctctactactcttcagagaccttgcattccaggcaaaataaactacctatggtttcctgtagcatattttttacattaacataatttctaacaatattctaaatcagtctaaaatgtcagccaggggtagtggctcacacctgtaatcccagcacttagggaggccaaggtgggcagatcacttgaggtcaagagttaaagatcaccctggcaaaccccatctctactaaaaaaaaaatacaaaaattagccaagtgtggtggcatgcacttgtagtcccagctactagggagactgacgcaggagaatcgcttgaacccaggtggcagaagttgcagtgagctgagatcacaccactgcactccagtctgggagactctgtcttaaaataaaatgtagaacatgcttccctaatagcacacactagattctgtttatgcaataagtttatgcagttccttgtattaaaaaaaattataggaggccattgtttagaacttctgcactagaccccaagagaccagactaaaataaaaatggtatcactcaggctcaccacaccgaaactgagttatgtggccctccaagaaatcaggagacagaggtaacaggccagtttcaattttcaatcagcaagataatgaatttcctctgttttagtccctacagcaaagagtaacttgaagtaacctgatgttaaccaatcagttatctttctattgtactgtctgtctccaccttaccaggaaagtaactttgaaatgatcaatctgctttttgttctttgtttctactttctacagaccttttttctgtccgtaatgccaacctcctctgttccactcattgggacactcattccattttatggaatgaagtgttgcctgattccagaatcgcaataaggccaactgagatctttagatgtgtcaaatttttgtcttttgacacttgtgctggtctgtctagaacgccctttctcttcattccacatacccacattcttcaaatgagctcacacggcaggtgctcagtgcagcaactgacatgtaagtactcaatactattcaaaactgcgttttgtccctcacactagctattcctctccctctaacctcaatctatacacctttcttatgtagtttattactttctattgtatttaatgtaaatgtcttagattgccagagatccaaagcactggaaaaatcagtattcagtcttagtccatgtgtacccagcaccaagcacaaagtactctgtttacggtcaataaatctttccgtaatggatgagaacaaaactagtgtttgaactcacagctaaaactggatggggagtggagcggaggtgaaggagcacttaatgaggccctactatgtgccaggtactgtgcagagcacagcttcttcctttgtttcatttaatcctttccaaaaaaccgtatgatgcagcagtaacaatttcatctccattttacatatgaggagtttgggttacggaagtcaggaaacttgcctgaggtcacaaccaagtatgtttgggtctttccagtaccgcacttgtcgcttgtccgccttccaatttatcactcccctcctctccccgacgaaggtcgaggactttctaggaaaacacgcagtctccaaccacttccgcctggcgagcccagtctcgcacttcgctgccagaaccacagcgagcgcttgtggcgggaggaaaggaggggagcagccgtcaagacgcaaggccccgcccactatgtcgctgagacgtcatcacgcagggccgagtcggcgcggccacatcctttaaatatggtcttttttgggcgcgcgcgacaatgtgaggagtggggtggagcgtgtgtggtgtgtggctgcggcctgggcaagagccgccgcggaccatgaggtgggcggaaaggctgtgttgcagcccagacgcggacgggagggcgctgccgggccagcgggcgtgctcatgcaggggcgggaggagggaacatggcggccgggccaggaccctttgctcctggctctgcgcggctcctacccctgctttgcttgcccttttacctgcttttctggaaccttgtttcccctctctttgcgtcccctttccctcagccgtttcttttgccttcctcgactattcccccccagctccacactgggtcgaagtgtgagaggtagattaagtgggagccggtcgggcccgttcggtgtcgagagaccgactcctaaatttgattaggttctcgcaggtcactttatcagtctgcctggggtcacaggagaagtactgaacatgagagatcaagcctgatttgtagtcctgatgatgtctgtaagtgatcttgtgaaatgtcacttaagttgacctcaagtcttctcaaatgtgaggttctttgtgaaaggcctaagattcctgatatcgaggtagcttttgtcataaagtgcctgccagaatctgccccataacaaagcatggtcgggaaaacaaaagatttattttggcagtaagggaatggaaaactgagttgacttcccgttccatgccatcaagtggcctagtatgtaagcaatgagaacaccgttctgtttcagctcttatttccatagtgagtgtcctgagagtaacactcccggcgtagattaaatggaaaagggctcgtcctgtatcgtcattgctgctctgctacaaagaaccttgggtctgctgtattctgttttaggtgccacagtctgttgagggtagatgtttagggagagattcttcctcacctaatagcacctggcctagccaatcacttgcttttgatcttggccttttgtttttactcagctgagtaagttctggagggatcctgcctcttggagccttcgcagccaggcagctgtgaactgtgagctagagtgaagcagaaatctaggaagatgagctccaagatggtcataagtgaaccaggactgaattggtgagttgtagccactttgtaatccactgaagaggagtgtagtggggctgatggttgacataagaaaatagatttctggcatagagagatttggaggaaacagaaaatacaagtttagggtctcagaatttaccctatcctcatcttcacatacggaatgctagagttatggctgactgtacttccactcctatagtggaacaacacagttcagcactcaaattatttttaggtataattccctcaggtatttattgttggtctcctgtgaaggagagatactggaattttcttgagtccaagaaccttggcccatttccatacaagtaataaaaaagaccctctttaagaatagacatgctttttgttatattgaaatctatatcaaatgatataaatgcatagactgtattttaaaagtgtatgagaactttgcaaatagagaacctggttaaataatatagtggttttgtagccatctagctaatacatgtgctgctttagttcattttaacacacatttactaagccagccaaggaggatcaaatgttataaatggttacaaagagtattaaaatagtacctgactcagactattaagtcagtatgttcattgagtatttgtttattgctaacaacactcccatccccagggagctcacaatccctgagaccctttactttgtttttatatgatgtgcagaaacttaagaatttattgagatgtcacagatacaataccacgacaaggtaataag

SEQ ID NO: 1886195 - DNA, 4001 bp, Homo sapiens
aaagatctcccaagaaaagtgcatcttttacttatataaccttttgtgggcactgtcttttttcttctttggttgttaaaggcaagaagaaaaaagtttcagggggttacctttgattatgagccacattggatttcttacagtgagaaatagatctgacagcctgttgcttggaaagatgtggtttggcttgatagcttagaagcagggcaaggagccattggttgatgaactggaagggaaattaagaaatcatgttggctgggcaaggtggcttacgcctttaatccagcactttgagaggctgatgcaggaggattgcttgaggccaggcattcaagatcagcctgaacaacatggcaagacccccatctctacaaaaaaagtaaaaattctctgggcatggtgccacatgcctgtagttccagctactagggaggctgaggtgagaggatggcttgagcctgggaggtcaaggctgcagcgagctatgatggtgccgctgcactccagttcaggcaacacactgagaacctgtctggaagaaaaaaaatgtcactgactacctcattctgcatataagaaaactaagacccagagaagctaaattatttgcccaagtcatccaccgtgttcactttgggcgcagggtgtatgtgtattttaggtttagaaacttggttccaccccgtcattcaccacaattctatcaagtccctatctctgtagagagcattaccctgctcgtggtctgtttgtgaatctctggggaaggatcttggtgttcttcccagtcatttggaagtgaatcaaaacctgcacaacagctggacttggttcgatgcccttcggtagtggggaccaaagtccttgcctgtgctgatcagcagcccacttggataatgcagccacttgctagtgagtaggcagcttccttttgtttatttttttaaatttaagactgggtgtcactgtgttgcccaggctggacttgaactcttgggctcaagctatcctcctgcctcagtcacccgagtagctgggattacgggtacccaccaccataccaggctctttctctagactttagagagtaaagcgaatggagcttgggatctagaatagagtacacttactttaaggaacttggttctccgtctcatgctgtcttccatcaaatatgaggatattttctagtcagagtacttggtctgaaaaccagagtcctaggccatgagtcagtatgaaactgagggacatcatgagtagcaatggcatagctttcactatcacatggtaattcagtttggttaaactaatactatgtgagttgctcaccccttaccaaagtcatttgtgtcacacttcccaatttgtaaagctcttcatacatccttatttcctttaattttcacaacagtcttttaagtgtcatcatgattgtatacaattttaaaaaccaagaaattcaggactagaaaagttaagtaacttgttcaaggtctctcaacctagaagcaggaaaatgggctatacacgcaagctcaggtcagcttgactccagatctagttaccttaagagctgcctttattcttggattcctcattagaatcagaattatttgcttccttgagacttattgtagtttatctttagtaagcctaattctcccaaaaatctcgattcagagctactgctggtggtagcactaggtttgcatacgattttttttctgaaggcctttctccttccacttgaggaaaaacactggcaatgtatgactgctatgagctcactgaggctgacctctcctcctggtgagaaaaacaggaatcttgtaacctctaggaaaatgagaaaaagaaaaggggagacccatccctcatttaagggtgagaaaatggctgctggtaacaaacccaggcacacatgcctgctgcgaatgaaggcctaaggtgggcaagtgtgggtaattcggtcagctggattcctggcagaatactatgttctagaatattccggaacattctagattcaattcaatatgctcttctagtagtagggactgtggtttctgtgtgtttgcatcagcatctgagtacatctttcacccaaactcaggatgagtcttcctggtttaaatatggctgagggcactcccataggtttaaattatttacagagctgactgctgagtggtatgctccaaggagtaaaacttttttgagtatttactcttttgagggtacatctacactagtgtttttaaagatttgccatgagtgtacttccagtttaatataactttccacagagaaatgtcttattatgccaattaaactttcctgagcctcagtttccccatctgtgaaatgaaaaggatgttttctgctttttttggtacttctatggaatcatttactatgaagtactagagcttctatggagaaattaggtttcagaggatcaaagagaattccaatacattttctgatttttttcattaaatttgccttttgtgtgtttgtattgtttttgtttgttcactttctctagggaaatagacttctgtcttcagaatggctaggttaaaaaaaattaaatatcatgcacagtcgtatctccataattaagcagttgtaatgcaattttaacaaatattgctcttgtgtcaggagtgtgtcttctaagcttttctccataaaaatgtgtttattaattgattggtatatcttcattggctataataaatataatttacattcttcttgtataggttaaggctgccatataaaatacagaatgcacagttaaatttgaatgtaagataaactacaaattagtatcagaaattcaaatttcactgggtagcctgtattttatctactaaatctggcaactccaatataagtgtagctcccagttatttatattgattattaattgacagttaaacaaaactgagggaccgagagattgtgttgttgccaaagtcatgcttcctcctggagacagataatgaaaagttttagctccatgccagctactgcgacctccgagatcaagcagctttcttgggaagattttcaaaatctattatcaatgtaatcgtcatgaaaatatttgatgagaacactgcatcacgctgtataataaatttaagtagaaaagtcaaagcagtggtattttcatcaggcctttggatgtcaagagaaaatagttccacactcagcgaatatagataggtcgttttgggctgtattaaatccaattgtgtggaggttttgaataatcaggagagacagcctaagcactttctcttcaaagtgattttacagaaagcactatttcctaaggaaaatacacatatatctctcataatgctgaaagtgcactaatgtatcaatttattggtgctggtgtcatgagctggagttgcaaattgtattcagattttaaactttactccctgctgctgctgggggaagttcccttcccacgataaaggttatttcaaaaaattctagaacacttttgtagttttcatgtgagacagtcttcaaggatttttttagaaggttctaacttcactttgtgaagccaactcaaacatgatttaaaacaaacaaacaaacaaacaaacaaacaaaacaatagttttcctcaataaaagttgcggggtcggggagaagaatttgagttgggctatgtaatttcaacttccctaaataagtcctttggaaagtgttggggggagcaagtgtgtgattttggtcttggctcacaacttcggaaccaactttttaaaaaatgtctgccgtggattttcacaacagatttcttccccgtacgacatgttccctagctaagtaataggtctgatgtggctgccaaatttttcaacaacttttactttccaaaggagggttaaatagttcccttaataacttgaaagaaaaaaaaatttcaaggtttaccacagttcttagtcacaggctaa

SEQ ID NO: 1886196 - DNA, 4001 bp, Homo sapiens
ggggaagaggagctgcacaaggatagcattcctctcacaaggtgagcagtctcttacagtattacagaccccgatgacctgttcttctggccttaccttcccatgccctcattcagtattcagaacacttgaagtctgtgtttacaccaaagaatactatattaggggcaaacaatcgagccacgacagcagtcatcaaatcaacattaagggctctcatgaaatatggaatagacttaactggttccagaagagcagaatggaggctaagaaactggtagggggcctatgggcacccacagctggttatggaatgtatggattaaaggtctcagattcagctgaggtccctttggaagccaagaacccatagctttatcatttgaggattagccagaagcccaaatatccagaaagtttacctcaggaacataattgtctctcctttctctctcctcctcctgcagcttgatggagatacctcttactgggcctctctgaattcgcttcatcagatgcgtgacataactacaaagcacacacagccaaagagaacagtgagaagacaaatcaactcccacctggtactgagcacatgtgcatatataaatacccgctttagttcttttccacagtgagaaggaagaggactcactatcctgggacctcctacacatagaacctccactggcctgagcattccttccccttggtttctcactctctattcaaactctccttcatgatgatcaagcgccccacccccaactcgccccgccccgccccgcagtttcacgacccttcacagccttcattttcttccaatttcaaattcacataacttggcaattaatacgttgactttggcactattcttccaggccatatgcctataaatctctcgaacagtaactgcaactgtgaagtaagcattagaagttgacatccagccgggcgaggtggctcacgcctgtaatcccagcaatttgggaggccgaggcgggcggatcgcttgaggtcaggtgttcgagaccagcctggtcaacattgtgaaaccctgttgtctactaaaaatacaaaaattagccgagtgtggtagcacgtgcctctaatcccagctactgggaaggctgaggcatgacaatcgcttgaacccgggagacggaggttgcagtgagccgagatggcgccactgcactctagcctgggcgccagggcaagattccgtctcaaaaaaaaaagaaaaaaaagaaagaaaaaagttgacaactaaaagcaacgtagcttcaaagcaagaggtctgacggtggctaccttcgacccagggtcaccgcggccagtcatgacacaggcctaagttcacaacagaaatcctgcacacgcagagctctagcccttctccgggacaccagggagtctcaggctaacgaaaccaccaaggcaccgtctcttcccgagtcggagggcggcagagcacacaaacagatcgcggagccccggaggccgaggaaggcccgactcaccctgctatcttgttgcggagctttttgctggggataatggcgatctcctcgcacacgcgcttgttcgtgtggaagtcgttgcccaggcgcgtgtagtacttttctatgatgacccgggccgccttcttcacggttttggtgcgaacgcggccctgcgggtggagaggacaggatcactcacgagccagcgcaaccttctgggaagagtgcggcgccgagccccggccggtgtggttggggaccgccggctgcgctgagccggagagggcccggctaaacagtgccgggcgccgggcttaatgcggaagccgccggcccgttgcgctccagcctgacagggctctgcgccttcccggcccagggcctctctgtgggctgaggaccgcgggaagctgcagatgggggacgattgtggaggatggcggcctcgagccaaaacacctaccatgttggcgggtccttggtaaaagaggaaacaggaagcacaggcgaagcctgttaaagcttaggccagaaagccgcttccgcccggccacggtcgctctgagcctactcgggagccacacagcgccccctggcggagtggagcgggggcggcggtggcgcgcccctccggtgggcagggtgtctgtcccgcccccgacggctcctccctttccgctccccgctcccctcggttgacttgggctcgcttctctcccccatctgatttttaatgggaccgcccgtgcgatgtgctctagcgtagcgtccatctcttccacacacgccagggagaggagaagcatccggtcctcgggaggaccgagaaaagaaggcgatccagggccgtggaacaatgaggaagtgggggatggcggccgcccaggtcccccactcagtccgcgggccggagacttgtcaggtagagacagggtgcgactgggcgagacgtatctcatttcttccgggcctttgctcaaatgtcgccttatcagagggctttcccttcaaacttaggtaaaataactccctcactatccctgcttatatttcctagcacttgccgtgtgattcggcttatttttctcaactaggggtgagctccatgacagtaatggtcattttgtttagctaattcccagtgcttgaacagcgcctagcacgtaacaacctctaacattgacgtgaagggcccagctcaccagcagagctcccaacacctcaggtaccttctccatccactatcttcaggctgttcctgccgcacccatcctcaaaccagggccttccgaagccaccagcgcaggctgccccgatgggccgcagcctaggtagggccctgcccccttcttccaactctgctccctgggctgacagcaatcctaggctcccacctgacaggggaaggctgagctggccaggctggatgagttaagcccagggctgtgcctcattcctcaacgcaccttgggtactccagtcggactctcaactgattggggatggaaacctgaaggacaggaaaccctggcagcaaaaagtaccaatgggacaaaagaaaaggccagaatctcagaactgcgggagcaaacttccagtcaagctgctgtcaggcccgaagtgaaagatcagggtttttgtttttgtttttgtttttgagacggagtcttgctgtcgcccaggctggagtgcagtggcgcgatctcggctcactgcaacctctgcctcccaagttcaagcgattctcctgcctcagcctcccaagtagctgggattacaggcgtgcgccaccacgccctgctaatttttatatatatttttttttagtagagatggggttttgccattttggccaggctggtctccaacttctgacctcaggtgatccacccgccttgtcctcccaaagtgctgggattacaggagtgagccattgcacccggccagccttttttttttgagatagagtcttgctcagttgtccaggcttcagtgaagtgacatggtaacagctcactgcagcctcgatttcctgggctcacatgatcctgctgcctcagtctccctagtagctggaaccacaggcacacaccaccatgcctttttttttttttggtagaaatggggtctcccatgttgctcaggctggtctcaaacccctggggctcaagcaatcctcttgcctcagcctcccacagtgctgattgtaagcgtgagccactgtgcccagtctggcctctcctttatttatttatttatttagagacagtctcactctgttgcccaggctggagtgcagtggcatggtcttggctcaccgcaacctccacctcccgggttcaagagattctcctgcctgagcctcttgggtagctgggattagaggtgcctgcaactaccacctggctaattttttgtattttcagtagagaaggggtttcactatgttggccaggctggtctcaaaatcctgacctcgtgatccgcccaccttgg

SEQ ID NO: 1886197 - DNA, 4001 bp, Homo sapiens; identical to SEQ ID NO: 1242354

SEQ ID NO: 1886198 - DNA, 4001 bp, Homo sapiens
accgcgcccagcctaactttctcttttgacagccacattccactattgattcttctttagcttattaaccaattatgcctctaggtctctttccagatgctaaatcaggcttgtcataatgtcatatgcagatagctgagaacaaagcaaccatgggactttacaatgaaacctattgcatgttttcacatggatttaggtttgtcctgcttttctaattcattcgagcactgtactgcttcagccagggagctagagatgtgagtgggcaggagatggcaggagagagccaggaaggatcttttttgtggtctcgcaggactgtgaagatgtgaagtcacagaagctagctggccagggggaagcagggggctagggcataacttgcccttgaggtgaggaacagagggaagttacacacacacccaggagcaaggggaccagaagaggaaggattgcaggttctgagagaaggttgcttaaagggggaaggactcatgggctcacgtgagagacacagccgatgtactggttgcagacttaggcttaccaaagccaatccccaaatccaaaaccacctacacggcaatgagaggggaatgggcacatcagtcatggaacctgcatagggtggggtgtgatgccctgagtgcacagactgttttcaaagagtcttaaggacagaaaaatgtttttaatttgaaactaaaagccaaactgttgatcccaaatatgtagaaagaatctgtggtgtgtatgtgtttgtgtgtgtgtgtgtctgtgtacctatgtgtatggatgaatgaatgaatatgctgagcatgtattctgtattgagagagagattaatcaaaaagttaatcttgcttatattttccagatctgcctcagagagcatatgctagttatatcattagacagtgcagtaaatgttatcagaatttccagtttccaagaatgaggacaccgtaaacagagtgcagtaatggggcccctgcttaatacttgtatttggaaatctgagctgactctgtttagtgaaggtgcccatcatccaaggggtctgtgccttctgttgtccatgggctggcatgacagttggtttgataaatggatacgaagaagaagatgtcactattgtgatgaccacctgttgagttaccagggcttgggataaatttctgcacatcatacagtatgggttagggatcaggttttattggggaaacccccagagctgagacccagagcaagttgttggggtccttttcagatgacactccttgtgtcctgcagacactgttcttgttctcacaaagctcacagcatcctaggaagacagacaggtaaccagaagactcataatccactaggtctcacccccgtggagctgcccagattttgccacagcccatcactggagcccgccaagatgtttttgaacattgttatcccaaatttgctgttctttccagatttgtgtcacctgcacagttgacaaacatgttctcattatcttcatcccaatagcccaaggagccagcctggcagcagaccaccaggagggtccgcagggctggtgggtccttagagcactctgttccttcagccaggtatgaatctgcccagaggtgcaatcagctcaggtcctgtttcttagccctgtgggaattcagacctctcctgggcttctcactttccctatgtagctcctggcctctggtcaagcctccccaatggtcctattgtacactaattgctcccagacctgtaacctcccacccagtcctctctcttcatgcccacagcctctctaccaactcacaccttctttgtctcggcctgaacaacaaccagtgtctcctaactggtctcttggcctctactttcttcctcctcctaccccatctttcattctataaccagcatagtcttttaaatagacatctgactgacatatcattcagcaataaaaaggaacacaccactgattcatgctaccacacaacgaacctcaaaaacgtcatgctaagtgagagaggccagaggccaaagaccacatattgtatgattccatttataggaaatgtcaagaagtggtgaatcgatggagacagaaagcagcttcgtggttgccaggggctgggggtaggaatagggattgagtgcaaatgcacatggggactctttggggtgacagaaatgttctaaaactggatgatggcgatggtggtacaactccacgaatttagtaaaaattattaaattgtacacaaaacatctggcacatgcacagggcaagggaggggtgcgtgagggtggacagagtagtgttttggcgtgctctccaaggttccagcatattccactgtgttttggtgtgaggtcatcatggcggatttacaaaggtgattgttatgctaattatttgttggagggaagtttttttttttttaaaccagagataataaatatattcttttttttttgagacagagtctcgctctgtcaccaaggctggagtgcagtggcacgatctcagctcactgcaacctctgcctcctaggttcaagtgattctcctgcttcagcctcctgagtagctgggattacaggtgcccaccaccatgcccagctaatttgtgttgttgttgttatttttagtagagacagggtttcacaatgttggtcaggctggtctcgaactcctgacctcgtgatccgcccacctcggcctctcaaagtgctgggattacaggcgtgagccaccacaccgggccctaatatattcttattttaaagaaatagatctgactgtgttaccctctgcttaaccttcttgaaccctgtgcctgtgagacagagccaaggccttaccgcagcatccagcgcctccccagcccccctccagctgcttctccttaagaggaggtgtccccaacacaccaggcacatttaatgcctccatccgcccttcatccccactttgtgtttctgccaaacttccatttgtttatcaggacccagctcaaatcatgccttgcttagtgggatcagtggttctttggtctctgctcccatagcgtttccattaaagcatgttgtatactgtaacacagccacttgtatctgtttcttggaagaaagtatgagctcgtgagcggagagaatgtgtcttagtcatctgtgctttctcaggacacatagtggatgctcaacgtctcattaattcactcaacagccatctcttgaggggggtttctcagagtagggcttctcaatcttggcactactgacatcttgggtcagataattttttgtcatgggacctgccctgtgccttgcaggaagttcagccacatccctgggctctactctctagatagcagtagcacccccaccatagccttgttgcaattaccaaaattggtctctagacattgccaaagtttcccttgttggggaggcaaaatcacccttgttgagacccgctggtttggaggcatctctgtgataagccctgtgtttagtatcttcattcagtttcttggaaaacacactggggctgaggccagagcctgcagcccacttctggttatcacttgccccgctgaccaagagagcttgtcagcgtctgagcccaagcccagcctccttggctcacccgcatgtctgtctaccagtctaggaaacttgcgaagccagagagcctgctgggattttagctgactgctgatttcctcttaactctgtttgtcttcaccttttatgttttaaatcgtttgctttgatgggaaagacaggagtaagacgggagttgaatagttcagttttttctccatcacccgtgaacagcacactccgctccaagcgccagtgtgtccctttctccctctctgttttgtttggggcatactttaacaaagctctttctattgtccttgggatatctgcaagctgcagcgcattctggggcttggtctccccagcatcttgcaggct

SEQ ID NO: 1886199 - DNA, 4001 bp, Homo sapiens
ttctccattccatcttctactgtgaagcaactagggcattctgtgctgattccttctgcagaggagatgattgcgaaaatgtaaagaaaaaacaacatccccccacaccccaactttttacatttcaaaacttaagcccatcaggtaatggaaaaaccacacgaccactatactgtattgacaaatgtcaatagtggacttagattaaaggaaaatccagacacagacattccgtggctaaatcaaacagtgtttacttatctaaagtaaacagaaggggccatgcagtcaggacacaggctggagagaagagcaatgttatttgagacaggtagaggtgcacacgtgattggctcatgcttgtgcatgacagtgtccatgtggggctcacatcagacctttagaagcttgactgctccatttgtgccagctgcatgtgctgagggtgagtgtagctctatttactaaaactggtgctgttgtcattacctacttaatctaggaagatacttccagctttaaaactggtgcagtcctgcaggcagttagtgtaattatatgttggggaccacctcacataagccagatgcccctcatcaatctcagggtctcattacatggaatatgagaacatatttcatacagtccacattccattctattcaatccactgaagcacaaagacaatcctcttttatcatcctttgcctccccatgcccaaacagcccagtctccatgtatggctaaacccagtgctgtgggctagaaccaagcttagcttcccaggtgtctctaggaatcatgctaataggctcttagatcaggaagatgatatattacaaaagtacttgcaacagagactaattatttggaagaaaacatcatgggtgatatggtttggctgtgtccccacccaagtctcatcttgaattgtagctctcataatccccacatgttgtgggagggacctggtgggaggtaattgaatcacgggggcagttacccccatgctgttctcataacagtgagtgagttctcatgagatctgatggttttacgaggggcttttccccttttgctcagcacttctctctcctgctgccatgtgaaggatatgtttgcttccccttctgctgtaattgtaagtttcctgaggccttcccagttatgcagaactgtgagtcaattaaacctctttcctctataaattacccagtctcaggtatttcttcatagcagtgtgagaatggactaacaagatgagtaaagagcaagataggttgtcatccaaccctccagattagaatgttccctccctgggctgtggttagatggagagagtagggaggcatggtgttataaagctactgtctccagctcctaataactcttctgtgctcagctctgcaatggtgaggctgtgactttgcaacccaatttccttgttgccagctgctgcctgttaggtcctgataataggggatgctaaaaggagaccagacaacaggaagatggagaagagatgttccttccccatgcttgctgttcctgtcaccgttatcccagcagtggagttggttccagtttccttcgttttgctaagttcccacgatcagcccatctcaccccatcagttaccagcagcatccaggtagcaccctctcctaagaagaccaagtcctaacttagaccttccctctgagctcttgtgttgcagccgcatttagctcatgccccctcctgagagatctaggtcccagctctgtgaaccccctcctcgagtttcttgaggtaccgataccagcaggccgttacccttttctgagaagtctttgtcctagttttgtgagggcgtcctccaggattctgggttctcatagccccagccctttccctctgttcctctagtcctaggagtggtggctgtttcctgcagttactacgtttgcatgataacaggtgttccttttcttcctttcagtcctttgctatccatccagccaattccctatattaaatccccttgttgactgctaacaggtatgagtttttttgtagggggtgagggttgatgaaactgttttggaattagatagtggtgatggcttcacaacattctgaatatactaaaactcccttacatgggtgaatttcagggtatgtgaattacgtctgtaaaaatataaatcttctgtgttggaatgcctgactggatcctggttgatatagcattcatcaaggagagtgtgatggttaattttgtgtcaacttggctgggccacagtgtgctcagatacttggtcaaagattatcttgagtgtctctgtgagggtgtgttggatgaaattcacatttaaattgacggactttgaataaagcagattgccctccatagtgttggtgggccttattcccagcagttgaaggcctgaatagaacaaaaattcccgtttcccctgagcaagagaagattctccagcagactgcctctagacttgaactgaaacatcagctctcctggatctccagccctccctgctgattgtggacttctcagcctccataattgtgtgaatgtgagccagttctttataagaaatctcttggccaggcacggtggctcacacttgtaatctcagcactttgggaggctgaggtgggtggatcatgaggtcaggagattgagaccatcctggccaacatagtgaaaccctgtctctactaaaaatacaaaaattagctgggtgtggtggtgcacacctgtaatcccagctactcaggaggctgaggcaggagaatcacttgaacccaggaggcagagattgcagtgagccgagatggcgccactgcactccagcctggtgacagagtgagattccatctcaaaaaaagaagaaatcatctatctatctttctattatctatctagctatctatctgtctatctatctatctatctatctatctatctatctatctatctatctatctatctgtctatctcctattgagtctgtttctctggagaaccatgactaatacagacaggtagctgttgttgggtcccagggagaagagaatgagccctggtgaggccctgacagatttgcgggatctgagaatacgggcacctatgtctgtgtttcctggtagggcttcaaggggtggcaagatcgtagagaactgatggcttcagttgtatggagcatctaggcagatgagatctcacagcatttctcaattcttatgtcacaagaacagaatgattgccaggagcttgagagtggaacagaagtagcagagagacttttaaggaccactgactgaggactagatgggacaatggacaagttagtgacacgcttcgatgatattgaggacttaaaagatcacccctcccattggagccttggttctctgcaagtcctttgtaaatttcaccccagagaaagtaggaagagtccctaaattaactgaaatggtgtttctgctactccagcagactaggggctcctaaaagaaattcaattcagttttgggatatgaaaaaaattgttctttcttacatatctgaacttgtgaattgagattcacagccactttaaagtcttgtttttatttttatttttttatttttatttttattttttgaggcagagttttgctcttgttgcccaggctggagtggaatggcgcaatctcggctcactgcaacctccacctcctgggttccagtgattctcttgcctctgcctcccgagtagctgagattacaggcatgcaccaccacgcccggctaattttgtatttttagtagagatgggatttctccatgttggtcaggctggtcttgaactcccaacctcaggtgatccgcccaccttggcctcccaaagtgctgtgattacagatgtgagccactgtgccttgcaagtacttgcttttatttactttcaggagaaacttggggatttttgtggtatggcatgaaatggatttt

SEQ ID NO: 1886200 - DNA, 4001 bp, Homo sapiens; identical to SEQ ID NO: 1242361

SEQ ID NO: 1886201 - DNA, 4001 bp, Homo sapiens
cgtgcggcgcgcgtgggcccacactgcgatttcttatcactcttgcggacgggctagagttcgttctattttggggctgtgcttcaactgttcctctggttctgctgtgaacttcaccattgcctggaacagacagattctgtctgtgcttgcttcggatggatgtttagagaactcagtactgatcctgagggctccttctttgagagcacatcctgtccctcttcaaggactggaagtggtcaaaattctgtagggactaaaacttaaacatcccaaacataaaaaagcagaggaaaggttgggtgcagtggctcacgcctgtaatcccaacactttgggaggccgaggtgggtggatcacaaggtcaggagttcgaggccagcctggccaatatggtgaaacccagtctctactaaaaatacaaaaattagccgggcgtggtggtgggcgcctgtagtcccagctactagggaggctgaggcaggagactcgcttgaacccggttggcggaggttgcaatgacccgagatggcaccactgcactccagcctgggtgacagagcgagactccctttccaaaaaaaaaaaaaaaaaaaaaaaagcagaggaaaaagccagtcttatgcaaaagcctgcaacagcagtaaagacggcagacatgtggaaggctttatggagataaggccatggaccactgcatcctggccacccagctctctggggactgctcctacctgccttgccaaaccctaggcaaaaagacataggataattcaggtgttttgcaataggctcaataatgtcgacaaagaccaccgaagccgcttgcctctggctggctgctacagagtgagagctgttctccaaaaagacatccctgtcacatgtgctcctccctgatcacagtgaggctcataccattttaagcaattttcttatttaatggcagggacggacactcagagcagccaatgttgtgcattctctgaagagtcagcctgaacttggaaggaaagttgcagataccatgaccacgaaataagcaaattccagtttaacatcaatagtgaagtatgcccacactgctagtaacccaaggcagctctgtctctcacatacctctattttaactgttcggaactatgtttttatagctcacctccagcctctgtcttccaggttctttctgcaagtcttccaccagggccactgcctcctctccactctccggatgctgctgtctgacccagatctggatctcctggagaaggacagtcgggaactgttctaggaccagcaactccaggatctgctcttttgtacacttctctggccttagccactgacaacagagcttctggagctggaggagggcctctcggggtcgtgatgcttcttggtaacggaaatgccaaaagctctggcaggatgtctctggtccagggtaattcccttgaagggaaatttcctgctcccagtgggaatcttcttccagtttaactatttggagatcttgtactgaaggagtctggatttgttggtccacagctacagccattgttcaggtcagagaagagctttgcaaccgcactctaaagctcaaacctcttcatcacctcactgggaagccatcttagaacttccacttaggagtcactaagtggaacttctcttgaaattctagagtcagagacatacattacaaagttaactctagtaaaaatcgcaagtgttagcccagcaggcttgaggtgaagaagagagccttcctgtcccagccctgttgcatgccctggtgcctgtggagtcactggtggggtggcagttccggaagtttgataagaggagtcaagggctagtgacctggttgaaaagtagaggagcttgaagctgagagaatacggacgattcggccccgtgacatgttcttagcggggacgcaagaagcccgagcccaggtcccaaacacggctattcggctagccactgagcaccggaagcggaaaacctagccccagaaggactccgtgttctccggaactacatttcccagaggccgccgcccgaagacagacagcagcgttagcccataaaatgggagaatatctcaggcgcctattcgtttcagacgaatcattgatgacttttctaccagctgggtaagtggggcggggtcgcgaaccgcagccacaactcgcgcacctgggagggtgtgggtcttgcctcccaggggaggtggagatctctcgccctgcgcggccctggtggtatgagcgagaggggtctttacaaaaattttttgttttgttttgttttttattttttatttatttatttattttgaagcggagtctcgctctgtcgcccaggctggagtgcagtggcgcgatctcggctcactgcaacttccgcctcccgggtgcgagcagttctctgcctcagcctcccgagtagctgggattacaaggcacccaccaccactcccggctgatttttttttttttttttgtatttttagtagcgacggcgtttcaccattttggccaggctggtcttgagctcctgacctcatgatccacctgccttggcctcccaaagtgctgggattacaggcgcgagccaccgcgcccggcctttgttttgtttttaatagagacgaggtctaactatgttgcccaggctggttttgaactcgtgggcctctcaaagtgctgggattataggcatgagctgccacgccagtttataaagtattttcacttagggccgagggcagctgtttaaccctgttagtccctatttatccttactatgcagatgaatatatcgagacagcttgggactgaggtctctgcccttacgaagctgggactccagttaaggttttctgccacttaaagtgcttttctctggcatggttggtagctgtggtaatgctttaccactctgttcctccccccctcacttaccactcacacaattcctcatttcctgcttgcacagtcctgggtcattcgagattaataccattgactttcattcaacagttggggagcaattcgggccaagcaccaggcagcgagtgtgctgtggtgggagaaaaaaaaaggagacactccttcctcttaaggaatgcaatgcagcggagggtgcattttctaaaacgctgccacggagttatgtgcaacccaaataactacaatgcagtgctattaaatgctttgcgaaatgctacgtgctaaatggaggtgtgttcaaaggaaatgacttgatagaaataccagggacggaccggtgcagtggctcacgcctgtaatcccagcactttgggatgccaaggcgggccggtcacttgaggtcaggagttcgagaccagcctggccaacatggtgaaaccccaaatctagtaaaaatacaaaaaaattagcttggtgtggtggtaatcccagctactcaggaggctgaagcaggagaatcgcttgaaccggggaggcagagattgtagtgagctgaaatcatgccactgaactccagcctgggtgacagagggagactgtttcaaaaaaaaaaaaaaaaaaaaaccaaggaagggctgggagagcccagaatcgtgcagcctcagggaaaggacctactttacacattttatctggtttggttctgagaaggaaacctggaaccctgcattgtaggtttcacttcttatttaacagatgaaaggttcaaattcaatgaaggtggggagagctgtgcttgcccccacagtaggagcagcctgtggttaggtgagggaaggacaggataacagaaagggctttctagagaatcagttgcgaagcagggccatggaaattccttctatccctcttaacttagtgtcaacaaaaagtctcagtgcagacaaacccactgaacttaatttgggagaaaaagccatggagaagaccctttagaatgcacttccaaactagaaaccaaacggggtgcctgcaaggggg

SEQ ID NO: 1886202 - DNA, 4001 bp, Homo sapiens
caaggcagactgtttgaggccaggagatacagaccagcttgggcaacatagtgagatcctgtcactacaaaaactaaatttaggccgggcacagtggctcactggctcacgcctgtaactctagcactttgggaggccaaggcaggtggatcaactgaaatcaggagtttgagacaagcctggccaacgtgatgaaaccctgtctctactaaaaatacaaaaattagccaggtgtggtggtgcacacctgtaatcccagctactgggaggctgaggcaggagaatcacttgaactgaggtggaggttgcagtgagccgagatcgcaccactgcactccagcctaggcaacagagtgagactccgtctcaaaaaaaaaaaagtacattacaaatcacatccgtatagaagtaaatgtatttaatcaacaaataaaatggtcaaaacatttttacttctgtggcacctgatcaaaaaaatttggagactattaagatacaaattaaatatatgacacaacaaacaaaaatctcagattcagttctcttatttgtaccctatatttcagcatgcttgtaattctctgaatggtccatgttaatttatctcctttttttttttttgagacagagtttcactctttttgcccaggctggagtgtaatggcgcaatctcggatcactgcaacctccgccttccgggttcaagcaattctactgccttagcctcccgagtaactaggattacaggcatgtgccactacgccaggctaattttttgtatttttagtagagatggggtttcaccatgttggccaggctggtctcgaactcctggcctcaagtgatccgcccgtcttggcctcccaaagtgctaggattacaagcgtgagccactgcgcctggccttaatttatctttttttttttttttttttactgccatagaatatagagcctgaaatccaagttaatttacacctctgcatagatggctcccccattcaaaatcacctctgcctgacctctactgttcattcaaaatactttttttctttttaatttcttttttcttcctctcacccccaaatcaaaattcttctgaatcctcctttgtgaagttctccctctacccccagggacatgtaactatgctctcctttgcatcccaccctgcgacctactcatacctctaattacaacacctaccacactactggcaatgttgtatgtctgattcattcactactgtatttgcccacaaaggggcctgatcgtagtcatttttttagccctgaacctttatcacataccgggcacctcaaaaagtaacccagtagtatatgctgtggaatttagaactgtaataactcattcctttacatatacccaatcctatgccatccatacataccatattttaccaagaaatttaaatcacggattatttaaatcacattcctttttttttttgagacggagtcttgctgtcgcccaggctggagtgcagtggcgtgatctcggctcactgcaagctccacctcctaggttcacaccattctcctgcctcagcctcccgaatagctgggactacaggtgcccgccaccacacccggctaattttttttattattttttagtagagacggggtttcaccatgttagccaggatggtctcgatctcctgaccttgtgatccacccgcctcggcctctcaaagtgctgggattacaggcgtgagccaccgcgcccggcctaaatcacattcctttacatgtttgaaagtagtttataaataactttagggtattctacatggaacctgtattttcttccacatctgttaaaagttaaaaaacaaaaacaaacatgtatggagccatcgcacagaaaatctgataactatacagaccctgtcggcaggaaccatctgttttaatgtgtgtgactgtctatggttgcactgtacaactaacaaatgcaatcaataccaggaacagtcacaaaggtctcactaaagtcctatatccgagagctgcgctccaagtgaaatgcaaactttcatcataaattattttgcctaatttcccagtaccactttatccaatggtgtatatgtatatgaacacttttatcttgatatatatttttattaacaagtgctatataggatcagtgggtcaccagagttttcaaaagttcatattctacaacaaatttgatatacaacattctagatgtaccaaggctttgttttttttgagacaagagtctcactctgtcacccaggctggattgcaacgacgcaatctcggctcactgcaacctccacctcctggattcaagttaattctcctgcctcagcctcctgagtagctgggattacaggcgtgcaccaccccactcagctaatttttgtattttcagtacagatggggtttccccatgttggtcaggctgttcccaaactcctgacctcaagtgaactgcccacctcagcctcccaaagtgctgggattataggcatgagccaccacgcccagcccactaccaaggcattttaacttatctatttattgtactttaccatactctaattatatacacaatatggactaaggatctggtcctataatactgcctcctctaactacttctattctttctttcttttttttttttttttccagacaaggtctctcaccctatttattgcccagagtatagtggtgtgatcctggttcactgcagccttgaactcctgggctcaagtgatcctcccgcctcaaccccctgagtagctacaacaggcatgtgccaccacacctgattaactttttaaaaatttttgtagatggggtctcactcggttgcccgggctgatctccaactctaggattcaagtaatcctacctccatggcctcccaaagaactggggttgctccaaaggtaatgagttatcaattcacagtcacagatcaaactccttgttctactctttcctcccttttcactattgcatgtggctagtcttcaaaaaaaaaataacaagccaggcgcagtggctcacgcctataatcccagcactttgggaggccaaggtgggcggatcacgaggtcaggagttcaaaaacagcctggccaacatggtgaaaccccatctctactaaaaaaaaaaaaaaaaaaaaaaatacaaaaattaactgggcatggtggcgcatgcctgtgatcccagctactcaggaggctgaggcaggagaattgcttgaactgggacccaggagatggaggttgtagtgagccgagatcatgccactgcactccagcctgggctacagagtgagactccagctcaaaaaaaaaaaagttggccaggcacagtatggcttgaggccaggagtgtgagagcagccaaggcaacgcagggagatccccatctctacaaaaattttaaaattagccaggcacaatggcatgcacctgcagtcccagctactcgggaggctgaggcgggaggatcccttaagcccaggagttgaaggctgcagtaagctatgattgtgctactgcactccagactgggtgacagagcaagattctgtccctaaacatgaaacaaaaaagcaaagcgctgggattacagggttgagccaccacaccctgcctagatctatttctaaaagcaaaattgttataaagtagataaacctatattcttaccattattgctaacaaaatcttcatgtaaaatagggagatcaagtcgaattcgttttaaacaggtctgaaaatgaaaagagattatttatttttacctctttaccaatcatgttggggggagataatttgctattacttttccctctctaccaaaagagatttcaaaatgaacactttaaacagcaatttagcctcaactaaatctaccctaccatttagcatgtgaatgatatttataatcatctcaacacttacctgaacttcctttttacttcccaggtatt

SEQ ID NO: 1886203 - DNA, 4001 bp, Homo sapiens
agagcgcaactctgtctcaaaaacaaacaaacaaacaaacaaaaaacctctgatgttttccagcacctgcaaagtctgacaaactgaaagactctcatctcctactaaactctgcctactcgtataaatggcagctcagattcctgaattaacaattcacactgacaatttaataactcgttatacacacacacacctatcctgccaagctggactgtctactctgaaacaagggacagcagatgtaagcacagaaatagttccagttataaacaattaaaagatacatatcatgtatatttaaaaatgttctcggccgggcgcggtggctcacgcctgtaatcccagcactttggggggccaaggtggatggatcacaaggtcaggagatcgagaccatcctggctaatacggtgaaaccccgtctctactaaaaatacaaaaaaattagccgggactggtggcgggcgcctgtagtcccagctactcgggaggctgaggcaggagaatggcgtgaacccgggaggtggagcttgcagtgagccgagatggctcacagatcaagactccatctcaaaaaaaaaaaaaaaaaaagttctcagctactgaaatagaaactaccaagtaagaaacaggatatcacagagaaggcaagtttgaattcagggttctaataggctttatggaatactacacgttagtatgaacacggataaatggattaaaaactcaacacgtataaagttttaattaaatttttatttgaccaagaaaaaactgtctagaattgcctgacatttaaaatccacttaaagcagattagcaacttcaagcatcacaattattcagcataaagagcctttgttgaaacatctttctcatttatttagaagaaaacatctagaacagaaccaagcaaaacttttgtatttttgtaaaaaatctcaattcctgaaactactataaacaatctactgaaactgtattcagcaagggacagatttacctcaaggccatgttcacctgcaacctgctgataagtctgttaaaaaacaaagcaaaaaaaagagtttttaaaaattagaccactgtagccacaatccctaacactggacagttaaaacaaaagttatcaaaatctgttcttttcttagctttacctgtatcactttataactcctgagaaagtcattcacataagctgtggcctccccaccttaacaaaggggaaaaagaatatgtaaaaccaccacagaatcttggcgtaaactaacatgggtttagtaatacagagtacagtattcaggatttaaggcacccttacaagtcagaattggaaagttggtttgagacttgcaatctaaaatgacactgatttctgataaaattaaatgacttttatttagaaaagtgtgtttaataaattacttcctgctggttcaaatgacacacaatcactttgtatacatccaataagatatttctgaagtgtatacttggtcaaaagtaaaaagcagagcaaatgcatggacagtggggccttcttcttaatacttctcatcctccaaaatctgttaaaatcatcatcttccacaactcacacactggaagctgtccacagcacaattcactgtgatgtggcattctgtaaataagactacattggtcttgatgcaaggcggttcagctaccagactgcactataagaaaagtcctctcctcaacttaccaagaaaacttcgccaatttctagtcaccttcctatcaattagtagagcaagattctcacatgttcactatgtctttctccagttttctcatctataagtgtactactcctattttctataggaagacaatggaaagcgtgtaattgctgttggtagataagtaggtcttgaatttattttgcaaacaagacctgttctatctaccttttcatttaggaggctaaaagcagagtcagcttgatttcaaggactctattttcttagtctccagaagaacataaccaaatccagcttttaaaacactgtcctttaacaagtcaagatactcaaataaagatcatgtataacttcaagctataggagattaactctgtacatatgcttgtttcactgtaaccaatggttaattaatctaaatgcaagagaaaagttatttggaaagaagaccccagctggtcagcatcttttctgtcatcaggaagtctcctggaaggagtatgactatgacctgggcacaacaactgcccctaagttagtacttattttagagttgctactgaacaggtggtggttcttgtcaagtatatcatgtctgactactttactgcttgttttctgctatcaccagttccagaaaaaaaaaaaaaaaaaattaagcccaactcactaattgattgctttttcattttcccagactgtgacagaatcatggtttttagctctattttcaccttactcaaatcctggaggaattaaactatcatttatttgaaatgttacaaattagcctgcagttgattcaaacaacatgtagtcactcagacatagcaaataaaaatgttttggtatatgaacttggattctaatcttgctgtctctactactctcattcctaagtataaatgttaggtctcttgcttgaaaggaatttaagagatgcccttaaattcaaacagactggctcgcagaaaggaatataatccattcactgggaaagtacacagccaacaaaactgagatttcccaactatgcactgtaacaatgcagaaacacagttttagagatggctttactgggtatatacatcgctcttggtagacccatctattattctgccacccagaaagattcttaccctcctacttccttccaaacattcatttaatttaaaggtgacagggacagggagagggaaggaaaaaacaagaagcactatccaaaagtaagaacagtactctggagaaaggtaaaagatactcaacactgttttttgtaccatttacgatttataaatcagccacagagtcctaggcacccagaatggacctccccttccttgtctacctaatgcctgtatagctccaaaatcacctcttggaaacactgccttattcctccccctcccaggagaggttaagtgccacactcacctcttttagattacttcagtggctatactgcaatcattgacttgtgtctgctccacttgactataagcaaattgaaggcagggtttgtgccttcataatctctgaatgatctgaagatggaaataactgctttgtgctttcagggagctcatatacctgcaaagagaaaagagacatcaaattatcttccaaaatcaaaggaaaagcctctttattagaaagcaaagcagctttcaaatttgtgtgtgcttggggagtagaaggaaacattaaaaatatgaacctgctgggcatggtggctcacacctgtaatcccaacattttgggaggccaagacaggcagatcacctgaggtcaggagttcgagaccagcctagccaacatgatgaaaccccgtctctactaaaaatacaaaaattagccgggcatggtggtgggcgcatgtaatcccagctactcaggaggctgaggcaggagaattgcttgaaccagggaggcggagattgtagtgagccaagatcacgccatagcactccagcctgggcaacaagagtgaaaactccgtctcaaaaaaaacaaacaaccccaaaatatcaacctttcttctgtcccaatacaccttaaagatctgatacagagtcccattactaatagtgctccatggtgacttctaatctgggaagagtgggaggggacacagaacaatctggggatgggaaagatgtatgtggtttagaatgctcttcccaacactgcaagagacctttgacatgtttaatatttattatagttagactatacttaagagagcccaaagatcttcaaaatgtatattttaaa

SEQ ID NO: 1886204 - DNA, 4001 bp, Homo sapiens; identical to SEQ ID NO: 1242366

SEQ ID NO: 1886205 - DNA, 4001 bp, Homo sapiens; identical to SEQ ID NO: 1242379

SEQ ID NO: 1886206 - DNA, 4001 bp, Homo sapiens; identical to SEQ ID NO: 1242379

SEQ ID NO: 1886207 - DNA, 4001 bp, Homo sapiens; identical to SEQ ID NO: 1242384

SEQ ID NO: 1886208 - DNA, 4001 bp, Homo sapiens; identical to SEQ ID NO: 1242414

SEQ ID NO: 1886209 - DNA, 4001 bp, Homo sapiens
tagcacacacctgtggccccagctactcaggaggctgaggtggaggagctcttgagctcaggaggtcgaggctgccagtgagctgtgattgcaccactgcactccagcctgggtgacagtgaggtcctgtctcaaaaaaaacaagaaaagaattaaaaatggacatctgtttgtgttctctgtgcctggaattatacagctactggaaatacaagctactgtgcttgttgttgcatttttaagttgatacttctgcttatgtcacaatcacaacagcaatcattcctctacataatctaaaatgtctttgaaacatctgcataaagtagttcttaaaagttggtttctgtgggggcttctgaaagcccttctgggggttagtgaagtcaaaactattttcatatgaacaaaagctctttggagtcttcaataactgttaagtggctcttgagaccaacaagtttgaaaattgtttatataggagccaggcacggtggctcacacctgtaatcccagcactttgggaggccaaggtgggaggatcacctgaggtcaggagttcgagatcagcctggccaacatggtgagacccctgtctctactaaaaatacaaaaattagccgagcatggtggcatggacctgtaatcacagctactcgggaggctgaggcaggaaaatcgcttgaacccaggagagggaggctattcatggcttccccacaatgaacatccggttaaatgagctcctcagtacttcagataccccctatgtgatgtgaacagtttttcagtatttgctaatgtatggttttctgggcctcaggctcacttactttcttcacaggcttgccactttcctacaacacatttccatttcataacatgagagagatgactgcaataatgcacaagacacttaagccacacaagcaccaaatgtaagattacttaaaacagctgaggtttgactgcagtgcactctacagaatcagttttctagggtgagcacatagcttgctcagtgaaccccaggccgctctgtgtaaatgtatgtaacaggcaatgaaagttccttcttcacatattgttactacacatctgttgctaaaagggaaatgacagagcgacgtgacagactcatctccatctacaaactatggaagatgtagatgactgacacagttctaactcctaacacacacggattttgcctttcatggatttatactgtatgtagatgtacattaccacccttttcactcctccttgcaactccccgtcaacctcgtaaaaaaagacgaattgtctagcaatgcaaagaaacagtatggtgtacaacaaataattccgggctaaaaatgaagaaatcgcgctttcactctcggctctgttattaacaagctgtataactttcggcctatctcccccatcatgcttcggtttaagctaaaaggagggagatgaccaagatggctttgctctgcttctgacaccaaatgaccgccagcagattcaggaagcttaagaattaccaactccgtgtgtgtgtgttctaaaattaatgcaacaggtgttgctgcctccagcaggcgtcaccgattcagaatgtctgggttctcgcaggcccttatgggacacagaacagcacaacctatgtgaaaactgtaaactttagtctggtgagtgcatacttctcccttccacatttatactaacctcagctccgtgggctacgaagctcgttcttcaaatgaggtggagaaatgtaagcgcgatgaatgaggcccaagtcgctggtggcgctgaacccccaaaagatacacaccgcgacagatgcaacgacccctcacctctactcccgttcccagccgcatcctctgaaacctgatacgcctgcctgcctaccaggacgctgctgtcactggctctgctcggtggccagagacagtactcactccatgcggccacccctccaacgtcccaccttcctagtaaatccactctctttccggcggaaaagcccttctcgtttcctgcgcgtgagaggaagtcccgccccacgcaccagcgtgacattactggaagcgccgaggagcttcgcgcaggctcagaatcgctcagctggttgacgttatccaggagaatcgcgttggactcagggaagacctgcacaggatccggttgttgctgggtccgagggctgtagggagtggagaaagggccgggaatcgttaagcggggtctgggagaacgacttgcagattcacatttcctccgcccgcggatgtcctccggggaattgaggcttccttcctcagctgcccttgtttctctctttgctcccgctgccccttgttctatttcgtttcttactatttatgtagtctcattgcttgcggttataatggccaccactttattgagcattcactgtacaagcatctcgcagcaggcgctcataagcgtctggcaattcttggccactgctggaagcccaatcattcttttaccatggaagggatttgagagcctacataatcctgtactctaatagccacatggtactcttggggctaggaagataaagtagaaattgaaattgctgttgtattagttttctgaagctgccataaccaagtacctcacactggatagcttaaaacaacagatatattttctcgctttctggagtctggaagtcagaaatcaagatgtcagtggggtcttgcttcttctgagactctggatagaatccttcctgcctcttcctagcttctagtgggagccagcaatcattggtgtactttcgcttgtagctgcattactccattctcttcctctgttatcaaatggtatactccctgtgtgtctctgtctctgtgtgttttataaggacaccagtcctgttaggtaaaaggctcaccttactccagtatgacctgatcatgactaatcacatctgcaatgacactctttccaaataaggtcacattttgaggttccaggaaggacatgaattttgggggcgacactaaccaacccagtacagctgttaaagttctcaagaagtagacaaacgaagagttgacaaataaatgtagtacaagtggattcaaatttagttcagttttatctgagtgttcatagacattcggagtatccctttaaaggatgggtaggggccgggcgtggtggctcacgcctgtagtcccagccccttgggaggccgaggtgggcggatcagctgaggtcaggagtttgagcccagcctggccaacatggcgagactccgcctctactaaaaatacaaaaattagccgggcgtggtgacaggtgcctgtagttccagctacttgggaggctgaggcaggagaatcgcttgatcacaggaggtggaggttgcagtgagctgagatggcaccgttgcactccaacctgggtgacgagcgaaaatccatctcaaaaaaaaaaaaaattagttacgaaagattctctctacttctatcttttgaaagagactatagataatttgcataatttcttccttaaatgtttcatagaattcaccagttagaccatctggacctggtactttctgtttctgaaagttatcaattattgattccatttaaaaaatagatataggcctattcagattgtttcttcttgtgtgagttttgccagatcgtatctttcaagaaattggtccatttcatttaggctatcaaatttatgagcgtagagtttttttcttgtttttgtttttgggcatagagtttttatcacccttttaatcttcatgggatctgtagtgatgttcccctctttcatttctaatattagtaatttatgccttctcaattgtttttatagttagattactagaagtgttttgcttttattgctctttttcaagaacaagctttttggtttcaatgattttctctattttctgttttaaatttcattgatttctgctctaatttttattatttgttttc

SEQ ID NO: 1886210 - DNA, 4001 bp, Homo sapiens; identical to SEQ ID NO: 1886179

SEQ ID NO: 1886211 - DNA, 4001 bp, Homo sapiens
tgtactcatcttggacaaatgaaaagcattatttcagtaagtcaaagcttttaaagaaggtatcatcattgtgacttaaaacaatttctaaaggatggattttttgggttttgttgctaccttgacatcattgccgaaggctgtaattcactcagtagataaaacacccagtctacctaaaatgtgaagccacggtatccagccatgctcactagagttacacattatacaattgacattaaaacagaaagtacaatgtcccaaatttgttgccaccctccaaaataatttcaataattcctaggccatatacattttcaaatcctctgtaatttcttctcattttattcagtccaacccaaagaagtctgcttgtttgaagtctgggtttcttgttcagttgctgtatcacagagaatgactgatttgatctgaatatatccatattcttcaccacttccaaacctggaggagtctcaactgaagtggctaattttacagtttttaagtaaaagagaacagcctattcccaaagagaatcatcattggaaaacagtactaaatttcaagaaacaactatagccactggaatgccaacctgtatgttgaaatttcccaaacccaacatatgtaagtccaccagaagcagatgcttaaaatcaaacaataaataaataaaacaagttataaagagttcagtaattaacattaaacacaaacaggattacctttccttcctccaaaagggtaggtattaggcagaaattaccacactatattcattgagatcatacctgctcttaaaatgttatttttttaatctactgttttcaggaattttgtcttcttttacccaaagtgaatttatatggactgaatttagaaatggctgaatttactcaaatttaatttaatttagattcaaatgagtatagttgattcactgctaggaaaattatcaaaaataagctcgtttcctcatatcacgtagataatttaaatttatattagaaatgtattattttaagtgatatatgtctgtatttccaggaaattatgaagtgtttacgtcctcccatgcatttgaacacattggctacaaatagtcattcctattaataataaccttgcaagaaaaaaatatatggtattctacattgatttacattattacataagacaactttcaagattccctggtcatgatcacattttaaaatatgcgataacatgatgtatcattgctttttccatatcagtgtacattaaaagacatataatagcactctaagtatggttcctagatctgtagcatctagaaacttgataaaaatcaacttctcatacttatacctaataagccagaaacactaaggtcaggacccagtaaactgtgtttaaaaagccctcaggtgattcttatccacactaaatttaaacaaatcactgactaaccaaggctatctagaaataccatcctttattcattctaataatttatcaagaaaagacatttaatcagcacacttcgctaattaaaacaatctcagtgaaagacaatattacctatttatggtcacctcaagaaaaggtatagaagctaacatgggaaaggtagctgacattctttatctgaagtaaaacagaaacttacatgttaaatgataattctgactcctaacatacaccacctattgttccacaattcaaaccatgcaagttttccttatttccaacaaatgaaacaatcataacattactctcaatttacctgtctcccttcatacaactcaggaacatgttccaaccacattaaaatttgcttatttgttttcctcctactactcattaatgcaatttgccatcttctgctaactcattccttccactactctcagcaaattactttgatcatgaattagcaaggctggacctcacgctccctttgcaggaatggaaagtgtcatccaattcaagaaataatgattctcatcattaagccaaccctcctcctaccactccaccaaaacacacacacacacacacgtgcacacacgcacacacgtgcacacacgcacatacacgtgtcatctcttccagagattcttattttcaggggatttattttaagtcatctgtgaagtatcaccccacaaatgaggttgtttggatgggctgggccagcaactaccactgcattctctaagttgcaccaaacatctgaaggtaaaagaccccctgtcaacactacacctcaacatatctggcactaattccctatttttctcacttaactgcttatttctaatctaattcagttagtaggaaaggaaaaactcatttttctcaattcatccaacatatcgctaactgcctggatcaagaacactaagagaaccaaacaaatctgagaggttataaatacactaacatttctaccagaagaacagagactcaaaggcaagaactataaaataacttatctacctcacttttagaagaatgttcatttctctgaaccccaacagcttttcactataaaccagtcatttgtcatgtgatcacagtatcaacacccacatcattaatatgtacatatgtatacacaaacacataacacatacagaatttatcaactaagataacaactagagaataagatcttgctatattcaatgttcatggtatatttaatataggcttttctaaattaccttcttattcaccattcctccttcataataacgacttataggcaaagcaaaagcacctactcatagaatgtcaatcacagataatgaaagacccatcaatcatacaagcaaaaaatagagtacagaataatgtgagattagagatgtgattcaaaaattgcatggtgtttagcaaatcttttaatctccgtggggctcagcatcaaaaactatataatgccaatttcatcaccttaactgaatctaagagtcaaaattaaatctccacctacgtcttgtaaagatacagcaaagggttaacttaattaaaagtagaattaaattaatctctggaaatgtaacttaagcattctgctaaatatataaattacgtctcctctcaaaccaatgtctcagccacaaactagcaatttctcaattatatgccaaatggagaagctgcctcagtgacagaaacatgctcatgaaactttcatatagggttggaaccgggtgatgcaagcaacagggttaaaaaaaaaaagagcataggagctcctaagtacttattctcttgaaatgatcacttgaaatgcatagtagaaataagcaaaggtgtggctgggtacggtggctcacgcatgtaatcccagcactttgtggggctgaggcgggtggatcacttagagaccaacctggcaaacatggcaaagcctgtctccacaaaagcatacaaaaattagccgggcatgttggcacatgcttgtaatcccagctactctggaggctgagacaagaagtgcttgaatgcaagaggcggaggttgcggtgagccaagatcatgccaaagatgagacataccaatgcagtgaacatagaacacactctacaaaacattaactgtactaaaggatctagaaccaacttccttgtattgcactggaaaaacctacaacacgccattatccttaacctgtactgataggaaaaaccatgtgaaatttagagtctaagaatttatgttttgagtatttgtatcctgagtccttagactgacagtaaggctggacttcagagtaatcacgttgagctttacttcatcatgctcagtaaacacagctcatcacaaatccagcccaggtctttcccaatgtctttcccatcaactagtaaaaatacgtaaaaaaataaattcctgcagatagtgtatctctacccataaggacagtccctggcctggaagaataaatgataagagttttatgtgacaatggatataaaacaacagtaacaacaacagtgtcattc

SEQ ID NO: 1886212 - DNA, 4001 bp, Homo sapiens
attaacacattactaagaatcattgggagttcttgggagaaataagaaaatttataaaatagtttgaaatcaaaggaaacaaaacacaacaaaagaaaatatatatgtagctaaaagagttctttgggaaatttatagctgtaaatgtccatattaaaaaaaggaaaatctcaaatcaataatctaaacttttaccttaagaaaacagaaaaacaaagcaaagctaaatcaagtagaataaaagatataagaataaaatgccaataaataaaataaaaaatacagaagaaaaataaaaatatcaaaagctggttcactgaaattttttgtttgtttagtgacaggccaggtgtggtggtgtgttcccacactcccacctactcaagatgcagaggtagcaggattgcttaggctcagaagttcaaggccagcataaacaacacagtaagactctgtctcttaaaaaattgacataactatatctacactactgaaaacagaagacccaattttcataaaatctgggatgaaaatcagactaacacccttatataaacaagttatgtcaacaaattacataacctagattaaataggcacattcctagaaatatataaattacaggaactgtcacaagaaggaaaaacagaaaattgaagtcacctttaacaagagattgaattagctactcaagtttccacaaataaaattccacacaaatgatttctctgatgaattctaccaaatcattaaagaaataacatcaatccttcacaactcttccaaaaaacaggagagcagaaaacatttcccaacttattccatgagtctactattaccctaatttttatcaaaaccaaagacatcatcaaaagtgaatcacagaccaatatccctaatgatgccaggcatggtggctcctgcctgtaatcctagcactttgggaagccaaaacaagaggactgcttgagcccagtagttcaagaccagccttagcaacacagtaagatcctatcttcacaaaataaaaaatttaaaaattagctatgtgtggtaacacatacctgtattcctagatacttgggaggctgagggtggaggatcacttgagcccaggagttaagggctacagggtgaagagctgaagtgagctctgactgggccaatgtactccagcctgggtgacagagagagactttgtcttcccaaataaataaatgaataaataaaataaattgggcaaaattctacatttgtcatttcatgcaaaattcaaatagaataaaaatgtaaaggacaatgattcagaaatgaaggtggagagactcaccaaagtaaaatatacagtatttagatattatccagtaagccactaaaaaaatcaacaaaaagatctcaggatgtggcatggaacgcatgacgtatatgaattccaaaggatgttggtttaactactcacccctattttctgaagtggaggacctcattccagccctcctctacctcagcaaaacaaaatagaagaaaaagaaatggtctcagaaaatactcaacagtaaaaataacaaagcactaaaattggttcctttgtcaatatttaatacaggcatgcagtgttccctgccttcactatacatcacagttccttgacctttcttgactgaaactttttcattttttcatttgttaatcaagaacatatttcccatatatgtatctatctacaattctctgctcaaaatgaacaaaataaagtgagtcttgggtcactaaccatactaaagtgcatactgactcataagacaggatgctaatgccctcttcggagagatagaaaaggcacgctcacagaggtactatgttgtcactgagggatccccaaatagagccaggctctgagagtcttatttgtcctattggagggccacacatctggacctcagattgacatctggaatgagtccctcagcatcctcagacaattattctcatcatcgatccaaacaagcaccctcccaacaaataagcatttccacagccaggcttattttgtgcatggttatctaatccatcatcagtgagaagagtaaatgtacagtagacatttgtttagtatctgaataatggaactctcatatacatagcatgaaaaaacatatgactgaattgttctaataaaattagattaaaatctattgggaatttttttttttttgagacagagttttgctcttgttgtccaggctggagtgcaatggcacaatttcagctcactgcaacctctgcctcccgggttcaagtgattctcctgcctcagcctcctgagtagctgggattacaggcatgtgccaccccacccagctaattttgtattattagtagagacagggtttctccatgttggtcaggctggtctcaaacgcctgcctcggcttcccaaagtgctgggattacaggcgtgagccaaggcgcccggccagggaaaaaatttttaagtccaattaagaccaattaaatgaattaaaacttttaggagtaggcgaggtagcaaaatcaatatatactgtgactacatgacaaatataagtagaaacatctgtgttcagaatgtgccagataaaattttttaaatatttaagccaggcatggcagcacatgcctgtagtcccagctactcaggaggttgaggcaagatgattgcttgagcccaggagttcaagggcagcctgggaaacacagcatgaccccatctctagactttaaaaaataaatatttaatacactgaatttcactaaaagattattttcatccaacaaaaaatggtgagaaaaggaaatatatcaatacttcccccaatttattcaggttactacaaaaaaatccctttttaaaaaaagggaaaagataatgagattccttgaacaaagtagggatactcacatagcaaaaaaaattataaaatattataaaaaatatataaaaaaattataaaaaaattatagaaaaaagttataaaaatattctcctttgagcctctaaaatcatgaactctcagatcctgaaattctgacatcactggccacaacacacacaaacaatttcaaaatcaccacagcagctgctcacctctcttccttgaaattctgtgacatcttctagacctgcagcaaactattaaaaacaaagtaaatcagattagacaatatacaaaattccctaaaaaataagatacaaacattgtttctgtaataattaccacagagcaatctttgcacaagtcacagatctttggtcctttgtcacctttgtcatttattcatttatttcctcctccaattcctctttatttttgagatggagtcttgcactgtcgcccaggctggagtgcagtggtgcaatctcggctcattgcagcctccctgtctctgattcaagcgattctcctgcctaagccttcgagtagctgggactacaggcacgtgccaccacgcctggctaatttttgtatttttagtagagatggggtttcgtcatgttggccaggctgttcttgaactactggcctcaagtgatccgcccacctcagcctcccaaagtgctgggattacaggcatgagccaccccacgctgctaaaattcttccttctttaaatagtaaaaatcggccaggcacagtggctcacggctgtgagcaattttctcttcgaatcagattctgaagttgtattccgccaaataaagactttttgaaaacgccatgtggtgggtaaaattaaatacacataataggggtgttgtgaaaccaatattctagaagagataaaaactttaggaatctacttcaatagtacagtagatatatatctctctctctgtgtgtgtgtgtatatatatatatatatatatatataaaatctttgagatctatttcaaaaagttacatagaaattaaagatagaaagaacagaaaaaataaatgaaaaatttcataaaataattg
